United States Patent Application Publication US 2021/0024907 A1 - sequence listing, part 2

SEQ ID NO: 753 - DNA, 2227382 bp, Homo sapiens
cattttatgaagccagaatcacactggcaccaaagccaggcaaagataccacaataaaagaacactacaggagggtaactctgatgtgtatagatccaaaaatcctcaataaaatactagcaaaacaaattcaacagtacatcaaaaggattatataccatgatcaggtgggatttatctccaagatgcaaggttggtatggcatgcaaatcaatcaatgtgatatatcacataaacggagtaaaagacaagaaccacatgaccatcttaatagatgcagaaaaaaccatttgaaaaagttcaacatgtattcatgggtaaattgaaaactgtcaacaaaataagtgtagaatgatcttgcatcaacataataaaggccatttatgaaaaactcatagctaacattgtaaccaacggggaaaaaattgaaagcttttcctctaagatctggtacaatgcagggattcccatgatcaacacttctgttcaacatagtattggaagtcctagtcagagcaattaggcaagagaaagaaataaaaggcagtggaattggaaaggaagaagtaaaattatctgtttgtagatgccacgattctatatgtagaaagccctaatgatttcattaaaaatttgtcagaactaatcaatgaattcagtaaaattgctagatacaaaatcaacatacaaatattggtagcatttcttttctctaaaaatgaaatcagttgatttcattttgaaaaggaaatcaataaaatgtttagatttagctttttattgatacattacacatttatggggtacatgtgatattccaatatatacatacaatgtgtaatgatcgaatcaaggtgattaggatgtccatcatctcaaatatttatcatttctttgtaatgggaacattccaaatcttctcttctggcaatttgaaatatactataaattcatgttaactatagctgccctactatgctctcaaacactagaatttatttcttttatctaactgtacttttgtattgtacccattaactatcctctcttcatccccttctcttcacttcccttctcagacgctcgtaaccactattgtactcactacctccatgagatcaattattttagctcccacatatgagtgagaacgtgtaatatttgtctttctgtgcctggcttatttcacttaacaaaatgtccttcagttctatccatgttgttgcaaatggtaagttttttttatataaatgaatattccgttgtgtgttccgttgtgtgtgtgtgtatatatatatatatatataccacttttttatccatttatctgttaatggcacttagaaaacaatttcatttacagtatcatcaggaagaataaaagaggaataaatttaactaaaatggtgaaatatttatacagtgaaaactacaaagcattgattaaagattttttttttttttttttttttgagacggagtctggctctgtcgcccaggctggagtgcaatgacgggatctctgctcactgcaacctccatcttccgggttcaagcgattctcctgcctcagcctcccgagtagctgggattacaggcgcccgccactacgtccggctaatttctgtatttttagtagagacggggtttcaccatgttagtcaggctggtctcaaactcctcacctaaggtgattcacctgcctcggcctcacaaagtgctgggattacaggcatgagccaccgtgcgtggcctgatttaagaaattttaaaagacgcaaataaatgggtgtatgttctgtgttcatggactagaaggattaatattgttaaaatgtccatgctactcaaagcaatttacagattcagcacaacctctatcaaaatgccaatagcatttttcatagatttaaaaaaaatctaaaattcaaatgaaacaacaaaagaaagagaatagccaaagcaatcttgagaaggataagcaacattggaggtatcacacttcctgattttgaattatatgacaaagctttagtaatcaaaataatatagtactggcataaaagcagacatatagaccaatgcaacagaatggagggcccataaataaacccattcatatatggtcaactaaattttgagaagggcaacaagagtacactatgaggaaaggatattctctttaataaatggtgtttgaaaaactggatatacacatgctaaagaataaaattggacccttacatcacacaacaaaagtcagctaaaaattgattaaagaattaaatgtaagacctgaaactacaaaattcctagaagaaagtgcatgaaaaaataaattctcgaaattggtcttggcaatgattttttagatatgacatgaaaagcacagacagtaaaatcaaaattaaacaagttgtactacggcaaaccataaaccttctgtacagcataggaaacaattaacagagtgaagagacaactgtggaatgggagaatatattagcaaaccatatgaccaatatgcagctttcatccaaaatatatgaggaactcagagctcaagcaaaacacacaaacaaaaaacaaaaaatctgattaaaaatggtcaaagcccctgaatagacagttctccaaagaagacatgcaaatggccaacaggtatatgaaaagattctcaaaagcgctaatcatcaaggaaatgcaaattaaagcaacagtgaaatatcacctcaaacttgttaggatggctattatcaaaaagataaaaaaaataacaagttttggcaagaatgtggataaaagggaatccttatacattgttggcgggaatgtaaatttgtatagccattatggaaaacagtatggagattcctcaaaaagttaaaatacgaatgccctaggatcaaattaccactcttttgggtatatataaaaaggaaatgaaatcagtatctagatgagatatctgcactcccatgttcagtgcagagttattcacaatagccaaggcatgaaaacaacctgagtgtacatcaacagataaattaataaagaaattgtgatatatgtaaatataatgaaataatatttagcctacaaaggaaggaaatcctgctatttgtgataatgtgggtgaacctgaagaacattacgctaagtgaaataagccaggcataggaagaataatactgcatgatctcacttacatgtaaaatctgaacagtcagctataaagaagcagagggtagattgattgttaccaagggcagagggagggggagaatgggaagatattggtcaaaggacacagagttttcattatcaggatgaataagttctagagatctaatgtgcaggataggggctatagttaataacactacagtatgcactaagagagtaatcttgagtgttatcaccaaatacacaaaaaaagggtaaccatgtaagaggatggatatgttaattacttttactgtagtaatcatttcactatatgtatattgaaacatgttgtacaacttgtatacatttttacaaaaaattaattttcacaagcctcaagacagacttatgaatagatgaaacagaatacggaaaatatctgaaacaggaaggagtccagcattttagaagaaaaaatagaagtccattgtggctggaataaagtataaagaggaagagaggcaagagtttaagctggagaggctagtagaagccaagaatacaacaaaaaaaacacatggcatttatgctattctcaatctctaaaatagatatgctaatcaccgaagactttttatgtaaaatagcagtaattgatataccagtattttcagagttgtgtggaatgatatgtatattattttagagaaatcttggtggattcatatggactcaacttatctttcaggtttatttcttgcatttataaattatatctaataaactataagttactgattgttgtgtatatcttgatatatagggattatttgtgtttgttatacaaaaatcaaatggaagtagaatagctaaaatgtatgagtacttgcacacaaagcacacacacacacacacacacacacacacaccataaccccttaggaaaacactatttcagaatagcgatattggcatatttcacatatgctaaatgagttattccttatagtttcataatgtaactatgaaaccagctgtctgtttactttttgtggtaggggggatagctttcctaacaaactaaatacctaatacaaatctgagaggaaacatatgattttattaatttttctcatgaaaacacttaaactttcttgtgttataatttcaaaccataagtgcccccaagacaggcaaacttggaagttttagagaaaattatacggtataattgataacaattacagtttcttttaacaaatactgattcacgattagtatttttaaaatacaaaatgcattttcctgaatagcatttatttacttgttaaagaagttgtgtaagagattcagctaatctaatttcttactttgtgaagaaatcactcatctaaagtcaaaatatcaagtataaagtctacccttgggagaagcatacagggtgccagactttaaatatctccagtgtgcaaaataaataatattttcttgaaatatcctcttatttgaaaatttgctatagagtcacaagaggcaaattccatttgagaaagtgcatgctatattttacaacgcagaaatgtggagctgagcacacaacatcttattgcaaaagtacaattcagaagagagtttttacccttaaaaggctgtgaagataagtaaaaatcagccaaaatttcagtgtgaataatatgatgtttggcgaggaactctactattgttacacttaggaaaataatctaatccaaaggctttgcatctgtacagaagagcgagtagatactgaaagagatttgcagatccactgttttttaggcaggaagaatgctcgttaaatgcaaacgctgctctggctcatgtgtttgctccgaggtataggttttgttcgactgacgtatcagatagtcagagtggttaccacaccgacgttgtagcagctgcataataaatgactgaaagaatcatgttaggcatgcccacctaacctaacttgaatcatgcgaaaggggagctgttggaattcaaatagactttctggttcccagcagtcggcagtaatagaatgctttcaggaagatgacagaatcaggagaaagatgctgttttgcactatcttgatttgttacagcagccaacttattggcatgatggagtgacaggaaaaacagctggcatggaaggtaggattattaaagctattacatcattacaaatacaattagaagctggccatgacaaagcatatgtttgaacaagcagctgttggtagctggggtttgttgccgagctcttcaaactctgcaaacagtgttgcttttacagaatggattttaaaattgccttgtgctgcgttagattttggggagggggtgtgcttgcctccaacctcaggaaaacacttctgggatagaaatcagtgttagaagattttagaataaagtattgttcaggagtctaggtttcttcaggtagatgatgacagggggaaaaaaatcttcggggaaatctaccccagattagttatatgcaatttagttgcaagaactgattgatgtattggcatattcagacagtgagagaaatgagaatgtacagaatgtttggataggttgaaaattgttatacttggtttctattttataaggagtttggctgtcagtcatttctcctcatcaatttctagcttttgacatttattcagtcattctgcattatatgaagaaaatatatcaatatctcctgcagggtttttcaacaactctagcatctgtttcagctattgaactgtattcacgttttgccaagttgatgtcgacccagctggtctatgatttctcgcttgattactgctcttaatttctctgtatcagcttgtttcagatagggctttgaaggctgttaatgaaaaatgacagaagtgataaattattgaaaatgtgagcatttatttatttatttatttatttatttatttattttgccctttaatgagttttgtcttacattctttcttgcctgcgtacgatttttagaaccctttctctgttttgcaatatttctttcccctacaatcagtggattataattataagtacttttaagcaaatggagcatgagcatggacagtatttggctccaaaaataaagtttttggagaaaggggagcaatttatgctttttgtataaactatgcatcgtttctataacctatcttcacatgctgtcatggggatctgtcagtgactgtaatcagactgaacatattgaaataatctttatcaccactagggtaacaagcaaataaaacattcaaacatttaacaagtgattgtttaaaacagatgttaaataatatagaaatagattttcctaagtgtgaaaagcctgattattaactgtctatgtaatacagaatctttcggctctctacccagtctcctccatagcctgaggagctaaatcatccaagttaatagactatcatatatgtacatctaatatgacctttcagtgtacacagtgctactcgtatgtgctgtgccttttctgtagtaattgtaatatcccagtcagtctggttaaggaacactattggctgttatgtaactttttttctgaatgttagtccatggttttcaattacgtattcctcttagaaagggtgagttaaaaacaacatgtatttaaatatcagtaaattaattagcaagtggtgggctaattacactaggatttctccaaaataattgctaacttctgttttgaaaaatagtcaaggatttggatgactactttttaaccttgaagcatacattaccgtggttgaatatcattcataattcatatatacagcaggaaagaaaatagttttctagatgtatcattttagcagcaaagaatttttttttataatgtggttcaggcactctgattatttccgtttaatacttttaagtactgtagatgcttttgtatagtgtgttacagaacttggttaatctttgggaagctcaaagactgacagaattttgcatccaaatgctacagggttattttgtggttggttgagaaaattcagctctgtctatactgttgtttaaaatacagccctctttggccaatgttacttttcaactttttataaccgttttaagtgaccattcaagactgtaaaaactcttttacactgcatctttagtaggactctccttttgtgaattgtctccttcgaaaaaatgtgagcttccttctagcctcactctcttgttaccatagttacttttaaaagaaggtttttctttttcaatgaagatagcgtactttaaatcagccactggaatccccaaactgtgtttttgtattttttagtttatagtttaggcttgcttcatttgcggttagaaagtgctctgtatttggtcccactgatgaatggattggacagacgctaggtggcaccagctgttgattattaatgaaatcgtaaagtctatatgccacgcacctgaagagcaggcaaacccttattgataaatgcattgtaagagctggaaatgtctgccaatatttcttgctctaaaacagggtcagcctgcagagtgatgagaccacgtgaagtcttcaaatcccaattgcttaatcctgtgtcttctgaagtgctttaaggaagaaaaaacgatgaaggagaaatgcataaaaatagaaggtgtgaaagagaagtgggacacaatgaaatagactgcaaacattttaatatatttttaaatccagaattagtgacttttataaatctatgtgagttttccccaattctctcaaactcagattgttttctctaaggcatttatattctaaaacaattatttatctcttttaggtaaaaattttattgagcatcattattttttaagtaaaaaaatctcccttatttctctttttgtgataagactgtcaagtgaaatttcccacatgagctagagtagctgcctctcaggtgttgctcttcagaaagatgagcaggggaagacactatcggttaagaaatatgctttgaaatgttttgcctgagaagcttgctccatcctattatcctcccattctcatataatccatcttttaagaaggaaaaagcaaataaaaacaaaccacttaagcatgtgcatacacacacacacacacacacacacgctttggaaaaaaaaaaaagtcagaactgtttaaaaagagaaagccacgacaatattttagttggtcctggagttaataaactaaagtgaaaaataggaaggaaagtccataattagattgtggagagtaaataattacttaaaactggaaatatttttccagaaaaatatgcaatattttttcttcactgggagtaactgacaattcctgaagaaggtgagatggtttagaaagagtgcaaagataatatatgctgtgattctccaatgttatctgaaaagtatgtaatatggctagttatcttgattatagcatggactttggtaaagatttttatgatgcccatatggtgaaaatggagaaatatttgctgtttgacataagagtctggtcaataaatcagctggctaaatgaccctgcctgtgatgtatcaattaatgaatcacagtaaaccaggaagagggcctttcacaggactatagcatagttctataaaattggttccatctgacttgaacctaatcttctgtaatgtgccttatgtctctgttcttgaacctacttggcctgtgaaatattaatgtccaaaaactgaaggacgatccagatagcctgtctatctgggaagcagaacaaatacattgaactattagggtaccaaaggattatgaccacctaaaaactgtggtgaggtcaaagagaataattgtaataggaataagtataacatcctaagctaaggttcataaaatcaatctggcaagtacaggacatgagagagttaaagcttagtaataattaattgaataaatcttactgattttgttggtcatcattattatcagtcataattcatatgacatcaaaatacaatgaaacaaagtaatattgttagacatgtatcctgaaaaaggaaatgaaaaaaatgagaacgaattttagaaggatatatatgatataatggtgtgtgtgtgtatatatatgataggtatggtatatgtatatattatatgtggtaatatatacatattttagaaggacaccatgatctaagaggaaccttaacatttgggggtatgttcagtgaaaagtgtctgaatgctaaaaggtcctacaaactataacatttgaggggcatggaaagtactagaaaagtgaaaagttgaagaatacttgaaggaaaaaagtagagaaaattaagctgatttcaaatattcgatgtgctataatgcagaagagggtttagactcacttgcacctctttggtagcaatggaaaagtattcttccagttaatgttgtgagcagagaattgattactttgtgagacactgcactccttattcctaaagtgttcagtgctaagaatggagtttctgcactaaatggaaattgaagaagatgtctgagataatttttaactaagaatctgtgagtccaatcatttcttttaaaaacatgttcttttttttagacatttatttctctgagggtctctactactccactcgcatcatccaggctaggggtcagtaaatgatagtccacattgtcacatctattactgtttgaccagtcatttaaaatggttttcacgtttctgaattgtttcatttcaagaatatttctgacacatgagattatataaaatttcaatttaagagtctatagtttatttggaagacagccacacccatttatttgtttatatgctatataggactcctttcatgctaaaacacagttgagtacttatgacagagaccatgtgggccacaaagcaggaatatttactatctggccctcgataggaaaagtttgctcacctcatctctagactataaagaaattttgttttttgcttattgactcaagtatctaaacaagcaatgtaacagttaaataacagttctataccataaacagaaattgtaaccacccatactacttaagtactagagacttggaaaagtagttcaaatatgcagcctaacagataaagatggtttcatttggctgttagtctattgagataatttacttgttgaggaatgtttatttaatgtttccataaaaaattgaagtctctgcaatcattgacttatatataatatctgcctagtttgactccattaatcttgctgaatttacctatttggtaggattctgttatttttattgctgcttttccgttagtgtatgatttcagtagacttacagaaagggtgaaagtcaatggaaaacaaggtaaagtgagtggaattttcttcttgcagctaccctcttctctcttcgtgggtttatagactctctcagcagctttggaattgcagttttagagacttacttttataacattatgagtgtgttcttgatcaaatatgttctagaagggatcaagataaaacaaatgcactgcactataaaagaacagttaagggttttagtaaatgattgataagacatgctaaatttaagaattagcaatgagttatttatattttcctgaacatagggatatgagaagggattttttttcatgtcataggagaaactataatcaaattctaagcataaagctgagggattctgaatttaccaccaaatattacaatctccatagttccataatgtgcaactaaaatccccacattttttttctagggaaagatataatttctgctcactggtagcgctggaaattcctgtaaaacccataggattcttattgtatttccatgaggatgttcctgagcagctactttgtgatgcctgtctctatggtaacagacacaaggcttaagggtctgaaagaaattcttcctgttggcttaggaatatggagcaatgagggagacccactgaagactataaaactgaggaaaggcaaaagaggcaattgagaaaaagttgtcgtgggggagctttttttgtgtatttgaaaataatttcacaatttcatttgctcttaatatatctctgaatgaaataagaaccaacatacaagtaaagttttacagaaagaaaaaattctgtgaaagtattgttttttaaccatctagtcaattttatgtaattgaagtcacacagattttttctttagttggcttgcctttcgctactcaagaaaagattgcttcttgcctgaaattggtaagaggacggctctacccctggcaaatttagttcttgttactgctatcaaagatcttgatcttttaaaggactttctttttcctgattccaagggtaagaatattgaactctggttcacattactcataatcactgagcttctcagggaattatgaaagtacactagccttccaagatgttcttttttaggtctatttctcttaaagaccagtaataaatagagcaaatagtactgcttatttgaaaattgggtatttcgtaagaggatgctgggtgagagtttgtgtttttacatgttttactttgtttctcttattaaaataacaaaaaagcaaacaaaaagctcctagaagtttaaaaatatttgattttccatttatttgacttcatcttactttcagcttagcaaatagggacacatcacatttgaattgttttagaaaggagataaatatgactctcctttcccttagattcaaagtatatgttcaaggtgtcatcaaatagccaaaagtctttaaaatatttatgctatgtaaatgtccttcaggaaaatataagtcagagggaggagatggccgtcttagtataaagctctcatgtgtatttgcagtgttaacatgagtgttgatgttttatttatcttcttaacatgttatatctgcacatgtcttcatttgttatatgttagggtcaacagaaaaaataataaagttattgcaagtaagcaaaaacttataacctgatcaataaaaattaatattttaggttggaagataaacacatctcaaatgtcattttataagatcaagttaacaaatgttagcatgcttaaagctttagaggaattaaatctttttatggtttattttctgaccttgagaaatttatagactctgtgcagatatatgttttcacaaatttaatccactctatatagatattagtaaaatgtaagacagtgtcttcagtacctgttcacactatctttaaattaaatgaaaaaactcaagttagctgtaatgtttcagtgtctcctttgatagtgttggaaagcaaattttttaaagaaaaccttttttataactccatacattttgacctatagatactaattgcaatataaaatgtgacatctgaataaaacaagaatactttaaatattcaatatatatactacttttgaaaagatgacttaaattataaacatataaattatatgcctaacatgactggcttccaaaaaacttattttcttgagctttggggttacagcctaaagtgcactgcagtaaataagcaaatgggtaaaaatattgtctagacaaaagtaaaactgagatgttcttttgagcaaacgtttatagaggaggtacaggatgacaactggaaacgtaggtggtacgcagagattaattgctgtcaatgtacacctgaaggtaaatggatggtgcttatcaaatttccagaagaaatattgacattatgttgcaatttgaagacagggttatgaatacaaagagctaagggaaaataaacttatcagcatcattcagctctggtcatgacattgttacaactgattataacactcccaggataaaatgtgataaggaccatcatagtctgtttttactagtacagatttcttttatacatgctataagtagaattgttcggtccagcaacaataagctggattattgaaagtgacactaatgctaacctgaaattgtatgggttttaggggagatgtgggactcatttatgttctatgacaagtgtaaaaaggagattaagtaaaagcctgcatgtgatggacacattagtgagtaggaatctcaggttcctctccctttggctgctgacccattcatgggctggttttggtggccacagtggcaggaaacagagtctatttctccattaggtcatccagacaggattagagcccaccaactgaaatgaaaggttgtttctgctgcttttcattcatccaacaaatatttattgataaattctaactgccaggctctgtgctagagcaagatgactaagatacagtccctgaggaatttagagacgaacgtggtttatgtggatgagaagagaaaaatatttacagtgaatagctaagcagagagcaacagcaactgtgaacccagacagtaaagctgacttaggactgagctagaggtttccggagttcctagtgtgagtgatgtggaaaaactggcaagtccatcaaagagcaaaatgataactgaacagaaagaaagcaaatccagtgaaaaatagtaattcaaagtaaagggtaaagcgacatatttgaagtgtcacttgaaataaaaaggagcatgccttccacctgttgctcatcttcactggaatcaaacctagaaggaaaatgtctaggctggtctaaaagccagttgcatacaatgatattaaatatgattaaagctagcatgagcatgaccatgcaaactttcaggaggatttgaaaacagttacctcccattggtagtttatgtacgtctatccctggaaactttttcctatgctatctttagagaccttgtcatattttatctcaatgtctaacactctttaattagaagctacctgaaaatgtttcactcatgtataaagttaaattaatcacagaatcagacctcagaggttacaaaggagggctgaaaggataacatctcagatagaatagatctattgccaaataaacctgtaacaataagaaattgtgttagataatccgtaaggttttatccaatttcaacatcttccaatttaattgatctccagcctcacacccaactcctcctaggaaattaaaaagagacaggtaaacaagatattttctgaagaatcgaatcatccagaaagtcattctctctcaagcagtacattttctaaagaatttaattatcgaaaaaagtctctctctctcctctttctctctcccttcttctgacatatatagatatgcatatatacacatatatgtatatatttatctatatatctatttatatctctgactcgctgaagtaacttagatatataggctaaaggcaaagaaaaattcctcccaacattcattagtaatttccctttatagattaaggaaagtatttctgtcctccttgatttttaaaacattttactgaactataacacgaatatataaaagttcacaaatcaataggtgtccagcttcatgaattttcacagattgggcacaccccagtaattactcaaggcaagaaaagaatattaccagcatccaaaaactttgtcttaccacttcctagtcaatactctcccagaggtaagtggaatactgacatctaacacaccattgattaggacagacagttcctgaaatgtatgtacttgaagccatacagctgtactcttttgtttctggctcctaaatctcaacattctgtttgtgagatctatctaatttgtttcttgtagttgtggtcccataattttcagtgttgtgtagtatgccatcatataaatgtcctataatttacttattccatctactctggatgaacatttaaattgattccatttgtgaactcttaaaaataattccactttgaatattcttgcaaatttactgcacatatgcatgtagttctgttatgtgccaagaagtagaattattaggtcatagaatagtgaaatactcatctttagttgaaaatgccacgtagtttttcaaggtaggtaaacaaagaaccatcattactttatagaagttctggacatgtcaatgcttagcattattagtctttaatttcagcctttctggctgttatactatagtatctcattgtgtttctcatttccatttttttctagtgactaattaatttgagaaccattttttgtgtttattgctcatgtggatgttatctatagtaaggataacatttcctcccaactttcattagtaatttccctttgtagattaaagaaagtaattctatcaacttgatttttaaaatgttttactgaactataacacaaatatataaaagtgcacttttctaatctcatgctcatttttctattgatttacaattttggtttttataggtatgagatctttacatttttatatggtccctacatttattgtatgtgttgcaaacatctagacagatatcttttataggaacttagaatttcaaaacccggagaccattaaagaatatttagtcccatatcttagtttgaaagatgaggaaagtgtgacttatagagaaattgtcatttcttttaagtttcttccagttagtagtaaggccagatacgtaataaaagtctcctgacactgaagtaaagggtttttttctagtaaaccatgtagggtctttagtcttgtctaatactgtgactcaaactccttgtctcttttggaaggccacaaaatgcgtgacatagtaattttaatagcaagtatagagtgatgcgtgattaatctcattgattttgtgaacaaaaatatcttcagctaacaaactgttgtatagcatggccatgcaatatttaaacctgtatgggccgggcgtggtggctcatgcctgtaatcccagcattttgggaggtcgaggtgggtgtatcatgaggtcaggagttcgagaccagcctggccaatatggtgaaaccccatctctactaaaaacacaaaaattaggtgggctcacgtgcctgtagtcccagctactcgggaggctgaggcagaagaatcgcttgaacccaggaggctgaggttgcaatgagtcaagatcgtgccagtgcactccaacctgggtgacagagtgagattctgtctcaaaaaacaaaggaaaacaaaacaaaacaaaaaaaacctatatgttcttttcggcatcagattttatttttcctctttcataactttattattatattcagtttcttttcacatttattcttattacttggatgttcccattccaaatttggttctaattcaaaaagttttcattttctatagtggatgaagaacaacataaattttacaatactttcttttagtgagataaaatttagtttacaaaacataattactagtacattaatatttactatttatttttaacatgctaggtgcagttcatgcgttattttagctaatctttggaacaacccccgccaaaatgttttattatgcctagtttatagatctagaagctgagcctaagtgagattaagctacttgtgaaacagctctaatcagaaccagatctttataagattctatgcatttcactccttccatgatctacttctgtacctgcttggaaggaaattgagttagtgatacagatttgggtcactacctgcctttagttcttctgccatacataggtcttagggataacctctttttccaatatcattaaataattcattttctgtatcttttttttccaaaacggtaattagagaagtcacttcgttggccttgattttattcattgtattgaataaatacaattttctaaatacggaactcttattcatgtgcaacctaaatacggattaggtgagttaatatccagagaccagattattactaaacttttcttgcatttagagactgaacttattataagaatcttttaattctttttagcaacctattccaaggttgattacttctcatgcatattttagttccaaatatttctttctctttcttgttcattggagaagcattccacagatgcctgagaaacaacttgctctcagtctctctatcttctagtccttggctagagtccccttgccacacttccctagcttcatgcagagtagatactcaatagtacttccacttagaaatttaaatccagatgagttacctagcatgctactttcctcttaaggagtaagtgaagcaaatgtttatagttgtttcactgtatgtgaacaaataggaatgtcaataaaacaagtacatttaattcataagtacttgataatcttaattccttaaatgtataaagctttaaaattaacaaaatactttcaagtttaatttattcacataggaaccatatgaggtaagcaaggtaggaagtcttatttcctctttatagagagccatgtaactaatttctcctatttgtatcctaaatttcttttagctctgccatcccccctccatatctcctgacagtcaccaccttagtttagatccccatatctgacttcgaatacactgatagcttcctaatgtaccttccttcttgcttctctccagtttacccttcacaaggctgctaggcttatctctctcaaagacaaaacttaataagttattccactgcttaaagtccacaggtggctttatattatttatagattataattcaaataacttgcatgaagagaaggtactttacaacaatttccctgccatgtgctcagtctaatcttatatccaccatgtgaatgcctcaccctagccatacaaacagttctctgactgtaacacacttccttttcatgtgcctttggaaatgttgactccatcccacagtcataaacaattcttattcacatatatttacttggtacatgctttataatcctccaaaatagtgtagctagtgcctcttctttacttttggctgaatcatgcacccctgtgcatagaatcttcctaatacttgtttcaccacttattttgctgtgatgtacttttcaggttattgatttattcataaactattagtgcctgagggccatgaattctctattctttttttttttttaccctttgcttagctcttctggagggagctactcaagtttaacttaaagtagtaatgagttacacagccagtaagacatttgtttgagtcctaaggtgacatcatttccattgcatccttcttccctctaatattactaaccatagtacacgagcagtactattgtcaagattcctcctcattcagtttagggaaatgcgttgacccaagttaccatttttgtctatttcacaccgtaaaagtcgggatatttagttatgatggtatgatagttaccctacatggtattttaaaggctctatttcctttgtgacttacacatgacctccccagaggtcttaatttaatggaatcatcacctaaaataatagaagagtaaattgacagtttcgtttataaggtacatggattcaggcatattggtaaagtaacacaaagcaaaaatgtggttcttcatttgtcttgtttcatcactaatagaaaatgatggagttcaccaatcacccaattgtactgtgcagcatggttattgtaaagtatacctgaaattaaaagcaaatatctacttccattttttccactgaattttcatcagaaaatgagaactacatactgaaggatttggggttggcgaatagcagatgtataatgccagcaatatgaaagcagagcaaatgcgtgattggtttacagcctcaacttcagtagtactctgcaaagtctgccagcacacaggtgccttgaggctgcaaagagcgtaggaattcagtggatgtatcaaatgatatgagatgttaatacctacttccttctaatgcatagctttgtgatattagaaaattaataaagaagtgaacaaattaattactttataatctcctaaatcttctctgtggaaggaaaatctcaaagatgcattaagtatccagcaaattggttttgaaattatccattattaaaaagcacaattctgtgtaacaggaagccacatgccaagagctatgtatatttaatcatttatgtcgatgctttttgtagcaattctgtttattctctattgacattatatacagtcctttttatacatagtggaatttaatgtgctgtgtttaaaagacacatcaagcctgacagaatccaattgtatacattatacttttaatttattagaaaatgaaatgatcatttgtgggcttatattagccaaagcagaggataaattttattatattaagaaaatcaaatactgtgactacatttacaaacattgtaaacatgacacttgttgcataattaataaatgaacatattgacctttaatataaaacggcatgaaaggaaagggaaggtggaagatataaccacaatcagaagtggaaatgaactcaaaatctgtaactgtatattaaagaaacatgtgattcatgattgcttttttgccttttccattttgaggcaatagtgccatgttgatattcatttgtgctgtcaaattaagggaaaacattgacaatctttaatataacaaagatagagaataaatgcaggtcaaaagtgtgtgggagaataagagaattgatcacattttaagaacaattacccatgtcactgcttaacccaacgtaatgatgtcaaccagtaggatggaagccagcatcaggaagaatcattttccaagcagatggatctgctgatatttttaattgattgaaggagcgttccattatttttaatcaaaaactaatttcaaataaaatggaaacttccatgaagtttgcaaaaatctgtatgcattaaggctcagactaatagaactacaatgttgtgatagttaataatccattatttaattataatgattattgttcttaacacattacacatgggagtttgtgggaactaccctacctttcttgcttctcaggtgagacaaatcattctcctagtggtctcaagtggtactgaacctcattttatcactgatgacatgctcatgaaactcacactgtactggtgttcttttctccgtctcactcacttctttgctgtgcttcctgggatcacctccgaaataagttgctggcactcaaataatttgctcagggtctacttctggtaaaaggcaacccaagacaacatgatattttattattaatagttttcctcatttaattttatatataatcatttttttctgacagggaagtatatttgaggaaataatgagggcaattatcaaaatatgcattggtttgggagttagagaaactgtcagaagtgacacaccaattttgctacatcgtgacttggtaacagtcattaccattctgggccttttattctcttctgaaaaaatggaagcattcgattacaaatcattaaagaataaagaagatagaaagtgatagaaaagataacaaatgttgatcacaccatgtgcaattgcttgatagtagtttccaggagtactataacagactgagactgtatctacttggaactcgtgggataaaataccattatttgatgccgtatgtgctcggcatgaatgcagtgggaaggatagaaaatatttcatatatttgccaactgtagaatatactgtaatagatcaagtttcattttaaaaatacacaggacacatttttttaaaaatctcatatgaaagcccagcaaagaaaagaagaattgaaggtgtagacatcttgaatgaaaacaagaggacgatttgattcaactgccatttattccaactttcaccctataaccccatagacacagctgtagaaaactgagatcttgaagaaagccactgaattagataatatctacgactacttccaactacaaatgtagaaataattgtctttacctactcatcctcagctagaaagcagctaatgggctactttaaatgtgtgatgctttcacaaattaagcaagactgagtacaacaagcacaacaagtccaacagcacaagttttcacaaacagtattggatgtaacaatacatccaaccagtattagatgtaacaaaaattggttaatttcctaatcaattaattaggaaattttattttctaacctgttggttgccagttatgggcttaagatggaagccagcatcaataggtttaaataatacctttgttttaaaaagaagaagtctaattcatagtcaaacatgtgctttggctaagtggctttgttctgggttttgcatgacagctggtgataaattgggaaaatgtgtaagtagcactgtggtaaggataatgttgatgaagatagaatgtttgaggccactttcagggagaataaaaacgacataaagtaatacttaagactgaattttcttagagatgataatctcatcaccaagcctcattttgccattgaaaaatttcttatgaattcaactatcatatttacatcacaatagacagtattataactctttagcatagggattttgctttaacttactttcaaccaatttatatgttaaagctatttatatctctgctgtttcatgaataaagcccagaggtatcttctttcttgactcactgtcatatcttcacatttcatcacatttttgcagttcaaatatcattcacttagtaacactgaaagcatagaaagattaatcagaaatgatttctgccctcaacaagctgacactggttagagtacaaaagccacactgaaagaatatatggagatctatgatctatgatcaatgatctttgaagttactattgtcatttttgggggcaacatgagtcatgcccatatgaaataacaaacttaatcaatgttgtgtgtgttctgagtgctctaccaaccggccacccccacccccccacatctgtctccctctccttggacctttctattctgagacaaaccaatattgaaatgaagccagttaacaaccccacagtggtctctaagtgttcaagtgaaaggaagagtctcacatgtctcatcttaaatgaaaagctagagatgattatgtttagtgaggagggcatgtcaaaagctgagttaggctgaaatctaggcgtcttgcaccagacagttagtcaaggtgtgaatgcaaaggaaaaattattgaaggaaattaaaagtgttacccccatgcacacatgaatgaaaagaaagcaaagcagtcttactgctgatatggataaaatttaaatggtctagacagatcaaaccagccacaatattcccttaaccaagagctaatccagaggaagatcccaactctcttcaattctacgaaggctgagaggtaaggaagctgcagaagaaaagttggaagctagcagaagttggtttatgaagtttaaggaaagaagccacctccaaacataaaagtgcaaggtgaggcagcaagtgcagttggagaagctgcagcaagttatccagaagttctagctaagatcattgataaaagtggttatactaaatgacagattttttatgtagatgaaatagccttctatttgaagaagatgccatctaggattttcatagctagaaaggagaagtcaatgcctggcttcaaagcttcaaaggacagggtgattcttttgctagagtctaatgcagctggtgactttaagttgaagcaatgctcatttaccattctgaaaatcctagggcccttaagaattatgctaaatagacttagcctttgctctataaaagtaacaataaagcctggatgagagcacatctgtttacagcatgatttactgaatattttaagcccggggttgagaccttgtgctcagaaaaatatattttttttttcaaaaatattactgctcattaataatgtagctggtcatccaagagctcatttggagatgtacaaggagactcatgttgttttcatacctgctaatataacatccattctgtagcccatgggtcaaagagtaagttcaacatttatgtctcattatttaagaaatacatttagtaaggttatagctgctgtaaataataaatcttctgatggatatgagcaaaggaaattgaaagccttctgtaaggaattcaccattctagatgccattaataacattcatgattcatcggaggaggtcaaaatatcacatttaacaggagtttagaagaagctgatttcaaccctcatggatgactttaaggagctcaagttgtcactggaagaagtcactggagatatggtgacaatagcaagagaattaaaatgagaagtggagcctgaagatgttgctgaattcctaaaatctcataataaagcgtgaatggatgaggaattgcatctgatggatgagcaaagaaagtgctttcttgagataaaatttacttctggtgaagatgctgagaacattgttgagatgacaacaaaggatttagaatattacacatacttagctgataaagtagtggcagaatttgagaagactgactccaattttgaaagaagttctactgtgagtaaagtgctatcaaacagcagcacatgctacaaagaaatgttttgtgaaagaaagagtcaattgatgcagcaaaattcattgttgtcttattttacaaagttgtcacagtcactcccaccttcagcaaccccaccctgatcaatcagcagccatccacattgaggcaagagcctccactagcaaaaagattacaactcactaaaggctcagatgattgctagcttttttagcaataaattatgtttttgttaaggtatgtacattttttaacataatgctttgcacacttaggctacaaaataatgtaaatataacttttatatacactgggaaaccgaataattcatgtgactcactttattttggtgatctggaactgaacctgcagtatctccaaggtatacctgtacatattcattcaacttttaccctctaacccgcttacttctgtccctgtggctattgctccaacatcatgataaaaacaaaacatcacatagaagtatggcaattgtactaaacgtattgtaccattggcatttggtgtctgtcgtaccatcacaattgagcctcatccttctttgttaacgcttaattcagagaaaattttcattgagattttataaatgagtaatatggctctgattattgccctgtctgactgcttttatctctatacaatattgtgagagttgctaaagagacttctgatgctgccatatatgtaattggatatttttaaattccatacagtcatctaactgacctctcacccactcaccaaaaattacaactcactccatttgcataaagtaaactgtggaaatatatatattttacctttttcaatctaaattattgctcatggagagtctatttcaccacaaacaatgctatatccttaccttaatggagtattacaatgtaattagccatggaaatggaaaaaatgaaagaaactgttatgaacacatcttcccttttaagccaacttgtcagattttgatagaagaaaaactttcaaagtcttcttacgtgagtcaggtcccattttcttatatttgcattctgctagatttacatctgtctatgacgatgatagtaaaggtgataatgatgataaaggttatgcttatgataattcctcataatgggtaactgtaatatcagataatacacgataagatctttaaaagaaagatgacaagtgaatctcataggagttcagagcatggtgaggatggccctgatttttcatttctgtctctctagtgcattttcatacacactcatcatgggggaggagggcactcaactcaattcagtttatgggatttcatcccagatttctaaatacattatacttatgactctgttcattatcccacccctcccttctctgattatggatgtagtgatgctgattatttttatattcttcactatgaaataactatcattcttcatccatttgggcttctataaaaaaaaataaataataaactgggtggcgtaaactaaaaaaataataaactgggtggcgtagaaacaacagagattcattgctcaaagttctggaggctgggaagtccaagatcaagatgaaggcacactctgtgcctgatgacagaccgtttcctagctactagatggtaccttgttgctgtgtccttatatgatgaagaggcgagctggctctctagggtctcttttataagggtactaatcccaaacaagaaggctctgtactcataacctaatcacaacctaaagacctcaccccctaataccaacctcttggggattagctttcaacatttaaattttggaggaacacaaatattcatactatagcaacattgcaagcaaaattagaataatgtattagtactgttgtgtgggatataacatgagcatgttaagaagagaatcactggattttggaatgtggtaaggccaattatctaattctcaggggaaaatactcagtaagactgaggaagtaggccaggcaaggtgactcatgcctgtaaccccagcactttgggaggctgaggcaggtggatcatttgaggtcaggagttcgagaccagcttggccaacatggtgaaaccctgtctctactaagaaatacaaacaaacaaaaaaaaaattttgctgggcatggtggcacactttagggtggctgaggctggagaatcactcgaacctgggaggtgggggttgcagtgagcggaaatggtgtcactgcacttcaccctgggtgacagagcaagactctgtctcgaaaaaaaaaaaaaatacactgagtaattaaatgtgtaaacatcattttaaaaaaacttttaaaactagtttttaaacttttaatactttaaaattttaaatcatctaatcgaacatgtatataaagatcaaaacaaattaattgtttcagtagaacagtggtgcctagagaactttatttctctggacccaattattcttaactcatcaaatcatatatatatctgtttattcatacgccactccatatatacctaagatagatacatagattgaatcatatgaatttgctgatattggtccattttgaccaaaaaatgataagtttttaggattcaaactaatagctctattactgtattgattaagtggagtgataaggtaccagtgcaatatgttatcactccacttaatcagcacagtaagcccaagaaacataaaacataaagaatattttagaaaatgatgatgatgatttcattttatcaaagctatatgctcctttactgaaatcagacaagggaaaatgttcccttctgtagaaactttattaatcccttatgatcttaatactgttaataatggactagactgtaaaggattaggtaactgaggtgttcaatatggatacttgttttatgtttaatcaaatttatctgactctaaataaatttggctgaaactagacagattccttttctattgagacagtgggctctattaagcactatgtctgcataggaaacattacaattaattttgcagtgacaatatgctttttaactaacagactaatggaaggaggactgatgtaaagcataattctcaaaaagaggggggtaaaaccttggtttctactacaattattcattttatagtattgtttgataacacatactttattaaattgtagatgcattgtaagtttttatagtatatgggaatctaaataaaaggagttatttggttgttatgccatatttagcataaatattaccatccatgtatgttgttgacttaaaacactgttattttctaaaatgtaagcatagaaaaagaataaaattcttagttgatattgcagaaatatattgtagtgtttgcagcatgaaaaggttttatatataataatatacacttaataattaatttccaaaggctgcctgtggtcagccttctttgaaagcatggattctggcaaatgagcaatataatctctttaagaccatttaagctcttaatctcttcaaaccagtaccaaagtctgttcattttgttgtaatagttattgtgtattgtttctttttaattgtgtaagtgagattcaacatcacttgtcagataagaaaaaaaaccttcaaaataaacgttaatttttcccattattgctagaaggaacttggcgtttgaaattttagatattcttaaaatttctttttaaaaatttagaattaaaaacacaaaaagaaaaaagaaaaaaatagcatttactattattccccaaaaatgaaatagtaagatattaacaatatatatatgagatatatatcctgaaaattacaaaatgctgataaaagaaatcaagacctaaataatttcagggatatattgcattcatggattggaagactcagcatagtaaagatgtcaattcttcccaaatcgatctatagatttcatgactgaaaacgattaatgtgggaggaattgctctactcaacatgaagaccttagtatatagctacagtaatgaagacaatgtgatattggtggtgagacagaaacatggagcaatgtaataaaatacagaacccagaaatagaaggaaattattatgccaaactgattctttgcaaaggtgtaaaagcaattcaatgaaggaaactatcattttcaacaaatgatgctagggtatttggatacacataggcagagaaataaacttgacctgaacacctcatactttattcaaacattaactcaaaatagatcatggatactaatataaaacctaacgcttatagatttttcatatatgtatgtgtgtgtgtatgtatacctggattatttccatctatgggtatatatgatttattcctgcctttcctttaaacccaatataattgagaattagtgcaggggtttttcatctttcctagttcaattttacattaataatctttatccctttaaagatattgatattgaattgttggagtttggttttcagaacagatgttttacagtctctggtagctaattgagttttcccattcccttgattacttcttgtactcttagatgaaagttgagtatgtttttcagtgtttattgctaggaaatagttgattacagagtcatttactagataacaaacatggaaagtaatatgacaggtttttgcttttaattgtgcttttaatttttattctacatataggaaagggtagttttcaagaggtatattgcaaaacatttgataaaaatctcttaagaaaactgaatcttgactcaataaaggaacatatgtttccaagcttttttgacaatattaaaaaaaaaactagtcctctggtcaaataaattgaagaagtttctacacaagagtcatgtattttatgtactgttgtaggcatagtaatgatcccccaaagacatacatgttctaatcttaggaagctatgaatatgttgccttatatggcgaaatttaggagtcctcaagtctactctcaggttcaattattccttaggaggactcatataattcttaaaagcagttacactcatgattacagtttattacaacaaaaagataaagactgaagtgaacaaagaaaaaagttgcatacaaccgggttcaggaaagaccaggtgccaccttccagttttcctctcctcatgaagtcatctggacagcatttaattatcccaacagtgatgtgtgacaacacacacatcgtattgccaacgaaaagttgcctaagtcttggtgtctagaattgtattggagtttgtagtaggcatggaacactcacatggctgactttagtcatctccagcctctccagagttcaaactgatacagtgtaacctaaaagctgcaccatacattattaaaataaactatctggtattgcccagaagccagtcaagagccagatatttctttggaatgtacagagtttgaacaacccagtcccgttaagttaatattttaccataaaaaggcaaagtttactttgcagatttgattaaattagggactttgagatggtaagattatcctggattatgtggatggaaccaattaaaaataagcacaaacacacaaagatccttcaaggtggctaggtgcggtggctcatgcctgtaatcccagcactttgggaggctgaggcgggtggatcacctgaggtcaggagttcaagaccagcttggccaacatggtgaaaccccttctctactacaaaatacaaaattagccaggcatggtggtgcatgcctgtaatcccagctacttgggaggctgaggcaggagaattgcttgaacccaggaggcggaagttgtagtgagccaagatcacgccattgcactccagcctgggcaacaagagtgaaactccgtatcaaaaaaaaggaagaaaaaaatccttcaaggagtcaaaggagatgttggaatgaaaagcagtgtgtcagagtaatgtgatgtagactggaagatgctatactgcttgctttgaaaatggaggaaaggggccatgaatcaaggaatgtaggcagcctctagaagctaggaaatggattctcccctagagtctccagaatgaacagcgccccattgacaccttggttttagtccagaactctaagaaagataaaaaaaaaaaaaaaaacaaaaaaaaaacaggctgggcacagtggatcacgcatgtaatcccaacactttgcgaggccaaggtggacggatcacatgaggtcaggagtttgagacctgcctggccaaaatggtaaaagcccatctctactaaaaatacaaaaatttgcttggggtggtgatgcacgcctgtagtcccagcgacttgggaagctgaggcatcagaattgcttgggcctgggagatagaggttgcagtgagccgagatcgtgccaccacactccagcctgggcgacagagtgactgagactctgtctcaaaaaaataaaagataaaaaatatatgtacatttaaatcactaagttcatggtaatttattatatgagcaataggaaactagtagagtttaatataattattatgtctatgtttgtgtagatatatacataaatgggggttgtgtgtgtgtgtgtgtgcgtgtgtaatgtcaaagcaaactttccaaatgcttacttcttgtacatcttaacctcaaggcacacaaacacacactcagttgcataaatgcacattctcacattacacacacacacacacacatatatatgacatactacattctgttctagcttcctttaatgacagctcacaaatatgtgagtagaatacactgggtttgacttgggattatgaaattcatggtaaacatcatcaaggcagatggatatctaggtgtttgattatattgatgaacaggttttggtatacaaagtgacacttgttattaaaattttgatttcatacctatttcaaactaaattgcacctacagtccctttgcaagctccactttttagaaattcagctttgtattcactgcatttatgacattcctttgcattttttttttttttacatccacttcgcttaacaagaagacactgaagttctaagtagcactgtataggactgaattattaatacagttcttcagttggtaacaagaatgctcttggaaatatcttgtacatttgtcttctcctggttacttagtagattgagcatgtaaaaaaatcttttgcttaaaattgcagtacatcttaactgacaatacttcttaaccatagtgcctgacaaaacctggatattataatctcgacgtacaatttggtccagcagttgatctctgctcagatcattcaaaagggcaattagagaaagtcaacaatacacatgtctgtaatttagttttctgtacaaacaccataaccaaatgggatgaaaggatttaaccatttgcaactaaaaacagtatagtgctttataaaaagggcctaatcaagcagtatattgattgaaactttgtacagatggttctcattattcacacattctgtgtttgggagttctcaaaacttgctaaatttaatttgtatccctaaaatcaatgctcatagcattttcacagccatttgtgtgtatgcatagagtggtgaaaaatttaagtcacccaccacacatgttcccagctgagatcaaaaaaggaacactctgcattcttgcttcaggtctcatacggtaaacaagtgtcctttcagcggtgtatttaatgctatgtttttcatatttttatgctttttcttggtgattttgctgctttaaatggccccaagcatgatggtgaatttctgtctagtgttcctaagcttaagaaggctgtgaagtaccttagaaagaaaataggttccttaggtaagtttccttcaggcttgagttacagtgctgttggctgtgtattgaatgttaatggatcaataatatatattcaataagatgtttttaaacagaaaaacaggcaaaatgggattatacattgctggttcacaaaaatgttatgagcagaggctcccagaaatctatcattgtatttctcctgggaggaatgcttcagtattcactaattcagtgttcacagtgactttatagaaacacagtgaataacaagacttgactgcacattgtcatccttcatccaacccacttgcatagtgtagggtctacactttccaacagtactaaaaacccagaacgacattcaagttatgcaggtgtattatttagctgtatttgggttctaagacatgagtaaagttatatatttgtacagctcccaactatatacagttgtccctcagcatgcacgtggtattggttccagtactctcatgtataccaaaatctgaacatactcacatttcacagccaactctgcagaacccgcacacaggcaaaattggccctctatatacgtaggtttcacattctgcgaatactgtatttttgatctgagtctggttgaaaaaaatggcatgtaagtggacccatgcagttcaaacccgtgttttctcaggactcaactatgttatttatccttttacttttttattccttttttattcctgtgtataaaaaattgtaccaccagtacaaggaatgtcatgaaattgaaatgacaccattctgtgtttcttaaataaatgtcatacaggttctatgaagaataaattctcttgctaaaaaaaaaaacttgctatttttcatcatttgattttctcatattaacatttttcatcttaaatagtctttctctttactatttcccttcacatttcttgaaaattctttttcttgcccatctgttttgtatctccttattattttctttctgtttttattatgctagccatggtaatgataaaatctccgacttccaactccctgcaccatttggcacttggcaaatggcttttttatgtatttatatttttgttatttatatgtctatatcctaaacagaaccctacgcataagagcaggtggccagtaactaatggcattgataaaatagagccctttacctctattttcttgaaatatgctttcaagaaattccttgtactagatcatcgtgtatcataacattatgaacacagcagcaaaaaacaagaaaaaaattcagactttagtattcgtaagtaatgtcaatacaatatttggtttaacagacatacgatcattttgtttgctatttcaccatattattttttatgtaaataaggtagattatttccaaagtctttctgaatttactaaaatctcattttacatgaccctactttagtaccttaactaccaccctcctaggaatatatctgtggtaagaacagacaggtgtatatatattatagataagtgtctgtctgtgtgtatgcatacatatgtgtgtatctatatattaaagtatgtatatgcaatatgaaggtatgtatatatgcatatatatgcatgaattatattaagcatatgtatatatatattatagttaagtgtgtgtatgtgtgtatgcatacatatgtgtatctatatattaaagtaggtatatacagtatgaagtatgtatgtatatatgcatatatatgcatgaattatattaagtatatgtatatgtgttagatatttatgtatatatgtatatttataaaattatgaagttctacattgaactgggatataaagtccatgatatctttacataacttagaacagcaaaactctcgattcattcttgttttcaaaatccctttagcttcattttctctggtgcatgaaacaacataaaaatccctcttcttgccattaatctcttcaaatcccatgccagatattgtcaacattacagctataaaaattttagaatgttttagggacatcttgagatctttaaattaaaatatccactaaattaacatcataagcctagactcgtaatctttatttttgatctgactttctgtggcttgcaaatttagaatcaggaaatgaaacaatactcaatttttgcagaattagggcttacttatgatgcaaggctaatatggataatttcttaattgactgtatctgctaagacaaaatcaggaaatgacttaattaaaatgaataatttaggtgatattctctatattgtaatccaaattttaaagaagcgaacttctcttagaagaaaaatatacatttaataattggttcaatgttattatagaccttttgtgttctttcagaacataataatggttgctaattttctgggcagaatctcttgataagagagttaaattgactcagattatctgcaacccactggactattgtggtaatggcagatattttttaaatttaattcattgatataaaatatttagtcttttataataagcaattaaacctttgtacttaagccacttcaacaaaaatattacaaaaccattaggcagctacaataggctccatgcatttttaagtacggtttatacagaataaattatttctgtattggaatatcttcttaataatattgatgtttcaagaaaacatccaagctattttataagttatttgaatggagactgaattatatagtagttttttgttgttgttattttaattcatacaccttttcagtagaaaaaggtgccttggttttaactttgttaccccacaagcacagatattaatttttattgcattcttcactaaagtacatcttgcatttgattttcagacatggataagaccatgatagctaatgaatgactaaaataaatcaatactccaaatacttctatgcttcatttttgatggaagtatgagtaagggatacaagctgaaggcctcctatatatagtacttctacattactttttttgttataattttgtaataataatataatcacaccacatacttgtaataaaaatataatattcatctaggctaattggtcaggtcctgaagtaaatatatctcttcacaaaaggccaatgagtgacccacctactggtagattttatgcaaatggttgcatcttgtacacctttattattttttaagtatatttgtttcctacttgtaacctattctaaaataaaaagtttactatctctttgcagtaaaaataaatatcacatatctatatatataaagatagatatggtatacacctcagtatagatataaagctctttatttatttatttgttcatttatttatttatatttatgtttaaatacagacagatttccagattttaaaatgcatttcttctcactgaatattaagggacttaaaccatatactcaatttgtcaaagctgactggggaatataaagaaagggctagatatgtaatatgtgttgctaatattaactagaatcattattttgaagtacagatcttagttcaataacatagcgcgctagagcagaccaaagttattaacttcaattgataaagaattatgaatataattataatcctgttaattatttaacaccgtgaattatgcaaatgcagcaggtattattaatcatctgcaggaaccagaacaatttccctaaaagaacatataaatattaaaaagtctgacttggctctgttatgtactgttagagctttagtgttcccatatgaacactgtttggattcaattatcctttataacatgaaaaatgccccgaatgcatcctctccaaaggccaaatgaatgtcattagagttctccttttgtctataaaatgtttactgactgtgtggtctcgcatgtttgtttatatcaaaatatctttcatcctattaggctaatactggtctgtggcggctggcatcctacttgctaatagcacgttgtgtggatatccttgctgtgagactaagctacatgtgatagtcttgcagtatctaaaaaaattcccaaaattaacatatgttgaaccttccctcaatactaaggaacaacagagcattcaatggagtaattttaactaatttcctaagtatgctcaccctttacagaaaggaaaaaaagaaaaagaaaaggaattccaaattggacctttggaaaacactcaattggggagaggaattggtaaggggcttgaagatctagtttggttaacagattgttgtaaattttcctgaaggaaatattagccctttcctttaaagagttatttgtggaaacctttaaaaaggattttcaaaataaagactgtttgcctcaatatattggagtttaattcctatccatttttactttatttaaagttagacgattaattgattctcagaaaaattatttgttttaaaaggaagaattatttatttcgaaatctcaaaatatttccaaataccactgtgattcttggaatgcaatctttcttgggaaaatgccaaagttgggcaaagactggggtaggagttaggagagcaggcaaggacatgtaggaaggaaggcaaactagggaactattgtgtttttgaatcttttaaactcttagcctttagaacaatgtctggcatagagacttccaaaaagaatggttcaattcaatgtcataagtagcttgtcatttatggcacattcacaataaatgacagtataaatcaactgcgcattggtagacataccagagtcatgactatttcaacattcattttatccatgtgtttccaagtatgataatagctgaacattacgtggtactcaatgaaatttagatttatgtttatgcctcacatcttagcaattatatttgaaaaactggtgtctgtacagaatgttacagtttaaaaaggattttggatgagtaacttttgaaggaggtaggatttggggactctaaaatatttttcttcttatttttattgaatttctgcctgtgactgctttctaccctaacaatagaggcgctgcttactgtgctgcctgctgtatctcactggaaccattagtacttacaatgggcctttctgatctttatttctatatatttatattttttctgagatggagtctcgctctgtcacccaggccggagtgcagtggcgcatggctcactgtaacttctgcctcccgggttcaagtgattctcctgcctcagcctcccaagtagctgggactacaggcgtatgccacgacacccagctaattttttgtatttttagtagagacggggtttcactgtgttagccaggatggtctcgaactcctgacctcaggtgatccgcccgccttggcctcccaaagttctgggattacaggcgtgagccaccgtgcccagcctctgatcttttactctttctaaggatgactcgtgagtgaaatgtcaaactcttttatttatttatttatttttacaaaattaaaaaagatataatctgggaaaaatataacatctgaatttttattatatgtaagtctattaggtggaaggtagaaatagggccagccagtagaaattgaattctttgcatgaaggagagcaaatttaggtgtaatataagaaagaactttctaatagctaaatctgtctcgagttgcaatgatcatgcattcttctctcctcttttatttttggccactgctggatttcagggatcatcatctggactctctctgctccaatacatacttggaatctatttaatcaatgttgttattaaaaggatataattttacatactttaaaagaattttgtccaatactcctcaaaacaatccaatgagctaaatattaatatcctcattttgcagataagtaaactgaggcatagagcatgtattagtcagggtggggataaacaacttgtccaaagtcaccaactatttgagagcacattgaaacttaggcagggtagcgccatagtatcttgttgtaatatctactctatgctgcatctgtcctcagtattacagagacagagtctgggtccccatggctttgtactaattgagactttggattgtttgccccaattttcttctccagactcactttccaacatgacatttatattgctgtgatgtagccacatagaatctctcacctctcacccaaacatgccaggagttttcaagcctctgtgccatttgcctttcccctccatgtcccccacacccatcacagccctacttctaccattctatcagtggaaatctcctacttatttcctcaattaaatgttgttccctctatacatttagcaaataccaggcccatttaggtactccttcctcattttagccaaagcttcagattttcagctctactatgaccatacgttatattaaatcatgtatatttctgttccttgttataaactggaaactgcaagatcaggaaccacatcttcttcatttgtgtacctttagacttcaataagtaaatgcattaaaaatttgtctaaatgaatgatgcacatgtaacataaagcaagagtttcttttcatagtaagtattcaagcaggagctaaattgaccagccagcatcactgtggtaaagaagacaactgcatagggagaaaggttaagctggatacttgtctctatggcctttttgtagctctctcattgcaatttcatgtcatgccttacagctaaaaagtgccagtcagaaatacctatccattgtgtgtggctcaggctagttgattatgatccccaaggcctagttcttagaaaatgtgtttgtattatagtccaaaaggagctactctctgtctcctttcctcactaaattctcttttatatttttcaagtttacagaagctatatttgggcacagacttcagtaatttttcctctgtgcataaacactcaaccaggaaatatttatccctcagagacactgacaaaagatgtgttcttaagttattgctaagaactaatccttttcaccatgggaggaaaacgtaatgctctataatgtgacttatgagactgaaggttttttataacatagaatgaaatgataagagaatactcttgaatatatgtttgtagttaattacagaagtgtgcaaacaaacttctgacattagtttgttttgtctcctaaattaggtatagatttcttttttttttttttgaagttatatttggcattttttttaaattttattattattatactctaagttttagggtacatgtgcacaatgtgcaggttagttacgtatgtatacatgtgccatgctggtgtgctgcacccattaactcgtcatttagcattaggtatatctcctaatgctatccctcccccctccccccaccccacaacagtccccggagtgtgatgttccccttcctgcgtccatgtgttctcattgttcagttcccacctatgagtgagaacatgcggtgtttggttttttgtccttgcaatggtttgctgagaatgatgatttccaatttcatccatgtccctacaaaggacatgaactcatcattttttatggctgcatagtattccatggtgtatatgtgccacattttcttaatccagtctatcattgttggacatttgggttggttccaagtctttgctattgtgaatagtgccgcaatgaacatacgtgtgcatgtgtctttatagcagcatgatttatagtcctttgggtatatacccagtaatgggatggctgtgtcaaatggtatttctagttctagatccctgaggaatcgccacactgacttccacaatggttgaactagtttacagtcccgccaacagtgtaaaagtgttcctatttctccacatcctctccagcacctgttgtttcctgactttttaatgatcgccattctaactggtgtgagatggtatctcattgtggttttgatttgcatttctctgatggccagtgatgatgagcattttttcatgtgtcttttggctgcataaatgtcttcttttgagaagtgtctgttcatgtccttcgcccactttttgatggggttgtttgtttttttcttgtaaatttgtttgagttcattgtagattctggatattagccctttgtcagatgagtaggttgcgaaaattttctcccattttgtaggttgcctgttcactctgatggtagtttcttttgctgtgcagaagctctttagtttgatgagatcccatttgtcaattttggcttttgttgccattgcttttggtgttttagacatgaagtccttgcctatgcctatgtcctgaatggtaatgcctaggttttcttctagggtttttatggttttaggtctaacgtttaagtctttaatccatcttgaattaatttttgtataaggtgtgaggaagggatccagtttcagctttctccatatggctagccagttttcccagcaccatttattaaatagggaatcctttccccattgcttgtttttctcaggtttgtcaaagatcagatagttgtagatatgcagcattatttctgagggctctgttctgttccattgatctgtatctctgttttggtaccagtaccatgctgttttggttactgtagccttgtagtatagtttagatttctaattgttggagagagaatctgtttacatattggtgaccgttacaagcaaatctaaaatataacatcattttacatcatatattaaattatattaaaattcattaataaatttgaaaggaattaattcatatttataataaataacttcagaagattcactgatttaatggaaaaatttgttgataaaattatattaagagaggaaacaaaagacattaaataaatttgaaatgataaatattcagacatttaaaaaattaagtgtattagttcattctcacactgctataaagaaatacccaataatgcataattcataaaggaaagaggtttaattgactcacagttcagcctggctggggaggcctcaggaaacttacaatcatggcagaaggggaagcaaacacatcctcatcacatggcggcagcaaggagaagaatgagagccaagcaaagggggaagtcccttataaaaccatcagatctcatgagaacttacttgctatcacaagaatagcatggggaaaccacccccatgattcagttatctcccactgggtctctcccaccacacagggggattatgggaactacaagatgaaatttgggtggggacacagacaaaccatatcagtaagtatctacataatccatttgtaattcttcccatcccatattcctattacccaggatttgtgtaatctaggagacataaaacttctgaatttgtattatatgtaagtctcttcggtggaaagaagaatgttggctttattttatcattttaatcttagaagattttaaaaccataattcttaactgaaactaagcttattttggcttgttatatataccacataacttaaaattttaaaatgtaaaataccaaaggagttgaaaattatgtccacacaaaaccctgcacatggatgtttatgacagctttattcatcattgccaaaatttggaagcaaccaagatgtccttcagtaggtgaatggataaataagatgtagaacattcagacaataagatgttattcattgctaaaaagaaatgagctactgagccatgaaaaacacatagaggaaaccagtgaacaagcaaatctgaaaaaatctacatactatatgatttcaacaatacgacattctgggaaagcaaaaactatgtagacagttaaaagatcagtgttttccaggggctgtgagggaaatgtatgaatacgtagagtccagaggaattttaggacagggaaattctctgtaatgatgctataattgtgaatacatttcattatatatttgtccaaatccatagaatgcacaacacccaagaatgaacctttactcttaactatggaattttggtgataatgatttgtcaatataggttcatcaattgtaacaaatgtacccgtctggtgggagatgtagatagcgtgggtggctgtacgtgtgtggaggcaggggatatatgagaaatctctgtaccttcctctcaattttgctgtgacgctaatactactctagaaaaattaagttctttaaaaaatgtgcaacactactaataccactatagaaaaatggaaagagtaaagagaacaaatagcttaccgcaaaagaaatataaatgcccaagaaatatgaagatatgctcacggaattagtagaataactaaatcagtagtttttaattttaaatttatttttatgtaaattttacctatcaacctagaaatggtgaatacagtagaagagtcagtgaagtgggcatgccctttcttgttggtgaggttataaatcagtctaatggtttttgaaagcattttggcaatatgcataaagagtgtatttgaccctatgacccagcaatttgtcttctgagactcttccctaaagacatgattaaatagtatggacaaggttattctttgctatgttacttttaagaaaagtggaaatgaccagcaacctaagtagctgaaaaataagggtcagataaacaaatcttggcatatctgttgcaacggaacattaagcacttattaaaattatgttttcaagaatatttagtaagatgaataaaaattgatcacattataaaaatatatagccaatatgtttaatactatgaaatatgtgtgtagaaaaatgaatattaaaataaaatttttcaaaatattaaaacttaatatcttacatgatgaaatgtgtcatgtatgtattttatcttacaaactgctatgatctgaatgtgtcctacataattcatatgttgaaacttaattgccaatatgatagtactaaaaggtggaggacattaggaggtgattaaatcatgagggcagagccctaatgaatgggattaatgaccttataaaaaggctggtgagaaccgagaactaactaggctcttatatttttccatcacttccactatgggaggacacagcatcccttctctctggaggatgcaacgttcaaggcatcatcttcgaagcagagactgggtcctcaccagacacctcaccagcctacagaactgcgaacaattaatttctgttgtttataaattacctgtctcagatattttgttataatggcgccagtggactaagacacaaatattttcttacaacaaagggaaaaaacttactgcataattttgtaaaatcgaattggaatgagatacactgtgttcacaattttaaaaagtttcacaagggcataagatcattatgcttggcatgtcttccttaaaaaaaaatataccatgaagtataatttctaagcattatgtagagagccacctatttctgtctgtttggagtgggcagggtatccacacactattttgaagaggtgcttgcaaaattgagatggaaaaatgtgtacgtacagttcctaaggccttacctggagagtgaattgccctggtttttacaggtaataccacttggaaggaaactcatgcttctccctaaatcagacaatgcctggccttgagtggtgtcagggtcctggtgataatggttattttaacctcctgcttttctacttctagcatattctgcctttggcttcatgcaaaatactgaaggacagcgagtgcatggatactgctttatcgaaccttgttaattggtctctttgctataagaaatacattgtccctgaagccacaatactaacgcgactggttctacatcttaaaaaatctttgatattttacactgtgtctgttacatggctattatgtttaaactcccttgattagattatagaagtttacattggggaagagtatgtaaaagagacagcaattactgccaaaatcttccccaaatcagtgtcttagtccttttagactggtgtaacaaaaataccataaacagggtggcttataaagaacagaaatttatttctcccagttatggaggcggggaagttcaaggtcaaggtgcaggcacgctcactgagcttccaaggcctcttgggcctctcttataagggcattaatcccattcatgaaggtagagccctcatgacccaataaattcccaaaggcactaccttataatatagtcatcttggtgattagaattcaacatatgaagtttgagaagacacaaacaatcacagtatggcatccaaacattacaaagagttatagtttgtctccacagttagcttagtattaaattttcctcatcagcaagataggaaaaggttagttgaggatgaaccagaagttttcacctgatcatattgacatgggtgcctgataatctcatgcctttatgggaattatatgttcttcattaaaaacaaagaattctggcctttgccaatgatggctttaaactagtacaagcattctgggtgtggctgtggtatttgatcaaagctaatatttgctaatttgcatgttcaatgcaacaatcataaaatactggatagtttcaggtctagtttatgcaccacaaaaaagcaatgataaaactcattcatcttcactttaaagtcgttgtgaagtggctgtttccactgggaatatataggtagcatgtaaaacagttgtcttttctggtaaaggggtttcttgctaaggcgtgaccacaaccaagtgattctttctcttttgattagtattcattgtctcttctgagctgtctctagtggatacagtttagaaatttaacataaagaaagaaagagctctcacactgtaggatttgcagcatgctatttaagtgcaactgctaccacagttaaaggatcatcggaaacatcaaggtgaatgggaaagtggagagagtcaaaattcaagaagagacttttatattattaaaatttattcaaactgtaattgtaaaaatggcatggaggaaaagttaaagtcgaaaatatcagcagtatgtaaaaaaggacaatgtaaaacatctaccaattgtcagaatggctagaaaaacatattccattattcagccaaatattcttgcctttacctctccctgttctttacctgtccacccctagactgtatctttcttgcatatttcattttaagattcttgcacataatttagagaactgaagcaactacctagcccatctttcctcactaggccttccttagaatctgcacggagtcaagtttatggcccctttgaaaagctgcagctccttaccaaagttttttcaaatagaagctaagaagggaaggagtaaaagacagcatttgtataaacattagctcatgtaatcactataaccacctatttaaggtagatgatattaatttcattttcctgaggaaacttactgccattcagatcaaaagtcttctgcaaagtcctacaagtaccaaaagaaaaagtcagggtttttacctatatctctctaactctgattatgtcatttttcttttctctcattttggttttcaactatagagtaacataataaccacttactctcaggaaaaaaaaattagaataaaaatttgcagaccttgcttataaagatttaattacatttaaaataaatagagaaaatatttggaaagtttatttttaataatgatgagtttcatttaagttatgtattctctgtacctattatgaaatatattctgtgaagttgtggttatctgatacaggtggaggtggtagacattaagactcttgatagctgttccgcttctgtcccctttctggtacgtggaatcacttccgcactcacttgaagttgagtctggctgtgtgacatgccggatcaatgaaatgtgcgaagaagtgaactgtgtcacttttggacagatgttctaagagccattgaatgttttactgtgttctgttttctctcagacctatcaaccaacaacactcaaaagttggctgctttatcttcctgagaccaacaacactcaaaatgttggctgttttatcttcctgagtgattacagtatgtagccatcccctgcttattaggataggcacagagtatcagcaagaaataagatactaagagaatagaatttgttattactaaagattttcctaaagtgtccgatacgctcaacattgacgattgttttgcagccaaaacagcaaacatatttaagaaatgtgtttaagaatcacatattgaatctgtgattcacatttgttgtgatggtaaaatatttgtgtagttttctccttttttcagcttctattttaaataacataaattgtttgaaattttgttaatggttcttgaaattaaagacgttcagcaatgatatggtcttaatagaaggaaattgttttccatcactgaagattaattaaattttgagtaagaattgagatatgtgcggctaacacagggaattatctctgtgtttctggatgaaatgggattattaaaacatgaaggaactattttcctcttacggtaagagaacagtaacttaatagtgaaaatcagttgatcatcacatgcttgtggctaaatatcagtttgtcctttttgtagctgctgtaatgatatgttattgaaatcatttagggatacttttttgttgttaatttttatggaggtattattgagaaataaaaacattctatatatttaagatatacaacacggtattttgatataattaacatatccatcaccgggcatagtagtctcttttttttgtgatgagaacacttatgatctactccctcagcaagtttcaagtataaaggacattaatattaactacagttaccatgctgtacgttagatctctataactgaaggttcctactctctgaccaacaactccccatttataccactcctggcaaccgctattctactccctacttctataagttcaacattttatattccacacataatatcatgcaacatttgtctttcatttttttctgcccttatttcacatagcatatgtcctccaagttcaccttgttgcaaatcgcaagatttccttctttttatggctgaataatatttcattgtatacataccataatttctttattcatccatacatccacaaacacaggttgtggctatatcttggctattgtgaataatgcagcaataaatgtcagagtacagatatatttttgagatactaatttcatgttcttcaggtaaataatcaacagtgaaattgctagatctcatggtaattctatttttaatagtttgagaaacctccctactattttttttgtaatggctgtaccaatttacattcccacaaacagtgcatgagggtttccttttctccaaatcctcaccaacacgtatttttaaagatacaatgagacaaactttttatttaaaattatagaacaagaatgaatattaccaattcatcaaaaaaaaagtctgtctactatcaaagtctatttttaaactttatgttcttttacttaaatatttttggaaaaaaagataattatgtacactaatgtgtgtgtgtacattcacaatttggcatatactattaatttggtttaaatttaatttggacataataattcttaaaacttgtcagactgcttgataagtaggtattagtgtatcccacctcatctacagagatgaaaactacagcgtaagttatctaaaacagtaagtgtattggatctcaggaagtatcacttcagaggtgttattcttaacaataacactattcagcaaatgctgcaagaataaaatcattaaaataattttctaaacatcaaataagccaaagtgaatgtaagcttttgtgaataagtttagattcagttaaatttctcaaggatcagctaaattttttaatcaaaaatttcaaccaggtactaaaactattttttgtgtcttcctttgacatatgggctatgtatatgttatataaaaccaaataatgggatatttctgattattatacatttgaaacatatcattgtgtctagcttcataacgtagctatcatattttggtaagttaaattgtatgtcaaatgggtgctcagtctggaagactcaaaaactagaatttttcttttttctaaaatttagtaataattgacaaataaaagcatctggtaccattatacttcctacagtctatattctcctatcatgataaaactggaattcatattatattgaaaaacctcttatttttttcttttttcttctttaactacatcctacagtgtaccctagaagacataaattcaaaaatgtgaatagttctgagaggttttcttgggattttaccttttatgaaactgctataatttatagaatctgcttgtgctctgtcacctaaatttaaaaagctgccttttattatttattttttagtttgctccattcagacagtgatgtttcatgtgggagacatcaccacaatggattactttaacttggaataaccttgctttaataattatatggaatacctttcacaagagaaagcattactaggagaaaagccaataaagctatgaaagacatggataaaagtcaacagctgattggatatagaatctaaataatgtgatatgatttaacttacctggatctcataggtaaaatgaagaaatgatagttacatatcagaattcatatagaatatatgtgagataatgcaaataaatattttagtatcatatttgtcacaaaatagtttgtcatcacatattagctcatcccccatggatgtctcttgtcatacggttgatagaattctgtgtccatttgtgtaattttagctccctaaggatagccactatttgtcactcactgttttatctagatagcacagaaactgatagggagtagtcaataactcagtaaatgtttggccagtgaatggatttacaacatccctgtggaaataatggtagatgtgggtctgtttattgcacaccgcaattgtcaggatgtttattgcataaccagttgtcactggttagtctctgtgtttgtttctgaatttgtttagaacaaggctttatttttactaaaaatataacttgagttgctgacgaattttcagtttttactcatttaccttgctgatatagctagctgaatttacatatctatgtcactatttgtatttatctttatctccatatatttatattatatatacttatgtctgtatctctctatatatgtctctttggggatgtgtactgtgtaggtatattttaaccaccagctcagtgagaaagaactcaagctatgattcttagtgtttgcttatttctgtggtgtaaatacttcaaccacatccagtttcaagctatcaacatgatgttgctgagtgtggagctgggatgagataggtagtggccaattattatatagcattttcaccatacagataaaaggatacaaataacctcacaagtgtagacgacagtgaaatgtagtaaaataattaagaagtgatgagttttgaacatttattacagttgctttaatataatttatttaatcataagtttatttaattttaacaagggctatgtttaatagtatgccctcaaaattccttaagatttagcattcagctttcacaatccatagtaaatctttaatttcaaagtctctgttgcttttcattgtaaaactaaacgtaatccatgctttaactcttttctggttgttttcatatgtcctttaaattctcgatgttttgtatgtttctacagtgaatatttgtgagttgaaactttttaaataattcaagaatatacttttgtgtgtgactttgaaattgtatatactgcttgtatgatttctataatctattgccaagggtaataagagctagtcttaaaatcaaaaaggcactatattactctttgattcccttttttttttctcttaatgaagctgaaataactgggcactgaagataaaatatatgttaactagaagagtatttgctataaaataaaaaatttgacacattttggcaaaagttttttttttcggtagtaaacattttactacctagtatcaaatatattaaacttaataaatataagaaaacagagcctacaaatgcaaagtctaaatcctaatttttacctgcaattgttacttatatgagttcatttttctaaattaaaactaaatcaatctactctacctcctattcatggcctctgccactgcagtcctgaaggttggggtgaagatactcacattttacaagtttgtgaaatattaactaaaaaactatggcgaaatataaacatgaacattttggagagaaacacttctgaaatggtagtgtgtagtgtcaggggctccatggatgctgtcccgagtaaaacaactgtaactggtgaaaattgtaataaaataaccatggaaagtctctggaaatggtcttaagagcatatagcaaatggagaaatatttattcaaaacaaaaaaacctgcaaaatctcagtcagaacagtgaaagttaatgacatttgagcaacaatccccaccccaaccccactctctctagctctgtgtgacagaaactttactctggatagacatggccaaaaacagggtgcttcttctacgtgattctcttcttctttttacttatcagcagaagctgctgtggcttatcaccacgtctggtcatagctgaagagatgtggctgcttctgtatctcctgagctaccacacctagcgcagatccttcctctcataaatgagggagaggctaagaccatgaaaatgagaaagaatcatcttttaaacaaacggtgctgagaaaacttgagattcacatgcagaagaatgaagttgaccctttacctcttggtgaggaagaatataaaacgtttgggcagttatctaccttttggacacatacttaatattagctacactatgaattattggtttggggtgagttagtgagaaacgggttccttttatatgtttagcctagaggcaggtatcgagagagggcttaaatgaacatcctacaataaagtttaaatttttcatcctccattgcagctaggtatgatcatgtgacctggttctgataggacataataagaattaatgtgtgaaacttctaggaagagaagtccatcttcccctatcttccttgttatttctcactgttacttggatggcaatgtgatgattggagcttgaatagccatctggactacaaaatggaagttgtatgttgaagaagacaaactaataatataaattgtccaatgtccctgatgatcatggagccactgtactgcctctcaactgtctcttcttatttcagaaagatgcaaacttccattgttcctgatattggttattttggattttctgtcacttgtagctcagttctaatctcaatgaatgcaagagtcactgacaacctgctatagccaaggtactatattaggcactgacaggtctagggtgaaaaagagacatcgcctggttttcacagagcatacttactagtgagaaaagataaaaatcaaatatttaaagaatatgattttgagggataatcacataacctatagtgagtgaatctggatttaagggcttctcaattcaaagaaaagggaaggccactatgaagcagtgatagctgagctgatacatgagataatagacagacctatacatgtgatgatctggataacagaattctatatagggaaacaggaagcacaaagggaggaatggactaaaaaaagagaagcagaaaaattgacttgtgtggttggagtagagagggcaatggtaagagcaacaatgggagatgaggttagaaaatagagtaggagtcaaatgaaacagggtttaataggtgagggataaaagcaaaaccaaaaatatatacttcagaatcttgtcctggcatctgtttttcctccaatcatctcctcctttgtatattttctttcttttttttcttcatctatatatcttctcatttcattcattcaatcacctatacaatgtggtccactgtctccagaatccaaaatccaggattgtatcctactatttttttgtagattttctacattcaattgtacataaaaaactggcctaggaaatccgcaccccatcgtaatttgtattacaaatttaaaaccagtagctctcaaatcaaatttggataagaatcaatgtactactttgaagatcttccgaatatgtatatctgtttataaataacatatattttaaagtgttaacttatgatctttcattgatacatttctgttttataaaacatgatattcatgatagatctattttattcatttcaacatagatattatcttcgctactcttttaaaatagttttgaggttccaacacccagaaagtgttgaggaaaatttgtatcttctaatggtactaaatataatgtaactgactttgagctgtataaaaaaatgattccaaaatgagtcctaactcttggttttaaaggtgatgtaggtgtgaagggagatgtgacaaaaccccaaagattgttacggaagttttggggaagggaatgaaaacaaacccaccgtggtaattactcctaagattgatgaaaatagaaagtcttgtgcagtattagtagtggaatacatacattcttataaatttgcttgagataatgtggacaatgtgtattaaatgttaaaattggcatatataatttgcatgaatatacaaatgggttacatcttattccctaatacaagtgtggtcaaataaattatataagatttataaaatagcaaattatgcagccatcaaattattgaattgtttcagtatataaaagtagaaacatggccagaaactattgaaaaatattacaagtgagttacaaaacaatatatgtagtaggatttttagggtaacatatatcgaagcagaatgtgggaaagatgaagacggagacacagaaaaaactgtcgtttggaaatagtcttcaaataaattgggtgtctatctcttggcaataaaattataagtatttctctttttatttatatgtagctttttccagtgaaataataattattataataaaaagactttttaattcaagacaaaataacgagaacatcagtgtgattagaaggcattacatggggataaatggcagccatgtcatctgcaaacagagacaatttgacttcctatttgaataccctttatttctttctcttgcctgattgccctggccagaacttccaatactatgttgaataggagtggtgagcgagggcatccttgtcttgtgcgggttttcaaagtgaatgcttccagcttttgcccattcactatgatattgtctgtgggtttgtcataaatagctcttattgttttaagatatactccaacaatacctagtttattaagagtttttagcatgaaggggtgttgaattttatcgaaggccttttctgcatctattgagataatcgtagtttttgtcattggtgctgtttatgtgctggattatgtttattgatttgcatgtgttgaaccagccttgcttcccagggatgaagtcgacttaatcgtggtgggtaagctttttgatgtgctgctggattcagtttgccagtattttattgaggatttttgcattgatgttcatcagggatattggcctgaaattttctttttttgttgtgtctcataattggtgggaaatacatatatgttgagaatatatccgttgtttgaaaaacatgacttttatattcaaaagttgtaatctttttatgaagatgcattttcttttttaaggatgaaggaggggtagatgtatttttaagctaggaggaaagaaattcgactttctggcagcttattttgtgaccatgtataaatcaagcaaacaaaagctttcacttatagtaaagttcacttgaagataaaaattgaccaggaattaaagacattgtatgcacttgtctagtttatattacttgagggtggtggtaagatgttttctggcttgtatagcatgcatgtattaaagacctgagacataaagaagcaagtatatttgaggaactaaagtcaagcacagctagaatgaggaaagatgaatgaatcaacatgggttgggggagatatgtaaacagggattacctcatgcagcatcctatagttcgtgtttagcattctggattttataaccaaaaaaataaggagccgcttatgagatttagtcaaacggaataacatcatcatctttatctttttaaagctcattgtgagttcatgtggcagagagactttattgggaatagaggtacttatatagggattggaggatcaacaggctgaggaaagatgaaagaccagtaggaggtcgtagtacttataaagtcataagtgtaatatgattttgattagaatagtaacaatagacactgtttaaaaacactttttagtggtagaatctacgtgtcttgaagcttgattaaatgaaggtgaggaagacagaaatcttaaatgatacaaagttctgacaagagaagtttaataaatagtagttccatttaccaaggtgagaaatatataaggaggagcacatttggggtggaattcgttttgttttcttttgttttttattcatgtcatgttatgtttgaagtggacttgttcagtaagcagcagaaaatatgtgcctggaatatatgcgctcatttaaaagttatttccttttaaataattgctcattctgcagaaaatggctgactttgaatatcagctgttttctttttctttttcaggaaatcattcttgaaatggtaaacatccaagttttatcaaataccaggatataattgcctggtgtgaattattattttgttagtaactataatagataatccacagaaaatcttttggaaataaaagacttgaaattaaaagctatctggaatgttatatttaaggacacagaccttgaatgactgttcttcaagtaaagagtctttgttgacagatatcaaaatgtcttatattatgaattcacctcaacttagaattatgttaaaatgtgtggccttccttgaaacaccacctaaaagaattttcttattgtcaaacaaacacttaaaaaatagtttttgaaaaatgagtaaattggtattgataatcttatagaacatgtgtacagtttttaaaatatattgaatgtaaatagtgtctttctgtgtgaaactaaacaaatattggacacctccaaaaatattttgttctgaaattttccttggattgaaaaaatgactcaaatcccatattctacttacatctttattgtagcatgacttagggctcttctgtgaatgagcgtttacaccttattttaaaaaattatgttttaaaacaatttcctttgaaaataatggttttcaaaggaaaaaaagagcatctagggctcagaaaattttctttatacttgcaattcaaagttattttcctgcagcaatttcttaaatgaagatttttttaattaaaaaaactatattttgttgttgcaagatagaaataataactttgttgttcaaaattgacagagacgagcctaatgacttccttgtctgaccttgtctataaacttggaaacctcacagtctcgtcttcctgttgtcttcggatgtaattttgttggtagctcaggtcatatttgcttgtgtctatagtaactgagcccttttcgactttaggcactgtgcaagttagttggcatatgccacaagaataaaaaataaaaccaacagctattgtctcttggttacaatccttaatgttctaatgacctttctggaaaggtgatatttacgctgagatcctctgaactataaaaattggagggagagagaaggggaagacattcagtacagagaaataacatgtacaatggctcttaagcttcgaagaattagcgaacttagggaaatgatagaggccagcatctgtggagccatgaaatgaggcaggaaagtttgacgggacacctgtgaatctagagtgttttaacttcatcctaaggtcaataggaggccattgaacaatttgaggggatgtcacaatgggatgtacacttgggcattactctgatgctgtttgcagtgagaagaatatagagagggcaagatctcaggagatacagagttttatgttgggtacaggttggccgaagtaaattgtgtttatctatacaataaggttagatgaagtttgcaattgatttagttaaaaaatttcaaaaactggatgaccacataaataggaacagataacctattcggaaatatggcttccccggtccatcagatttcccagtggaatggcacccatgacactaaaggcccaatgtgagatctgcctagttatagaaagtaaaatctttatttttaccttaccctgttcaactgggatattacatcaccacttcgaaagaatttgaactaatcatctatgtgcttccattcaagagaatatttatataaatatctggttttttataatccttaaactaaacctagaataaaaaggccacatcatcatcagtggctcagccagctttccagaaggctggaaagccattcacctcgaggaggctctttcacttttgcggggtggctttgacaagggtagtggcacttatgaaggaaagaaagtagcctcacatgaagtattatttgcagggagcactgacaggctttgcagatgagttgaatggtaggaattgttttggagaaggtaagaatcataaaggattgcctgatgatggattgtggtgtgagtgagctaatattcctaactcagaagcatccattacttaaattaacaactaaggtgtgattgtgtcccagtttagagttcagcttctatttttgcactggcctagtgctctacattctactcctgtctttttaaccgttccttacttttcagatctatataattttatgctttactttttattgatgttgaagaaaaggcatttcttcttcttaagcagctagtatgggtatcataattcagctcaaaatcagttacaaggattttcattgttcaatagtgtaaaaatataataaatatccttgatgcctgtggtgaaatactatcaagcagctaaaaagagtgtattagataagtggttctcaaccaggcatgagtttggccatgaataagacatttgacaatgtctgcagttttttttatcgtaattactgcggaagtggtagcattgtactggcatctagtaggtagaagacagagattctggcaaacatcctacaatgcaaaggacggcctcccccgaacaaacaattatcagtccaaaacgttaaaagtgccacttttgaaaaaccctgtattaattagatccatatctcacaataattatgtaacccaaatatataatattgagtgaaaaaggaaagttgtagaacgattgcaaagcgtgatagtatattcattcttttaatgctagctagcatagcaaaccaaacccacaatttcagtgccttaacacaacagatatttattgtttgctcatgtcacagtccatggcattccatggcagcgtgttgctttcctgcatgtgacgatgcaaggatccagacgtcttccattttgttgctcccccgcatctcttcaacctcagagtcatctgcatacatccatagaatgggaaagaaacagcagagaagatatattagctttttaaaatctgaagctctgaattgacacaaattacttccactcatattctactgggagaaacaaatcaaataaccacacctgcatgcaagaagagctatataatacaattagaggctgaacagcctgtcagcgatactacctgggtatggagtggatcaacatggattcttatggatagctcattagctcaatgaaggatgccaagcactcaagtaaatttgtaaagaacatacacacatacatacacaacaacaacattatgtattgtttatggatataggaatgtatgtgaaaagcagaacaattgagctaaattaatgaacataaaattcatatatcatggcctcttataaagacgagagcaggagaacaggcctggagataaggaagtaaagtgttttcacatgtatttgaatcattttcttttataattagattatgcacaataaattaggacagattattcataattatgatttcctggagatatgtactcattgtataagtctctggacttctctaattttacctttctcaaaagaaaataaataagttgagtaagttggatgtatttgtatcagccaattaacttttatattgatatttaaatgagatataacatctacattattttttacatttatgtaaaattctagatatataaaacaagaatttttataaaagctattgttgttattaaggtatactttggtggaacattgtacagtgttctttatcgtatggtcctattcagattatgtaccaaatgcaatactaatatgctctcaagcttcttgaaaaaaatcctatctacatcacgataatatgttggtaatatttttgttccctgtttattttggtatctcaagtagtctcatcttttcttttagaatatacctgatttttaagtcatcttgtaaatatcaataatgtctttctttcttgcaagaaacagaaacccaaacaaaatacaattcaaaattcaaggtgtatttgtgcatactctggattatctactggtagaacccaagaaaaatttaacctacaggccatgggaatgatggggccataggccatctccatagtggtatgctactaagaatgactcattgcacaaattctcattttatgagtctcaggtaaagtattttaggaagtgcatctgtttgttccaagttgaatcaggcctcaatcttggtccagtcagccttgtcctagaggcaaatatcacacaatacaaacatgatatcaaggactctgcttatggattgtttgactggagggtgatagtcgccagagaagggagaaaaattatggactgagtagaacttcccaaatatctcttgtttagtgtgtttcttgttccacattattttgacagaaagaattctgagttatattatttgatcctccaagtttcaaaatccttacaaacaaaaatgtttttaatgccttcacatgtatgtttctttctatcatgttactttgaattatgaatgcatcaatatgtaatgttacagcattaaatgtatcaagtttgcttctccactacattataacacacacacacacacacacaaatgaattcgtattaaactttttgaaatctatgatttaaatagagagataagaagaataatgactggttcattatattacacaacctatgctttgtatatggttttcttttttaaaaatgtactttgtaagttgagaaaaaaggtaattgacaaaataccagtgtaaattttgaacacaataaaataaaattacatcagcccaattacaaagcaacatgtatgaatagcttaaccaactctcctgttttaggtccttacgtgaaccaaaatcctgttgttatttatcacttattggaaccaaaaagagccacagatgttgctttgaagagcaggatgctatgaagtactgttttaaagaccttattaaacacttcactgaaataggaagtcatttatgtagtcattaatacccctcactgcatttaaaccacagttctcaaaggaaaaagctgctcctctctcacagttttgttgttacttacttttaaaaatcaaagatcaatacctttaatgagaacatattgggaatatctatgtgctacgctctaaattaagcattagggcaaaaaaaaaaagatgatttttaaagtcttttcttttgaattttgaattgagatagaaaaccaacgttataggcccataaaagggcctgtaactggagacaagaagggggaaaggctgaaaaatatacctataccaaatttgaagagagcattgatagtcagtaaatatattgcagcaacattatgaaggtttgtgtaagccatgataaaaagcatagaataaaatatttaacataaaaagtagaagaggctcagcaaaaatttccttctattcacctgtcttaaaaagttaagtatttttatcttgtgtttaatgaagaagaatttggaaactaaaagttccaaaaattaataaatttttggctatgcactgttatgtccttttgttaaaaaacactaattgttgagaaaaacctgattgctctatcatctttttatattcaaaccaaatgtgcttgattaaatgttttagatgtcttattaatagacagtcttgatcttggctaaaacatctatagaaaggcttacgcagtgtgctaggtgcatgttgaactccctgtgttgttcaaactagagacataaatgattaatgaatactttatcatatgttatatgtgtattttatatatatatataaaattatagtcatgtactcatctgtaatttcaagttggtagacatttttgtttgcataattttgacagatttgttttgttttgtcttgttttttgagacagtctttctctgtcgcccaggctggagtgcagtggcgcgatcttggctcactgcaacctccgcctcccgggttcacgccattctcctgcctcagcctcctgagtagctgggactacaggcgcccgccaccatgcccagctaattttttgtatttttagtagagatgaggtttcaccatgttagccaggatggtctcaatctcctgaccttgtgatccacccgcctcggcctcccaaagtactgggattacaggtgtgagccaccgcacctggcctcgacagatgttttcataaaattaaataataaaatacaatctacatattaaagttttatatatttctgtaaattgagatatttttattgtcggcactatttttagttaggttgcttaaataaatactaaatatacaatgaaaacgaacatacctagtacagtcattctactcatcacttggtatagttgatgtttttttttttttttctttgagaccaaattttgctctttgtcacccaggctggagtacaatggtgcgatctcagctcactgcaacctccacctcctgggttcaagcaattctcctgcctcagcctcccgagtgcccaccaccacgctcggctaattttttgtatttttagtagagacggggtttcaccatgttggtcaggctggtctcaaactcctgacctcaggtgatccacccacgttggcctcccaaagtgctgggattacaggcgtgagccaccgcatttgaccaagttgatgttttatttgttattaatttcaaaggctgacatgtacttatgatttcagtagttaccagctactctacacgcagcatggtacaattaaatgtatatttagcttttggaacatttctttttaaaagttgtgcacattttaaaaaccaagttatctgaatcacgtgttaaaacatattaaaacaagactgagaattccatttcggacaagatggcataaactgatttttccctgctcctcatagtgaagaagaacaataaaacctagaaacaaaacaagaggccatcaaaagaaaattgtaaaggatagtcagagaaaagcaaactgctttgagagcctcgcgctagaggaaaataaactgcagcacattctcatatgtgcccctatccaacagaagatggggacccccacctgtcattttccaactttcaagcctagtagcagaaggcagcccagctagtttcctctctgaattgaataggagtctctcagacaataccagatgagcctggtataactggcaagggctattgaatgggagcccatctaacattaagcagctagggtaagtgcctctcctttcccagggatttaggactaccatgctctgctgaaaaatagacaagtggcagtattgtttagaggaattttgtcacagcaagtggcccaacctcggaagcctctttgtccctacaggcctaagacactctcactcactctcactcacaacaggaaatacttaggtggctgggtgcaactgccacaagggattttaccactctaagtggcctagtgcaggaagcctctttgttcctgtgggtctgaggctgccctctattgtacagagatactggggcagccacagggtactagaagagggatccctcaagaacaaaatcccatccagaaagcactgtctgttcccaataggcacagagatcttgccacaagtgtcctaactactgaagcctcttcatacctgcagaactgaggctctcttttccgacaggaagacatcgaggtggaaaggcagaaattacaagagacacaatcataataagtgacctggttcagaaagcatctttggtcatatggacctaggacttctcttccccacccagagatacctgggcaaacacagagcactggtaaggctatccaccacaaagagtgactagcctgggaagcccgttggacgctatggccatgagaatccctccacttttacccagagacattggagcagctggagggtaccagtatagggattctaacacaataatcctatctaggaaacacttttatctctatagatctaagaaacccctactctacctagcagcaccagcaccctagtctggggaactccttctgcccactcagaatgtaccatcaaggatttttgagagtaccagcatcactagataaaccaagcaggcctcaataacacgagaaatactctgaaaataaaactgtctttgggaccacagcccataaaagtagaatggcacctgtgtattgaactacgtatggtaaatacctgctaaaataaaagattgaaataagatccagattctgcatatataatggacaaaatgtccagagtaccatcaaaagtcgcctgcatactgagaaccaaaacaaacaaacaaaactagaatgagaaaagacatcgactaatgctatcacttagataaattagatgttgaaattatctgacaagaattttaaagtagaagtcaggccaggcgcagtggctcatgcccgtaatcccagcactttgggagaccccggcgaccggatcacctgaggtcaggagttcaagaccagcctggccaacatagtgaaaccctgtctcgactaaaaatataaaaattagctgggcatgatggtgtgtgcctgtaatcccagctactcaggaggctgaggcatgagggtctcttgaacccgggagagagaggttgcagtgaaccgagatcgcgccactgcactccagcctggaccacagagtgagactccgtctcaaaaaaaaaaaaaaaatgcaatagcatttatgatttctgcaaagaaaatgaaactcttacatataaaactaacaaaacatgcacagaatctgtatgataaaagttaccaagtgctagtaaaataaataaagaagacctaaatatatggagatacattatgttcatggattggaaaactcaccatagtaaagatgtgaattctctctaagttgatctatttttaagacaattcttacgaaaattttagcaatgtttttgaacttacacaggcttattataaaaattatataggatgtatagaatggcacaggacctatactagccaaaactattgaataaggaaaaattaattagagaaatcactcttactgttgttaaagttaattatatagcagcagtattctagacagtctgatactggtggtgtacagactcatatatcagtgaaacagaatagagagcccagaaatagatccacaaatatgcccaatttatttatttttacagcttaaagtataattgatatacaaaaatctgcacatatttaatgtatacaatttgatgagtttggacatattcatatacctgtgaaaccatcaccacaatcaaataacaaacatcaattccctggaaaagtttccttgtgtccctttgttttggacgaagcaggaatccagtaaggagggttagcctttttaataaatggtgttgtagtaatccaacacccataggcaaaaaacaaacaaaaaacaccttgatctaaacatcagaagaacttaaactgtaaaacttactcaaaaatagaacatatttgggatctaacgttaaagtgttcttagacttgacaccaaagtcgccatccataaaaggaaattttgataaagtgaacctcattaaaataaaaaacttttgctatgcaaaatattctgttaagaagaaatataaccgggcgtggtggctcgtgcctgttaataccatcactttgggaagctgaggcaagctggtcgcttacgctcaggagttcgagaccagcctggccaacatgatgaaactctgtctctagtaaaaatacaaaaattagctgggcgtagtggcgcacacctgtagtaccacctacttgggaagctgaggcatgagaatcgcttgagcccaggaggcagaggttgcagtgagtcgagatcataccactgcactctcaaaaaaagaaaaaaatgaaatacgagctacagactgggagaaaatattggcaaaccatatatctagatatcaagaactagtatcaaaactacataaagagctctcaaaactcaacattttaaaaatccaataagaaaatggacaaaagacaggcacagatgtttcaccaatgaagatatacagatggcatatataaatgcattaaaaaatgttcaacatcaacaaccattagtaaaatggaaattaaaaccaaagtgagatattattacctagtagtcaaaatggctaaaataagaaaatagacaccagatgctggcaaggaagcggagaaactgggtaaatcatatattgctggtgggactgttaaatggtatagccacactggaaaatagtttggcagttcattttcaaactaaaaatggacttagcatatgacacagcaattgccctcttaatcattcttaaaaaaatgaaaacttgttttcatacagaaacgtatccacaaatattcatagcagccttatagtaccaaaacacacaaaaaagtcccttgatatgtaattgcttaaaaaaaaaaaaaccctgtggtacatgcataccatggaatattacccagcaataaaaaggaattaactattggataaacctggtgtaatttatactgagtgaaaaaaaataacaatctctgcttaattttgttgttcacccaaaagtcattcaggagcaagttgtttggtttccatgtaattgtgtggttttgagaggtcctcttggtattgatttctatttttattccactgtggtccaagaatttgtttgcttttatttcaattttcgaaatttattgagattcgctttatggctgagcatgtggtttatcttgcagtacattctgtgtgcagatgagaagaatgtatattctgtggttttgggtaaagtagtatgtagatgtctattaggtctagttggtcaagagtcaaatttaatccagaatttctttgttagttttctgcctcagtgatcggtctaacactatcagtaggttgttgaagtcccccattattactgtgtggcttcctaagtgttttcgtaggtcttgaaaagtacttgatttaggacattggtgtgccaatgctgggtgcatatatatttatgatagttaaattttcttgttgaattacaccctttatcattatgtagtgaccttctttgtccttttttactttactgtttgtgggagtgtaaattaggtcggctactgtgaaaagcagtttggagatttctcgaagaactaaaagtaaggactaccatttgacccagcaatctcattactgggtttatacccaaaggaaaatagattattctaccaaaaatcatatgcactgggatgttcattacagcactgttcacaatagcaaagatgtggcatcaacctacatgcccacaatggttgattggctgaagaaaatatggtacatacacatcatgaaatcctatgcagcaataaaaaaagaaaaaaatcatatcctttgcaacaacattgatggagctggaggacattatcctaagcgaattaacacagaaacagaaaaccaagcaccacacgttctcacttataagtgggagctaaacactgagtacacatgaacataaagatgagaacagtagactctggggactacaatcgaggggagggaggaaggggcaaaggctgaaaagctacctattgggtactatgctcactacctgggtgatgacttcagttgtaccccagacttaaatatcacacaatatactcttgtaacaaacctgcatatataccccctggatgtaaaataaaagttgaaatgtaaaaaaggaaaagcaacaatctaaaatgaatgtatattgcatgtttccatttgtttttgcttgcttgtttgtttttgagacaggttctcactcttgcccaggctagagtgcagtggtgcgattgtagctcactgcagccttgaagtcctgggctcaagtaatactcctgcctcagctttctgaatagctgggactacaggcacacaccaccacacctggcccatttttaaaaattgttttgtgtagacagggtctcactatggtgacagaccaggatccctggtctccagcgatcctcccgccttgacttctcgaaatgctgagattacaggtgtgagccactgcatctggtctctatttgtgtaacatttctgaagtaacattattatggcaaatagatgagtggttgcccgcttgtgaactcctccaccttgagggctcagaggctggatccatagatatagcagaatgtgtttgtgtgtgtgtctatgaaaaggagtaggaggctgagggtgggaaaatgccatggaagcaaaatatgattgagcatgactagcttctcttgtgactgttcagcccaaaatgtccaggagtcataaacacgttgtgaaagaaatttccagggcatgcatctcataaggacgtgtctgcttgtgggttctcaggaaactgcagaccctgccctgcaagtctggcctctctcatggacagtcagagggccatgaggttgcattttttaaattgaggtaaaattcacataacataaaagtaaccattttaaagtgtacaattcaatagcatttcgtacattcacgatggtgtgcaaccatcatctctattttggtccaaaatattttcatcaccccaaaggcaccactgtatccatttatcagttagtccacactcctccctcacccagctgttggcaaccacgaaaccactttctgtctctaaggatttgggtgacctggtcttcatgtcaatggaatcatgctgtatgcagccccttgtgactggtttatttcactcagcataatgtgatatggattgggggaaggtggcaggtggcctataaaaggataacatggggtgtcttgaggtgatggtacatctaccacttgtgttgtgcttacgtgaagtgatctatgtggtaaaattgagtataactatatatacacacacacatacacacacaaatgtatacgtacataaatggtgaaatcagaagaaggtttatggattataccaatgtcaattcttttgatattataccgcagttttgcaagatgtaaatattgagtgagcctccgtgaagggtgcacaggaccttcaacctccctatacaattttttgaaacttcctgtgaacttgtagtttatcaaattaaaaagaaaaattcaaacagccttagtttagatctttaaagcctgatcctaatgaaattaaattcattttcatcccatgtatataatattgatgctcaccccaatgattcgtagattacatatttttgacaaagaaagaaatgtaataggttgttactttcttttttacttacaataccagtatcattttgctgaatttaattggggagctctatagaatacaacttgaaaaatactagtctaacttatgtcagatgttcaaattaatgtagcttagtttcgtgctctctggacttttagacttcatgattcaactaaatttaaaacaagttagaaacaaaccagagatcaaccttgagttgccattttcttactttgctaattagggcttctcaccattgtaatataaaagaaaaagaccctatcagcaccaaaacttggaaggacctgatcacagaattaaaaaatgaaataattaaaaaaaaatactccagcctcttcatgtgtttcctgtttcaccatggcctgatgtgaccgtcatcatgcactggaacctgaatttaaacgcatgttaatgaactcctcaaatggcatttaccgaatcagagaaaacttgaaagaaacttaactagcagtggtccatttgagtaaaaatataatacataaaaggaagatctcttgaattccaagcctgacaaaaatttcatctttattagatggaatactatatatcccattttaagaggtatgcatatgtacataaatcggaaatttgcaagtaatatatgtgattttaatgaacttcaaagaaaacaatcatacaattgtatagtcacaccacatatatatgattgtagtgttagtaatagtgttttctgagtgcaaatgatatgtatatgtacgtaaacatacacagagatgcatgcatatatggaatatatgtgtatgcaagtacatgtcatatgctttcccatgggcaaatgattatgccaatattttcccaattttctaggatgttaacactcagtctcttttgctcaattccatatttaattttagtcctgttgaatcattaggatgtctttcatttagtccaagtcttactaatctgagttccatagtccatcacaatcccactttttctttggaacacttcctaaatagcaaattgccaatgttaagctcccttcttctgaccttctctagcattaattacacgtacctcaggtgttgacacataattatggtatgtctcagcttgtcccagaaatgatttttagtgatacatgaacatacgctatatacttttttaaatagaaaaataattgctgacatttaaaacggatctgaacttttgcttagtattaattctattcctcacaaaatcccacattttctgcccatttttcagatgagaaaagccaaagttaaaagggcttaaagttcgtgttaactcagctagtcagtggtagagctgagatttatagccaggttttctctttcccatgtgtgactctccaccagtattcattgctaattttatgagcaaatttgtagaagcatgtattcttttgaatgaatataagaatgacatttactaggctgtaccatacactgattcaatcaaaccaactaatttgcacaaaagcttaagtgaaatctctaagatttcatgcagcctgaattttaaatttggcatgagataggagactgccctttgcttagaaaacaaacagcacaacacgacaaagacataaacttgccccaatgccattgtgcgggagagcataaacctgtggtgagtcaaggctatagaaattaggttctgtggcccatctaatttgttgcccatgtcaggggccagcatgctgtccaggatccagctcattgctggcttcctcgctatgaaggcaatagtcttaggatccttgttataaacgtttggaaaaagtttctgaggccctcaaatcttcctggaggaggcagatatacagatatagcacataccaggaatctcagtcatgggctcctcgatggcagatcccatcagtagtgtttgaaacacacagtttgtacatcataagccccaaattttgatggctagtactaaaaattattttcaaagttgtatttcagtatttacataactattgagaagtgatttcttttgagagactcaaacaacagaaccttattttagctaatgaatttgtacatgcaattccctaattttcatctccctggcagaatggtttctacactccaccttatcctatagactaattacaaattaaccttactaaatattcatttttttctcacttcttcctttgctcacaaatttctagcatgtgccttacatgcatgcattctagttcagactaagactctgacctttcatgccaccttggatcccaccttatttctcaatattctcaacatgaattttctaaatattttcagcttagacctttaaatctatcaagttataattagtgctgacttggtagtggctaatatcactgtaatacataaagtataatgaagaaaatatgtgtttaagaaatatgaacagtagaattctctaggatttaccatcaaactacctgtgtgacctagagctaattatataaatcctgagcttccattttttccagtaatagggagatgacattagatgattcttaacatactctttaatatctttgacaaaaaaaacttcagttatctgattgcttatcctacttgtgtttgttttgtattctcttatgtatgctgggaaatgtgaatccgtatacaatcactgaattatcataatgagattcatctcctggcactggtgctaagattgagaatttttgctattgatggacagagctgtggtattgtgaggcaatatttcttattatattgcttttgttgaagttagtaagtagtataatcctgaaagcaaaataaaatgtggagccaaacaaattgcctctcatatttacagagggcaggccatgcatattacttcacattatgcataactgaggttgtaaaatactgctgtagtgttttgatgattcaacagttagtgttcttcctcaatcaaagagctgatgttaacagaacttgccacaatacagcatatgctaattgcgtatggcttcatgtgggcccttcaaatataaaaagtcaaacttttagaaaccactcaataccagacattcaaaattctgggtggcagtaagggatatcatttgatatttgaagtcaagaaccggattagattagttagagatgcaggaatatttgcaaggtctgtatgacctttacataacatgatctactggaaacctgtttttctaaatgtttatatgtatgcacattgacatttaaaatgaaaacaatgggatgtaaatcctctcattaagatgggtgccactgactgattactattcttgaagcaatgttgtcctttttcttgcatggtaaatgcttcttttttaaaaaataaaaaagtcattgctatgtataaaatgcatcattcagagattataaccagggttggaagtatcatatttgaactttagcttagacaagtccagaacatgttacaacagggtcactgtttgatgttacattgttgttcagagctcaactgtgtgttaggcctggactgaggacacagtgacaccctttattgctgtattgcacagttacatctcagggtaatgcttagaggtgggatatgctaatatagtagtctaaaatgtgcaatcaataattcaataattatttagggagggtcagataccacgctatgtgttggaaatacagtggtaaacaagactatttttaccctcatggtgattaaaatccactgtttttttttaaattattttaggatttgtcaatattccaagggcctaccgcaaggaagagcaagtgactaaagcttgtttctaatctttctctttttattcactatttttacctttcattttgtctcacagacatgatttgacccagtaatgtctcaattctttcccagaacaatgtggagataaccagatcataaacagctccacctctaattacaatctgcgtcattttcttgtgtgtgtgtgttttttttttttttcattttgatgtcattaccatagggaggaatcccacaatggggcaacaatcaccatcagttcctccacaacatgtggtttcaaccatgactcttgagaaagactttagctctatctcagaatattcccaataatttgatttacttaaactttatggtgcaaataatgtaacccatttcacgattctatctgctttattcttctttcgtcctttttgttctttaacatgtgactgaattataaactgccccttgaattcatatcagtcacaaaataaccttgataattacttcactctacatggatttctctataaatacatttcctctctgatcaataccaaccaactcaacatcgtccaagttctccccaaatccaatgaactcttccttctttgaatttagaacacaaattctatctcatgtatatgcatataagatgtcattggaaaaatgggggaaaagatcttaaagggatcagggaggctgggtatggaggctcacgcctgtaatcccagcactttgggagactgaggcaggcggatcacctgaggtcaggagtttgagaccagcctggccaacatggtgaaaccctgtctctactaaaaatacaaaaattagtcaggcgtggtggtgggcacctgtaatcccagctactagggaggctgaggcaggagaatcgcttgaacccaggaggcagaggttgcagtgagctgagattgcattactgcactccagcctgggcaacagagtgagactctgtctcaaaaaaaataaaaatgaaaaagaacacacatttgctttgccactcacatggtcactattcatgttttaacttaaatcattgaatggtcttattgtgttttcttttttttggtttttttttttttggttttttttttgagacagagtctcgctttgtcgcccaggctggagtgtggtggcactatctcggctcaccacaacctccgcctctggggttcaagcaattctcctgcctcagcctcccaagtagctgggattacaggcacccgccacacacccggctaatttttatatttttagtagagacgaggtttcaccatgttggccaggctggtctgaaactcctgacctcaggtgatctgcctgccttggcctcccaaagtgctggaattacaggcatgagccaccgcgcccagccttgtgttttcatatctaatgtttcatcacatggaatgcagtgttcagagtggagattctaggatagacagatagataattgctaacagtgcttaaaaaatattcagcatttgataaatatttgcttttttttttttagttttaggtaaaattaaggatcattaattttttacacctttgatcatgttaacatataaaagattaaataataggcaataagtagcaataaaataggaagtttagtttttccaaaaagtttatgatacttttattatttaaaaagaaatatataaaataatcacttggacactatgaaaatgttggaactgtaacttagcaattagaaatgcattagatacaaatgctatacagttactttatattcaataaatgttcattgatagtaattgctaattttaagatcttcgagaaaatagatacaatattgccacaaataacacctttttaaatacaccttggaatatcagggttataaatagttctttgtttggatgacaaaagtcttttttctttagccacagctgttgataatataaataattcatttttaaagcaataaaaataaatacagccaagattatattcatttatgtttgggggccatatatatagtttatagcataaaaaagcagtgatcttatgttgaccctttctctaaaaattaatagtttattcagcttcctgtgttgaaattgtttttgtttatatactattcccttatattttgcttatatttgctctctttttctgaagaccaattattgaccataaaattagataatcttggaaggtgttaacatttcctagttgaggacgtgtgcaacgggatggattttgctgccgtctagtttcttctcaagtgtctaagctgaggcgttccctactaaaactcaccactgtctggaaatcaaggcacttaactctctgttgtgagggggttgattgtaaatgtcccaaggtattgcaaaagcagaaggacccacgtagagccatgcaaatgagagtgggtagatacattttatgagtgggtgcctcctattctcagccctggtgatttttagggtggtctcaggtgtgtctcagggtagagaggtatagagttgccattctttgtctgatttttttttttccttgtctattgctttaggataaactcagccttactttactcacagctacaattttggctctcaaaagatagtttgggaaaatgttttaaaaatctgactatttattgtttcttgatgttttcaacccttatacaataattttcttttccttgaatacccattgatgatatatgaaaaaaataaggaccagaaggtgaagtgggaattttaaaagtatcaagataaaaacataagcgttatctcactagagacataaacccaaatattgtgttgatcagggtagagtaaagaaagcattgcccctgttaaatcacttatagctacgatccacttggtaatcattataaatctgtgattatatatatatacatatatataagctccatatgattttatttattatgaccttttattttacgtatatattagactctgaagagccccagggtatttgtcccaagatctttgcaaaactccgaatttgcaaacatcactaaggcatataattctactcataaaatgcagtaaagtatggctaattacagagaccccatcagactcttgatgattgtataaacttaagtcatatataacactattaaaataaaatctactactaaacaaaccacattgtattatatcaccccaattaaatttttaactatgaacttgcctcaatctgaaaataattgtagtgagcgaataatgatacttgctgtgtaataggtgcctggcatgttttctttaaagtaggacacttttatttttaatttcaacttttattttacatacagggagtacacatgcagatttgttaaaacggtatattgcacccagatagtaagcatagtacccaataggtagcttttaactccttccccgccggtccctccccactctagtagtccacagtgtctgttgttctcatgtttatgtccgttgtgctcaatgtttagttcccatttataagtgagagcatgtggcatttggttttctgttcttgcattacttcgcttaatataatgtcctccagctccatccatgtcgctgcaaaggacatgattttgttcttttttatggctgcataggattccgtggtgtgtatgtactacattttctttatccagtcaaccattgatgagcttttaggttgattcgatatttttgctattgtgaattgtgtgacaaagaacataccagtgcatgtgtctttttgataaaatgatctattttcctttgggtatatactcagtaatgggattgctgaattgaatgatagatctgttttaagttctgtgagaaatctccaaactgcttgccacgggggctgaaataatttacattccaaccaacagtgtataagcactcccttttatctacagcctcaccagcgtttatcttttgattttttttttttttttttttttgtcacccaggctggagtgcaatggggcaatcctggctcactgcacctcaacctcctgggttcaaatgattctcatgctgcagcctccctagcagctgggattacagatgtgtaccaccacacccagctaatttttgtatttttactagagtcggggtttcaccattttggccagtctggtcttgaactcctggcctcatatgatcctcctgcctaagcctcctacagtgctgggattacaggcgcaagccactgcactcagcctttcttgacttttaaataatagccattctgtttggtgtgagatggtatctcattgtggttttgcttttcatttctctgatgattaatgatgatgagcatttcttcgtatgtttgttggtcgcttgcatgtcttcctttgagaagtgtttgttcatgtcttttgtccattttttaatattagacttttgtcaggtgcacagtttgtgaatattttctcccattctgtagattatctgtttactttgttgatagtttctttggctgtgcagaagctctttagtttaattaggtccctcttgtcaatttttatttttgttacaattacttttggggacttagccaaaaattctttgccggccgggcgcagtgcctcatgcctgtaatcccagcactttgggagaccaaggtgggtggattacccgaagccaggagttcgaaagcagcctgaccaacgtggcaaaaccctgtctctaccaaaaatacaaaaattagccgggtgtggtggcagacgcctgtaatcccagctacttgggaggctgaggcaggagaactgtttgaccccaggaggcagaggttgcaatgagtccagatcacaccactgtactccagcctgggcgacagagtgagactctgtcaaaaaaaaaaaaaaaattgccaatgccaatgtcaagaaggacatttcctaggtttgtttctaggatttgtagttttaggtcttacattaatatctttaatccaccatgagtttatttttgtatatggcaaaaggtagggatcaagtttcattcttctgcatatggctagccagtgatcctggcatcatttattgaataggaagtccttttaccattgcttgtttttgccagccttgtcgaaggctggttgaaggtgtatggctttatttctgtgttttctattctgttccattggtctatatgtctgtttctgtaccaatattatgctgtattggctactgtagtcttgtagcatagttggaagttctatagtgtgatgtactgtggtgtgaattattgtagggtgaagtactgtagtgtgatgcctccaattttgttcttgctgcttaggatggcttcggctatatgcgctcttttatttttttttttggttgcatatgaattttagaattgttttttctaattctgtgaggaatgaccttggtagtttgataaggacagcattgaatctataagttgttttgtgcagtatagccattttaattatattgtttcttccaatgagcatggaatgctttttcgtttatctgtgtttctttcaacaatgttttttaatactccttacagagatctttcagcatcttggttaggtgtattcctaggtatttcattttctttggctattgtaaatgggattgtgttcttcatttgactctcagcttggtcattattgttgtatagaaatgctattaatttttatatgttttactataaaaatatatttttatgtattgtatatcttgaaacctcgttaaaattgtttatcagttctagtagccttttggtggagtctttgggttttctaagtatagaatcataccgtcagtgaaaaaagatagtttgacttctttttctatttggatgcattttatttctttctcttgcctaattgctgtggctaggacttccagtactatgtttaataaaactggtgagagtgggcatccttgttttgttccagttctcagtgggaatcgttccaacttttgcccattcggtatgatgttggctatggatttgtcatagatggttcttattattttgaggtatgttccttcagtgcctagtctgttgagggtttttatcatgaagggatgttggattttattgaaaacttttttctgcattaaaataggacactttctgtctatgcttagcgtcttgtttattcttatctactttttacttgatgagatgtttcttcgcaattaaaaatatttaagtgacagtatagccacccatactttttattacagaaataaaaaatgcttcgtctctcatctgtcatttgatgaaaaaatccaagactttcttctaaaacctgcaaacatcataattcatatttgtattgcctccaactatcttctttcaagttaaccaccctttcaactttcactaaatctttaactcctatttgacgaggtattgaacgctgtactcaatgaaacacttttgcagcttctcttttggttatttatttttctttggttttctatagagaacataatggggttgaataattcaaaaatacaaactcttgctgatttcaacattgcacttttaattatattaaacttgtacttcctgggtcaaaaatcatctacgttgtaagactctttactttttctacctttttattgccagccttgtcagctatctttagggtagaagaagtgggagagatggtaaagcaatgagttgtgatttatttttctcaaaagaggaaagtttgcttcaaatcaaggaaatcaatacctacataaaaataaggggaggccaaggctgatttaataaagagaaagctagagtttcatcttgaatctctcactagcatagcgacttatgtatgaacctcagtaaatatcaatattctagacatagtggggcttcggtgtttctcaggaatagtcagacacatcagtatttaatctataatttaataaatccaagggtcttcttatctggaataaagctgactaaataatttagttgcttataaagcactaatatttagtactaaaatgacctgtcaatgttatttacatttattttatgttaactgaaagctatgttgctgataaagcttatattaagttcaggagttttaacgtggaattctattaatatggactcttaggactcaaagtgtttttcattaaatatcctggaacgtatgatataaaaattgagagatttatctttacgtattttgttctgcccatattggtattttcagcttattttctatcacagatttacatgggccaagactgaatcatagaatgggatattggaatttaatatagtttgttgatgctatggaatcattttttaaattatcaataacttattggatcttttattgccaaagtttcctaggatttcaattgaaatgcaaaaagaagaagtaaaagacattaacgtaaattctcagcagtttatacaaataaatttacaaggggcctatggaacaatacatgttggttttattttcaattgtagcaaaaaaataaataaataaaaggtagtttgccaacctctagagtgttgtaataatggcatcttttgacttttggagatttcatggaaattcttcaggtttccaacaagagccctccgggtgtgttgaattcatctgtacctgtgacagtcaggatctaggcaaaattcagaaaaacagtgagtacactaaatatagacttgccaagtctacagttctttagggaaaaaaaaattcctggactcagcctaaagtccccctaagttttagaggtcagtaatatttcaagtgactagaaaatctgaactaggtacatcatctttgttctcacacttagtatgattgttctcaccaagcatcattgcttttctcctttctgcataatttttccttactccttgattgccctttcactcttatgtgaccataaacctctgagtttccataatgtagacatgaaatttaatggactacattatgaaaatatttttttcaatgtcatcataatttctgtgccaggataacaagctcagaatatgggagtttatagtccagcatctctcccacaacctactatgactgtaaagaaattgtaacctgctccttatttccttcaatgctaatttctttgaaaattgattatgaatgccctccaatcaatatatgtaaaaaaaaaacctttatctttactaaaatacatatcctccagattcataacgaaggagaaaattctttggggaaagaagagtggagacccctcagtttcaattctgatccaactgactttattttgtccctagggttattttgctggttggtggcttaacattctaatcctagggtaaactaggacctgccttgccccttaacaacatgtgtaatcttaaatctggcccagtcaaaagttttaaacaagactttaggcggtaaaaactgaaagagaaataaaccaggaattaacaatgaactgataatttttgctgatgaactaccacttggcttacagagattagaacacatctttctaatcttatgacacaccaccctaggctgagagtcattctagcaccatcttcgtcacctactcccttgaaaggtacatgaagttttatttcctttcaaaattttatttttttatttttggtttcttgtttttagaattattatctggcaaggataggactttatccatggactcgacagtgcatttattttagaaaaggcgtgtatatttgtgcaatttatcctagcagagtaagttccaatatgtatatacaggccaaacaatgactataatatgtacatttttcttcattaactgtgttgattgcctgtgttctttcatccagcagaggcaaagtactaacatagaagactatccaaagtcttccagtagacttgtttagactagatttgaaagaagatcttaagtgtaagattatttttatactgttttcaacttgtatatttgtgcaatttgttgaacaaatgagaattagataaataattttaaaatataagtactttatgagtcagtttcccttttttgtaagttctgtttcccagacgtgcaaagcaatataattcttattatttcagggtataaattaaatttaacctgagcaaacaacttcttgtatgattgtattactatttttattactattatttttagagagactgatgacattctatcacttggtgtcatattcatctttttatagatatttgactaataatatgtaataatagtattatgaatggtgcccttaagtctgatgatttgcttaaggggctaaagaacaatatataaatggaaatctaaatagcactacttttaaaaagaataaacccatagaaagaaaattccatagctcaaaactaagaaactcaaaatccatataacacagaaagtaaaagggagcagttttctatatatatatatatatattttttaaaaagctctctgactctggttaaggatgcttgtgaatctaaaatgatgcatgttgataaagcactgtaatttaaagaagtctccagtcttgcctttaacagcaaaagcaagaacacattaaatatataggatctataagagaaatgaataaaaaatgttcaaatggaaatggtaaacatacagactagttcttaaagataggtcatgtatattcattttctaatttaaattgagctattttgatacatgtatatattttattattatgaaatatgtcaaacaactggaggatgactaaaaataatattaatataacattttgccgtacttgattttagaatggtggtaccaatttatgcctccaacagtagtgtatgcatcccccatttttcaaattcttatcaactagatattgacactttataatttttatcaatttgatgagtatgaaattatatctcatttgttttttgatcaatgtatcttttatattcattgaccctttattatttcctgctctgaatcatctgttcatgtcctttgccaatttttcaattgacttttggtctatttcttattttcatgtaattctttaggtattacagtttttccctttcactcatcggtctctaaataaacttggaaataatttttaggggtttttttgtgaatagtgaataattttgtgaattattttagagtaaataactgtcctaccatcattgtttaaatgtctaccttttctctattcacctgtagtgtcacctctgttttgcatcgagattagtatatacatgtacattagattagtatgtacattagtatttctgggcatctttttttgttctgttcttcatttgccaattcctgtgccagtactataatatgtctcaattaccatagatttatatttagccctgacatgtggtagggccagacaccctaacttgtttttcttcaaaactttcttagataaaccttgccctttgtctatcatcagttctataaaattatcagccattatctttaaatctggcttctctgcaattccattcattctcttctttaggaactcttattgtcgtataatattgtccatcttttatgtccttagtattttatttttaacatttacttgcctccctgtgttacgttctggatgaattcttcattagtatcttctaattcactaattttatcttcttgttcaatccagatacttaagctgtttatttctttaaaattgattcatttactacatttttcatttccaacatttatagcttttttcttctcaatatgaaattattttaatttctacatgcttttgttttataactacttgttctttttattgagttttatcttttaattttattgttgagaattctaaacatattatttaaaaatgttcttcagacatctatatgagaataatttcatctagactgaactcatggttgaatcattgtggttgtggtggtggtggtggtggtggtggtggtggttttctgccttttttaggcctttatttattcacagatttctggagcatttagagtaaaagggtttgcttttattgtcattgtgtttattatatctgttccaccactttgctgttgtccccatctggcccctggaatagctgcctagattcagatagtctactaccacgtggagtgctgtttgtggtgataattaattagaaatattgaagattcagtactcaaattcatttgttttgggctgcttctgccttcatggcgtgtgtgtgtgtgtgtgtgtgtgtgtgtgtgtgtgtgtgttcttcccgtatctctagtgtaacagattcctaacataataggctctcaggcagcaggtcagcaaaatttttaagacatttttcttttcaagaatgattgctgggtgaacttttgccataacttgtgacttcaagcagtgatcttaattctagtttatcctgtacatgtggactcttagtgaaggaatctaaatgcgaagccactacccatggggggaaaatagtctgtcaggactgcagctactgtgtctgatatgtggaggtgccaagattgtgtctaagtcctactgtgttataacactctttctttttttatattttctttcttattcttctatatattaaataagtgtcaagtcatgaaatttccatgccatcttaactgaagaggtttaaatgttttatatttaatctcccgttatttattgactttacaatgtcaaattaaaactcacattcaggcatatactactaaaatactaatagaagacaaactaggatcattatgtttagggaaaaatacacacatactatcatgacacagtacaattaacataaaaccaaacaccagaggtttctcttattaaagctgaattttaattgtttttatgtatctatattactgtctataatacaggttcttgagaattaggactgctgttgtgtgtgtaagtgtggatcgcttttgttgtaatttttgatcatacttctggaaactagcatgatagctggaaaacaggtccacaaatattaattgaatcaatgactgtttaggagacacacaggcatagatgcagcttctgtactacagtaccttacaacctatcatcgacaaaatacaaaggcaataagtactttttaaaaatatataattgtataaagtgatgagcaagaaaacagaatgaataagaatgtgtaatagtaaattaatcccatttcacttttgataggcttttatataaagctgatacaaaatactttttaaattctcagtgaggcatttgatgagtttcctaataatatttatgtaaatataatagcaagtatacaatcttctctatattttgtaacagtaatgactatccctttaaaaggtatctatttgattcagaggttattatttttctcttgtcttcgctaattttaattctctgatgatgttttgagaacacatcacttgaagatttttagtagggcagtgctgttgtctatgttactgaaaagtaactggactggagaatgtgaacatgcactcctgttcagtatttggattttaggagtgtgtcgctgattcttgaagaatttttttaaaatctttttaagaaagcatcattattgttacttaaaaatatttacctgttaagcacctcttagaatggccaaaatccaaaacactgacaacatcaaatgctgaccaggttatgtaacaacaaaatctctttcattgctggtgggaatgcaaaagggtacagcctctttggaaaacaatttggcagtttctcacaaaactaaacacacacttatcatatgatctagcaattgtactccttggtatttacccagataagcttaaaacatatccacacaaaaacctgagtgcaaatatttataattattcataattgaccaaacttgtaaacaatcaagctctccttccataggtgagtgaatgaatgaatgaacaggtacatgcagccaatagaatattattcaggacctttgaaatgagctataaagccatgaaaaaagaccaacaaatatgggggaactgtaagtgcatattactaagtgaaagaagctaatttgaaagggttacatactgttgaatttcgactatgtggcattctagaaatggcaaaactatgatcacagtaaacagatgagtggtttcagtggttgccaggggttgcggcaggaggtggaatgtatagacagattacagaagatctttaaggcagtgattatatattatccgaaatgcttgcgaccagaagtgtttcagatttcctttttttttttggggggggggggcgattttgaaatatttacattacacttaccagttgagcatcccaaatctgaaaatttgaaatccaaaatgctccaatgagcatttgctttggacatcttatcagcacttcaaaagttttgaattttggagcatttgaattttagatttttagatttgagatgttcaacctgtatgattctatagtggtggacacatcgttgaatacttgcccaaacctatagcatgtacaacactgagtgaaacctaatgtaatctatggactttggctgacattgtatcaatgtaggctcatcaattgtaacataccattgtggtatgaagttttgatggtgggggaagctgtatgttcgtagggctagatggtatatgagaaacctctcttccttccacttagtcctgctgtgaacgtaaaactcctctaaaaaacaaagtctatttttaaaaaaacatttactaggacaaaacatgtttttagcacaattttttaaacgcacagtaaagcgccatatgctcatgagcttcctttggaagcgcccatcttcaaacaagtatattaagataagttttgtccatatcatagcaggtattttattttcccattctgcatatatttaacatggtaattaattcagcctggtattactctggctgttattcaaagcctcatatatgtttgctaatttgtcacttgctcctcatacaacatcttaactatttaataagcagttaccaaagtctagacagtcctgctccagcatgagttttaattgagtatgtactacataagacaattaagatccgaacaaaccatcagcggcagatgatcctacagttatgaggaaagcttctgtaggagtgactgtgtaaaatgatgaaagcaaagggtcttggaatatcatatatatttatatcagggctctaaagacatactaggataaagtggagaaaggcatctctagggctatcttctgtcattttgttgccagtcgttttaccatcaaagcaatatttttagaaaaaggtttccatcatcatttaccaatattttagggaatctttaaagtctaagaacaaatcagaaggtaataataatattgaaaaattattccaaaatgtttagtacgttgtttgtcttgtttcatcaaaactatttgtagtagcagaacttttgttggtggttctgtaactgatgattagctttcagtgcaagtatttttcaggtaactgtgtgaaaatatttttaaacatttacactatgtttccaaaccggaacactttggtatagttatacctgtgaaataaatgacattgtgtaaaacaatatagcggatcttttaaagtgagttgacaggatgacagtacagttactcacagttcaaactaccacaatatagaatgtaatgagccataatgctattatttttcacttcagaattttaatattgtgttttgtacagttcttaaaatgtcatgcataaaacattgtgctgaaacaatagtgatttgtatatttattacgtcagtaggacccaacagtctaataacgataggaaacaatggaaatttttcctcagacttttttggaaactggttacacaaagaattgctttgggaaggatctaatgtttgaaaagcattctggcttgatctttagatacaacagtttgatcttttgtgcaactgagagcctctatataaatgcagctggagtgagtagggtatttgaggctatggcaccttcagtgatagggtgatttttgtcttactcatcctcagtgccaaccagaaaataattacattcctctaatagtgaattgaccactaactaaatctgaaggacaagaagcttggaaaaatataactgtgcaaaatggcttatcgaacttaccattttatagaagttgaacatggatctctaataccttggacttgcttctaatatggtatcacatagtttcatcaccgtgattactaatggatggagtgatatattttatttccaagtattaataaaacagcaaattatcataattgaataagaaggatgctacattgcatatttaataacgtatatgtgacactggacaagtaaggatgaattaatctcttggaataaaccaccattgaaagagcgtttctgtcaagtaatgtcatttactctccttattaacaaacagagcaattctgttggatcacttagcatggtgagcttattaggaaaatcacattggtttcagcaaaagactcatgtgacctttctaaatgaaaatagcatgatgctaaaaaaaattggagggaggaccatctctacatacagaatggtctttgcaatcaactaccatattgagaaaaaacttttattttttatgtttagaatatagaagggtttctgtttctcttttaattaaaaggaacgaaagtggtatttacattaaatgcaaatagcaccttctttcctacagtgagtgtttctcagaaatggacacattttcccttctcggtctccagaaaccccttgatcacaccaaaagagcaagtatggctttctgaaaatagaaaaattgtaggtaggttatacttacagtccctgaatttttgcacatatcgtaaaatggtgactagaattgttcaagatgtgttactccgttacacgtttacaaaggggctgaagagatatagatgttgcattttattaatactaaagaagaaactcagttataggaagtaacaggaaaaatgaatagtggtctgcatagtaacaatatcataatactgtaaagaagaaacattgcacttgccatttaataattgagaaaatctagagtgaattattttgagtaagatacacttactattaattttttctaaaatgtatttctctaactacatgttagttcaggtgaaacaaaaaatgagaatttaataaatgtttatatctgaaatataaaattaatatgtaaatataccttcttttgagatgacaggtgtacattctcggttgaaaagtaggtttctattttaaatcaagattaatgtatagtttatgattaatttaaaatataaatgttatatttcctctcatcctagaacagaataaaaagattttgaaggatttgtattaatcaaataagctagaagccacgcttttctaggaaaaatattaagagaaatgtaaccatgcttgacgctaggatggtgttaccatcaaactaaagcataatttcctctttctgtgactgttgaatactaatttttaaacattaggaattgtctattatactttattatatcatgactactcaatgttttgacatgaaattgtccctaatatatttgctaatatttgaaactagttcaaaattatctggcaagaaatttgtggctttatccatatgatgtatagcatgctagcttgtctatgcagaaggacaataattagacaattcagagaaggtgataatatttatagcttattatagaaatatatgtaaagactttcttgattgtaaacataaatattataaagtataactgagcttttgagattatcaggaaaccaaagtatctacaaaatctaaactttcactcaaacccatggtcagactgtcaatactaaattgaaaaattagactcctacacaagttgtgaagtttttctttcttcatgcatatgattacagaaaggcaggtatggatggcctaatttgtggaataaatccaaccacttttgtaacagctcagataacaaaaatcactaatagagaatgtgatattttatcaaattggctttgtttttgtttttattgtagcattgcataagatcaaagaagaaaataaatgattcaattaaaggaaaaatactgaaaggcaggacacagaaaaagagagttttagatgtggaattcttttgagagatcatctagtctgtttacagatatgaaatctggggaaacacagaggtgaattgtccaaggctttgcagttattgaagcatcaaaatcatacatatatcctgcttctaaacctccctctcagtgttcttttcatctatggttttaaaataatcaagtggtatttgttaagaagttagaattttaagatatggattatataaatccgatttatatggtcaagtttgactaatattagtaaatttgattgttagcaacataaacatttctggagtacctttcctataaaatacggatgacaatctcctttagcattgttattccgtctgggataaaaagcacttcccacatttatttagaaatgtaatggatgtgttcatttaactccaatgatataataattctctattgactacattcagtataacagtgatgtttatttggaattccccttggacttccacttagatttgttaaatatgaggtgatttgaatgacttaactaatgacatttgctcaatgtcttaagtttttcttgatagttggtaaatatctgttcatgatcaagagtgttacaccaagaatttactttcaatagagtgccatagatatcacttactgtgcattctctgtgtttatgtgtaaacatataatagatattcaaaagtaatataacctctccacattataaaataatgcacaaatataaagaaggataatatataagaaaataaaatggtgtaattgcacacgtgaggtgttctattttatgtcaaactatttcttaaaatcattcaaatatcttttaggttactaaaggagcttttgtcatatgaaaatcatatgaatagaccatcacattttgcaataagaagaaaaaaaaatttaactcatgaaatcaaaacctttatccaaaaccacctttgttcctcaatcttgtccaaattttgggtttttctaaacaagttttaataactcttattattttatatatttaccaaagcaatcagtctgtataagatttacattttagcatgctgttttttctctgatttatttctttcgaatcatcacatcaaataataaatcttaaagttgtcaattaaaattgatttcaaatgttttgtatctccccactattataagaactatattgtgaagtctatatcaaaatatagggggaaaagcctaaggtcgcaagtgaaaattttttttctaagacacattcaaaaatttgctaaccatttttgcatatctctaatttgccccagaccccaaattttaggataatgataaacttttagaatttgttaatacaatttttataattgaatatatcatatcttttttcaagtctatgttttttaataaacctgagagcaaatatttaaaatctcttttaaaagcatccaaatcgtaacaaaaagaactgtacagtgtaaacaatagtgtatgctccagacaaacaaagccttgtgatgtgaaataaagcaaatttgtgtataattaagcattaccagtactgttaaaatataggtttataaactggcaagaatatcgggaacatattctcagatattcaaatgcaaaaatggaaaatatttcatttttaacggtgaaattttctgctaactgtttacaaaataatatgtacttatatatagaaatgagtataagctattttcttttaatggctagtttctcattaaagggatcatgacattaggcatattaagagtttagtttggaaactattttaaaatattaataaagagctattgctaattaatgatgggattttccagttttatacatgaataaattactattaaaataacaaaaattgataactaagaatggggattagagtttgaaaaatttcattagtatttatggatttattggtttccctcattagagactagatgaccatcagagacggtgatatttttacttcataaccgcttatacctgttgtaaaatatcgagaggccatcagaattttgtcacttagagaagggactggaaatttttttaggtattcttttgccaagcatacttgctctatttaatggatgagaagtaaagctagacagattttcttcagttaaactttcaatatctccacagtctacagtacattaaaattcactcattgaaatttttttgtttgactctataatgataaatgtatctatttttagcattaataaaatggatgaagctttaactctataataaattcttccactttaaattctatacagcttgtctttccctgattctctagttctattaaattagtagaagtagttcgtgtcttcataatcaattgttatcaagaactaatatgtctaaataaacctgtagataaatgtccattcattattcttggtccataccaaagttccaattattatttgcagtatgtacctgacatatacatactaaaatgggttcaagtatagtttctcaataggaggtggatccttttattgatacataatagttgtacatattttgaggtcacataagattttgctgtgtttatgtaatgtataatgatcaaatcaggataattgggatactcatcacctcaaacccttaggagatggatactctcttgatgttcgatatttttagttttactttgattttatttttgtcatggcctcatttcaaactgactcataatccagaattatccaactaaatcataacagaaagtattattggctaaagtgaatcaagaaaaaatttagcattgttgctgtcatatacaaacatgtaagaagtttctttcacattttaaatataaatataaatgactgattctgggtttttcccttatgaggaaatacctaagcaacattaagctaagcaaataaatggttatttgtgtgatgatcttctaaatgtgtgtgtatgtatatattgctttaataaaaatttcagatggtatatcattttttaagtagcgaaattatcatagtgacttgtgaatagcaaaatgcaaaccaatgtggcattggatcctctccaggatgtgatgagtcacctgtcaccccccccattcaaccccaaatcccctacattctcagggaggactagttcttcctaaggctaacatgaatgccacatgttttaaagcaaagaatgtagaacatcaagttttaaatgtcatgtccattaatgagattagttaactgtccctttgcaagttcaaggaacaaagaaagccctgtggagagcagagagaagacagataggtggctgttaatgataagaggcaaaatttggtaaagggaaggcaacttaagctaaaggaagtgagtgaggtggatagaccccactaaaagacaaaaggagatagtacttaagaaaaaaatctgtcagtatctctctctggtagctgccttgtttttgttttgttttatttttgtttgttttatgctttcctgtaaatcatctcaaaatatctgactgtagcttcctctttcactcatttcattctgtaaattgtttctcaataccatgcctcttgaacacgagaaaacgctgtttctagcttcatcttcaagatatttatttccatttgtaaaaagaaagctgaaacatttttataggctacctcagagattatatactaacattttagtaacatgttctaaatgcttgagtagtttaagtattgacataaaattgctttctatttcagttggaattgtttgaatcctcagtaaatgtaaactattgtagctctaagggtatccccaactagaaagttcttatttcacacattaacatttgctgctttcttcacaagttaaactaaacatattttccttatttatttatttcactggaattcctttaagacattattttctcaagatgtggcccacaagccacctgcactgccaaccacaggttttctcagttggtatctctggggagaagaatcccttgatagtataaaaaatatccaatataccattatattaaaaaactagattggtcatatatctactgcatataacactgatggtcatatatctattgcatgtaacactatatacctgaataccagataaatgtagctcgggaaaaaaggtgaattatttcatgtagcaaggagtgcagaggtagcttttctgtcattggtttaggcatctcaatttcactccattccaggcagtccctggcagaaaaagaacaggatcaacatgattagcctggccaatcatgatttgttctttgggatgagtacattgcttgtgcacagtctcccttgatacccgaatggaattggagttctgttgacaaagaggaggaaactggatgggcaggtctagagtttatctggaatttgaattgtgcatttttagacatagagaaagaaatgcatttttagacatagacaaagaaataagtaggttttattatagtacgcactaacttaggtcagtttctatgtttctgtgactttcttaatcttacataattacctttatcttattaattaattaatttttatttttgctacatgaataaatacattcaagagggcacacaataaaatatagtaatatataattccaaagtacgggctcagcaagtagaaaaaataaacaccatgatttgaaagcattgatgtaaaacttgatctttaccattgctaattagtcagccagaaaatatatataggaaatggcttagccctacatataaaatgtgattctcattcttagggttatctatgcatcttttatctggtactactttttatatctcaatatttgacatcttttttgccccatttcaaaatataaatttatttattttctttacaactgcattcctctgcacaaataaaaaatatataatttagaatatatagtagagttttgataattatatttatattttaaatggttttgatatgaatagttacttctattctccacctgtttaacaaatttgatatttggaggcaaatttccatatatttgaataaatatgatagttaagaaagcattactttctatttgccaaaacttaccttgaattaaaaatagacaatacgtatttatatatgtgtttgtatatatgtatatatgtttgtgatttgtaatggttttgtatatgtgtgtcttctaatacaagggtccccaacccctgggccaaggaccggtactggtctgtggcctgttaggaacccagctgcacagcaggaggtgagcagaaggtgagcaaacattactgcctgagctctgcctcctgtcatatcagtggcagcattagattctcataggagagccaaccctactgtgaactgcgcatgtgagggaaataagttgcaggctccttatatgaatctaatgcctaatgagctgaggtggaacagtttcaaccccaaaccacaacccctatacccccagattttcacctcccccaaacccctgtctgtggaataattgtcttccacaaaactgttccctagtgccaaaaaggttggggaccactgttctaatacacacatacacacacatacatacatacaagtgtacattgatatatatatatatatatatatatataatgaatagtttactactatgtgggctattatacagaactgaaaaaagaaccacaacaacacaaaacaatatcgatgaatgttagcagtataatatccaaagaaaaaaataaatccaacattataattcaaaaaacccaatattaaatccaataaatttaataaaaatgtcagatggtgcattctctgagtacagtatcccttgatacctgaatggaacatactacatggtaaatatcatctccataaagccaaacatattgaaaataaaattttagtctttaggaataatatgtgtgtgtttaataaacatataaaaagaaaagaaatgatgaagaaattattcaaaactgtgttacttcatttggggagaggtagggaatgtttgcaaaagtgcaacatgattggacataggttattttcaattccttgcatttttgcaggagtaaggagtgtttgcagctgtttcctacgttgttaaaaatgggcaggccaagagtgcaatgtatctttaacataatgtcgtaagtaatatcccaatcaaatcaaatttatgtaagtatgtcttatgaagtaaatgcaataatgatatggggagcataaatgctacataatttgaatttaaatgagagcaattggccaggcatggtggctcatgcctgtaataccagcactttgggaggccaaggtgggcagatcacctaaggtcaggagttcgagaccagcctggccaacgtggtgaaacccggtctctactgaaaatacaaaaattagccaggtgtggtggcagatgcctgtcatcccagctactagggaggctgaggcaggagaatggcttgaacccaggaggtggaggtcgcaatgagccgagattgtgccattgcactccagcctgggcaacaagagcaaaactccatctcaaaaataaataaataaaaataaataaatttgagcgataataaagggtggttatttgggctttgtatggaaagttacttattttcatacagctttctatacatacaaatttctgtcaataacaagattgaagaaacatagagtaataaatacaaccctctgcattctgcaattttcctaattcaaagttacattttcacatgctgaattgcatttattggctttatgtttaatactaagcttggcacatactatataccaaaaataattttaattttcaaattgttgattttttaagttgttgccaatgatttatctaatttgctcatgattctggatcaatcatttctgggttgtttcagcaaatcgttaagaacatatctaaattagagttatatattattatgtatagctgtatcatttactgaggaattactaacaatacttttcattttctagataaaattcaattgataggataattttctcttcctctggtaattatgccataaataagcatacttctaacatttattcctgtgaaagatggagagtattttttaataactacattcatgaatgtcactttctaattttcagagtttctggtctgtaaaaaaatgacaattagttttactaaaaataaaatgtgagaataaaaatgggtgaaaaaataaaatagagcacacaacatactcctatctgtgaaacttgtttttaaaacaaaaataaaataatgataatttcctcatagaaaaaaatggaaaattaggatttttaggtgaaaaattaaaagttaattttcttagaaaatattatttattctcgcggccaggcgcagtggctcacgcctgtaatcccagcactttgggaggctgaggtgggcggatcatgaggtcaggagatcgagaccatcctggctaacacggtgaaaccacgtctatactaaaaatacaaaaaattagtcaggcgtggtggcgggtgcctgtagtcgcagctactggggaggctgaggcaggagaatggtgtgaacccgggaggcggagcttacagtgagctgagatcgcgccaccgcactccagcctgggccacagagcgaggctccatctcaaaaaaataaataagtaaataaataaataaatacaataaaatattatttattctccattatgagcatgagtcttacagtatggcaatcacttgtatttatacagaatggacataaaaatgaatattttgaataaccaacttaatttgagagtaaattttgatataacttgtcatagttatgtaaattattttagggtagttgataattgtgttctatgaattaaattcaactatcatgcaacccagtcttaatttaccaacataaaaatgcttatagcatttgttagttaataaatatacttcatttgcatctacagctgtgcataaaatcactattcaggatgagtcacatatatttttaaatatctatcacaagtagttagtgcaaataacttaaaacaaaatatattttctgaattagagtctatgagaaattttagccacattaagtagaccaatttgggattaaataacaataacaacaatgataataataatttatccattgaatgatatttacaattggttttatagtagaacaactataagatacaattttcaatacacttctcattcttctaaacatatggagtacagaagttaaatatattctaggaattgtactaacagagtattttatatttcaatctcaaaaattaaaaatatttccccaaagctaaatatgataaattttcaataggcaaattgaatgaacatgtatttgctactaaattttaagaatataagaaacaaaatatataagaaaattcaggttatctgttacattgtaatgcttgtaatggatgtgacggataggattttggttagtttatcaacccctggctgtcttacttaaaggactgattcggaatataaaagtttaactacatgtgatgtgacttgagtattgctcccaagctacctttaactggactcaaggaagaagaaaccatattcaactaaaattgataaaagttcattttcaatgtagaataattcatttatcattcagtgttcttgaagcagtttaaggctttgtttaagtactaaaacagagtttgaagaccgagataattggccgggcatggtggctcatgcccgtaatgccagcactttgggaagctgaggtgggcagatcatgaggtcaggagttcgagaccagcctgacaagcatggtgaagccccgtctctactaaaactacaaaaattagctgggggtggtggtgtgcgcctgtaatcccagctattcaggaggctgaggcaggagagtctcttgaacccggaaggtggacgttgcagtgagctgaggtcgcgccaccacactccagcctgggcaacagagcgagattccatctcaaaaaaacaaaacaaaacaaacaaacaagcaaaaaaaaccaaaaatgaaataatttctctaatttcatttaatgcctgagagaatgattcttatgtataaatttttaaatggctacttatagacattgatacaattatactttattctgttcatcagtgtcctaaattgtcaagtaacagaattcactatctctagggtaaacagtaagggccacactaaagataatatcaaagactcttggggagcagaagaattagaaatggtggcaaagagctaggagcaacattagaaacacaacacagccaggaaggcaacgatatcactggaactgtataaatgaaacaactctgttgccactgttagcttgttgaccctgatgatgctgaggactagatggcagaatggtcaccacagcaaccccagggaggcccaggtgtgttctgcactggccagattagactaaatgctcactgcctcaggctgtttagtactgtatcttaatatcacatcaggacatttgatcagtgaaacaagtttctcagatattccaccttgaaaaagcaggattcataattgagcatctatcaaatgtaatgtacgtatttaaaaacgattaggtcacaaccaatggggatatgtactacatttcattaacatatattgaatactagttcaaatacttctaacattaattcctagagtattaatgtaacatgtcagtatggaaaaaaattccttcatgaaccctgaaattaaagagtctacagtttcagttttgtagtgttcctagttacagaagctagatttttatttttttacaggaaaatacattaggttttgggtacaacatagatcatattgttattcagttttcattctgttcttaatggattacaaaaatatgttcagtttagcaaatttttctttaaaaatgtggaatcatgcaaaactcatcaacaaagttgtaaatttacaagtattacttctatgatacaaagtagagtctactgactatttagaagtagccactgcattcatttaaactgagattctagcacttcatgcaattctgttaaaattcatagttgttttggccagccagttctctagactgaggcccatacttggacttcatcacaaatcattcataacttcagcagaacaagacaacaacacagaatagatctagttcaccttctaaattttccttttattttttggtaagtgaataatggaaaaattataggtttagtgactgattattaacaaagaacataaataaatgcaacatatgtagttttattaatttcatcagttttgactattcagagtgagtgtttctattcactttccaattaactcccagctttttcctaagaatgatatttcgggtagtgatttttctttttttttttttacttttcagagccctgaaaaaatagccattaacagttactttaactatcagtacaatgtataataaactagtcttattgaaatgcattagtttaaaacaatactgaaggagcaaaaatgtctatatttaaaacctcactccagataaacagacttctgttgtaataaaagttaagctagcttattttatgtttaaaaatatggattaaatcatgaacaggaaggaagtcacatatttgaaaatgaaatatacaaatgatgtgcttttttaagtggtagcaggaagaatatgccaaaaagttgtgtttaacccatttctcatgatacacttagaaaagttatttaactcacaaataaatgctgataatttgtttcaaaagcattttatgcatgacttgaagacactagggcttgtcaatatatattaattgtatagcaagttataaaatgaagcttcattgaattctattaggtcacatcaaaatacactcctaccagataaattcttccatttcgttttgtttctatggcatttgggaagctcagctgtgctcaagaaactctgttcctgtaaacaggttagatattaatgtcttctttattagtcttcaagagaagtaaatctgagaccttgcctactcagttaaaaaactacgaatcaaatcaaacaatttattcacaattgaccatttcggggaaaatcaaaccaagcaaaaggatcatttgaaatcaaataactaaacttgcaaactcagagtagaaatagcttgagttgaactcagccttaaaaatatttattttacttttttgttatgtacttgtatttgaccaagctaacctgataccatccttatatagttctgagcaaactggtatagatatccatttacttttttcagattttatcgtaatcatattgttttcggaatcctttaaaattatataaaaagcagcaacactttaattttgctgactttctcacttattaataagatccaacttatataatcagctgtctataccagtggttgacagaagtatggcattttcttcaataaagcaagaattatactggatggggaaaagttgaaagcttttcctctaagatctggcacaagacgaggatactcactgtctccacttctattcaacacagtcctggaagtaattaggcaagaagaataaacaaaaggcatccaaataggaaaaaaagaagttaagttatccctgtgtgccgatgacataatgttatagaacccctatttttatttttaaaaatgttatttgtatatatttaaggaatacaagtgtaattttattttagggcattcatcacctgaataatatgcattgtacacattaagtaatttctcatcatacaaccccctcccatgcctccacccttctgattccccattgtcaatcattccacactctactttcaaatgtacacattattttgctcccacatgtaagtgagaacatgcagtatttgtctttcagtgtctgaattgtttcacttaagataatggcctccggttccatccatgttgttgcaaaagacatgattttattccttttgtggctaaataatgttttattgtgtatatataccacattttcctcatccaatcaacttaagtaaattctatatatttgctattgtgaatagtgctgcagtaaacatatgagtgaggtatctttttaatataattatttcttttcatttgggtagatacccagttgtgagaatactatatcaaatggtagctctatttttaattcttagagaaatctccattctatttttcatagatgtactaatttacattgtcaccaaccgtatttaagcattgtcttttctccatatccttgccaacatgtggagatttttttgtttatttgttttttaataatagccattttgactggtgtaaaaaattccaccaaaaactgttagaaataataaacaaattcagtaaaattgcaggatacaaaatcaacatatcagtagcattcccatagcaatctatctgaaaaagaaatccagacctgaaactataaaaattctagaagataacattggaaaaacccttctagacattggcttaggcaaggatttcatgaccaagaacccaaaagcaaatgcagtaaaaacaaagataaatagctggggcctaatgaaactaaagagcttttgcagggcaaaaggaacagtcagcagagtaaacaaacagacaacacacagagcggtagaaaatcttcacaatctatacatctgacagaggactaatatccagaatctacaatgaacacaaacaaatcagtaagaaggaaacaaacaatcccatcaaaaagtgttctaaggatatgaatagacaattccctaaagaagatctacagatggccaacaaacatatgaaaaaatgctcaacatcactaatgatcagggaaatgcaaatcaaaaccacgatgtgataccaccttactcctgcaagaatggccataatcaaaaaatcaaaaaacggtagatgttggcatggatgtggtgatcagggaacacttctacactgctggtggggatgtagactagtatacaaccgctatggaaaacagtgtggagattccttaaataactaaaagtagaactaccatttgattcagcaatcccactaccagatatctacccagacaaaaataagttattatatgtaaaagatacttgcacacacaagtttacagcaacacaaagcgcaattgcaaaatcgtggaaccaacccaaaggcccatcaatcaacgagtggataaagagaaactgtggtataactgtggccacaaaaaggaagaaattaacagcatttgcagtgacctggatgagattggagactattattctaagtgaagtaactcaggaatggaaaaccaaacatcgtgtgttctcactgatatgtaggagataagctataagaacacaaaggcataagaataatacaatggactttggggacttggggagaagagttgggggaggcaagggataaaagactacaaatacggtgctgtgtatactgcttgggtgatgggtgcaccaaaatctcacaaatcaccactaaagaacttagtcatgcaatcaaataccacctgtaccccaataacttagggaaaataaaaaataaatttttaaaaaatcccatttacaatagctacaaaaaatacttaggaactggccgggcacggtggctcacgcctgtaatcccatcactttgggaggccgaggttggcggatcacctgaggtcaggagtttgaaaccagactgaccaacgtggtgaagccctgtctctactaaaaatacaaaaattagcctaatgtggaggcacacacctgtaatcccagctacctgggtggccgaggcatgagaatcgctggaatccaggaggcagaggttgcagtgagcagagatcatgacactgcactccagactgggcgacagagcaagactctgtcctctgtccacccgcccccacaaaaaaaggaataaatttaaccaaagaagtgaaagacctggaaactgtaagacattgatgaaagcaattgaagaagccacaaataaatggaaaggtattctgtgttcatgtattggaagaattaatattgttaaaattcctacactacccaaagctttctacagtcaatgcaatctttatcaaaacaccagtgacattttttacagaaattggaaccacaaaagagcttgaagacccaaaataatgttgagcaaaaagaacaaaactggtgtcatcacactacttgacaccaaaatatactacaaagctatggtaaccaaaacagatggtgctggcataaaaacagacacatagaccaatggaataaaacagaggccagaaataaatccacagaattatagccagctgattttcaacaatggtaccaggtatatccaatgcgaaaagaacaatcttctcaataaatggtgctggaaaaaatagatatccacatgcagaaaaaattagacccttatatcagaccatgtacaaaaattaactcataatggattaaaggcataaacgtaagacctgaaactataagactaccagaaggaaacataagggaagtctccatgactatgatctgggcaaaaattttctggatatgacctcaaaagcacaggaaacaaaaccaaatatagacaaatgggattacatcaaactcaaaaagttctgcacagtaaaggaaagaatcaacagagtgaagagaaaacctacagaatgggatgaaatatttgtacaccatacatcttataaggggttagtagccaaaatagatcagtaactcaaacaaataaatagcaagaaaacaaataacccaattaaaaatgagcaaaagatctgagcaggcatttctcaagagaagacattcacatagccaacaggaatacgaaaacatgttcagcatcattaaacatcaggtaaatgtaaataaatccacagtgagatatcaactcaaacctgttagaatgacatcaagaaggcaaaagataacaagtgttcctgagaaggtagagaaaagggaacccttgcacaccgttggtgggaatgtgaattaatataaccattattgaaaacagtaggggctttctcaaaaaaattaaaactagaactaacatatgatccagcagtcccactactggctatataccgaaaggaaatgaaatcaacacgttgaagagatatctgcacacccaagtttattgcagcacattcacaattgctgagatatggaatcaacctaagggtccatcaactggtgaatgaataaaagaaaaaatgtggtatacgtacacaatagaatactgttcatccatgaagagaatgaaacctgccatttgcagcaacatgaatgaacctggaggatattaagttaaataagccaggcagagaaagaaaaaataccacgttatcttactttatgcggaatctgaaaaggttgattttaaagtagagaataaaatgttggttaccagaaggtgaggtagttaagagagagggaggattatgaagataacggttaaataatacatatttacagttagatatgagaaataaaatcaagagatctattgtacaatatggtgactatagttaatgatgatacggattgagtattccttatccaaaatgcttgggacctgaagtgtttcagatttgggattttatggaatgcttacatatacataataaggtatcttgggcatgggacccaagactaaacacaaattcacttatgttttcctgcactttatacacgtaactttgaggtaattttatacagtatttttagcagttttgtgcttgaaaaaaagtttgcattaaatacttatatgtccaattttccacgtatgacatcatttcagtgctcaaaaagtttcagattttggagcatttcagagtgtgtatttttggattagggatgctcaacctaatttttttcaaatgaaaaatactaagagagtggatgttaaatgataacatgtgagggaatgcatttgttaattagctagatttaaccatatcacaatgtatatgtacttcaaaccatcatgttgaacacaataaatacatacaattctctatgttcatttaaaaaataagcttgaaaacaagaattttacaagtttgattttgattctggatttttttaacttagatgcagacatattatctgatcagggcgaacagaatttagcaaatcattataaaatctttttgaaagtaataaaggaataagtaaaggtattgccctccttttttttccttaggaaatgtttagattggtccttagctttgtttcttgttacacctgtagaatatagctgttgcatacataactgtgtctaaataatctggggttcttgttaaattttagagtctgtttcagtaggtttggaatgtgcctgacattcgacatttttttttttttttttttttttttttggagacagagtcttgctctgtcacccaggctggagttcagtggtggctggagtgcagtggtgggatctcggctcactgcaacctccacctccggggttcaagtgattctcctgcctcagcccccagagtagctgggattacaggcgcccaccaccacacccagctaatttttgtatttttagtagagacggtgtttcaccatgttggccaggctggtctcgaactcctgacctcaagtgatctaaccccctcagcctcccaaagttctgggattacaagtgtgagccaccacacccggccagtattcaacatcttacttaacaagctcatatataacggcgatgctgttaattggtaagtagcaagggtgcatgcaggcaaagttttctcagtattgatggaagccctcacttaaacctagatagcatttaataatttgggttattggtgtcctatcctttacttagcagatttttaacatgtcatctggtaaccatggtaaagattatgatactaaaagcatatgttttagggtttaacgtcacaggactttaaaatctcggttatagctttggacaaaaaacttactaaatctcagttttcttatctgcaaaatgtgaataattctacttacacaatactgtgttaatggtttattcaatcacaaaaagcatctaaaatgccccacaattatcatgtgaatttagaaatactagattccttctacacatctacacacagacacacacattaacacacacacacatacacacacaaacaggggggagagagggtgctgtataaggaatccacaagatatgcaaaatgaatctggtatttctaaatatgcatgatatttgtggggcagtttagatgcttcttgtgttttaataaaccatcaacccagtattatgtaggtattatcacttgtgtgtgtgtgaatattcagacacatcttttttcaacatcttcaatgctggagcattgtgtgagctagaacccagctaagagagggaggtcttcaaagttgtaaaacatatgtgctcaagtgagtacaggcatcaaaatgaattcaagagtaccctttaaaatgctgcatgtcatatacctggttatggcttttgggaaaaattctaatttagatccctttccaagtggcacaccatagtgctttgcaaatgatagactcaagaaggaataaatgtattccggctgaaagttttgtcatgggacaattttatgttacataaatggaaattcatttggaagtgacagggaggttaattttaaatcaattcaaaagctatgaatcccttttggcaactattatgtttagtttaaaagaactctgtaggcttattatagataccatgttaagcttttgttgtgcacgtatatgggtgtgtagttcacattctcagtttttattactaaatttttcaatacaaaaattaattcattttaattgacaatcaagtacaagatatatcaaaatcgagcaatacatattttcattttgtatgaaatgtgatgtatatcgtgaaaaaattttaaatgagaacagtaaggttttctatatttttaatatatccgtgcccacttcacaaatagaaatgaaatgccataatcttcatgtatgagaaatattaagttcattcctatattcagttgctattgcccagtggtatgaaagtcctacctcaaaaaggtgtagccaaagaaagataactggcggggcactgtggctcgtgcctgtaatcccagcattttgggaagccaaggtgagtggatcacttgaggtcaggagttcaagtccagcctgaccaacatggtgaaactctgtctctactaaaaaaatacaaaattagccgggcgtggtggcacacgcctgtaatctcagctacttgggaggctgaggcagaagaatcgcttgaacctggaaggcacaggttgcagtgagccgagatcgcgccattgtactccagcctgggcaacaagagtgaaactccatttcaaaaaaaaaagagagaaagaaaaagaaagagggagggagggagggaaggaagggaggaagggagggaaggagggaggaaggggagggagggagggaggaaaccaatggcgtgcgttttatattatttggaaaccttatatttgactcctctaaaattcagaaatggttttatattgtacaaccgtttccctcaaatatttggtaatggggctgacatagtctatccttacttcaaagtagtctgggtttttgctcgctggatgcatgaacatgttgagatatttaatcactacttcttgtgtcacacttccctctgtcacagttggatggggaatgagctgataaaatatacataattaatagataaggtacattgaataatattacaaatacatgtaactggaagaacaataacactaccacccggtccttccccactagcctcaccatttgggagtttttgctaggagagaaaagtggttaatcctcactagcttctcacctcagagattacagatcattctgccctggtgtttgataaggcctccaaaataaagcaaaaagcttctgccagctttttgtgtaggcaaagtgtagtcatctttgtggtaggtggttctgtaaaggacctgctatttacgcctctgttccccaccacaccccacacccaggaaacaacttgaaagaggaaggagagtccggacgcggtggctcacacctgtaatcccagaagtttgggaggccaagttgggtgggtcacttgagatcaggagttcaagaccagcctggccaacatggtgaaaccccatctgtactaaaaatacaacaattagctgggtgtggtggtgcatgcctgtaatcccagctacttgagaggctgaggcaggagaatcactagaacctggaaggctgaggttgcagtgagccgagatcgcgccattgcactccagcctaggtgacaagagggaaactttgtcaaaaaaaaagaaaaaaaaaaaggaaggagaagccaaatattggcactcgttttgcttaatactataacggacaggcgcagtggctcacacctgtaatcccagcactttgggaggccgaggcgggcggatcacgaggtcatgagatcgagaccatcctggctaacaaggtgaaaccccatctctactaaaaatacaaaaaaattagccgggcgtggtggcaggtgcctgtggtcccagctactcaggaggcagaggcaggagaatggcatgaacccgggaggcggagcttgcagtgagccgagatcgcgccactgcactccagcctggacgactgagccagattccgtctcataaaaaaaaaaaaaaataataataataataataatataagttggccagcttggcaagttttgcaaactttggaaaatgtttctcttcctcactatgaattagattaggctgtccttgctaattaatggggacccatgggagatggcgctaatctgggaggagcagattatattctaagggtacaggctcttggatcaggctatctgggattaaatctaccattgactagctgtgtgaccttgagcaaccttgaggttgctaggtgtgtatcacctctgagactcgattgtgacatctataaaatgttgataaaataagtccctaaatgattaaactgttgtgaaaactatattgctgtatgtcattgaatctaagaaataataaattgcaagatagaccattgttgtgtgtaggactaacaaattaaaaaacaggatacccctaaacgctatacactaatgattttaagacatattgattttagaaatgttaaaatgtgaaatgtcatctcagaatcaattaaatacagtagttaattctgatgagttgcttagatcaatacttggcatatagtaaatgatcaatgtttcctattatggggtggaatttccctgaaggaaggcagtcatttctagcttgaaaatggaggccttttagaaaggaagcccatagccttcaataggaaagagtaagaataggaactggtgcgtgctcacaaaaaacgttgtgtaggggttaattttttcctgcttttctgctacacaacacaagaccaagccattgttagtatagagtttggcctttctccatcccttaacgtaattctcttagttacccccaatcccaaccctccagtaaaggccagtattcctacagaactctctgatggagttgtggggactataagggtgagtagtaacaggaggagagcctgttccatgtttggtgtggggctgaagcccatgctgaggggcagcagcacactaggaagagccattgtccagtaaatggacaattgtccagtaaatccatgtggtgacaagcttagcgaacagtggcctgggcgaaagaatcactgagagtggccaggagggatctaaacccagagaagtgattacccaatagacttctgacttaggagtaaatgtgagaagcaaaatctcttttcccagaattttacaaaaaatcgactcttggaatggcagcggtggctaatacttaggtcacgtagatgataaaattataagacaatatacataatctagactgctgttcattgaatcatgtcagtgtgtttgccacatttcttctaaaagaacatttttcatattttatcatttctgcaatcagtagtagtaataataatatctaacacatacaacttagtatgttctgggtggtattctaagtgcattgtcgatattaagtcatttgtaactcagtgagttagcaacagttgttatccctcatttaacaattggggaaactgaggtgtgaaaaattttcttctccaaggtgtcacacattcacaaatacacacagacacacacacacatagacgcacacacaaacacacacacacacccatctattaagtggtagaggttggcagcatgatcctaaccgttgcatgctcatactattttacaagaccatatgatctaaaatctattggtagcttagaatttatgtaccgctaaatatgtacatctattgtgtactcacaaaaattaaaaataaaaaaataatttaggatatctgttatggtggttaaattgtgcctgcagtgcaattccaatctaccttcctgcgtcctgggaactctgaggaccggtatagagcaatgacaggaagcaagggctctggcttcatatctgcattggaatccaagctctgacacaagctaagcaagcttgagaaactttttaaaagttaaacattttattttcaaagagttgtagagttaagaacagttgtaaaaaataatataaaagatcctatgtgaaatatcctgtgtggcttttgctcggttatccccaattgtaatatcttgcaaattatattcaaacattataatgaggattttgttacaattaacctctctaattcagattttcccagttttacctatactcatgtgtgtgtatatatttagttaaatgcaatttttacacatgtagattagtgcgtccaccacgacagtcaaaatacggatgttacatgaccacaaagatctctcctgttgacctttaataaaatcatcaagcttcctcttgtcaccctgtcccatgcctaacatgtggcaaccattaatctgttcttcatgtctataattttgtcatttcaagaatattatgcaaatagaattgtatggtatttaatcctttcgaactagcttttttcagccagcataattgcttaatgatccatctaaattgttgcatattgcaatagtttgttactttttattactaatatatgttgctgatttatttatggttgtggacatcctacagtttcaccattcactgactgagagatattgttgtttacagtgtggggctgttactaataaaattgctgtgaaccctaatgtacaggatttgtgtgaacataagtcttcatttctctgggataaatgcccaggagtgcactttttggactataatggtagtctcatatgtcgtattgatgttgtcgtttatttttaaatttctttttcattgacaattaatatttgtttgtatttataggttacaatatggtgctttgatatatgcttacaatgcagagtgattaaatcaggttaatgaatctgttacctcatattttttttgtggtgaaaatattaaaatccactatttcagcaattttgaaatatatgatgcattatgatatattatagtcaccatcatgtacaatagatcactaaagcttcttcctcctacctaactaaaaattcgtaccctttgatcaacatctttcttttcccggtaggacccttccgccatttctgtggtaatcttcattctaatctgtatttctatgagttcaacttttttagattctgtccatcatcagatgaataaataattaaaatgcagcctccacctgctgggtttaagcgattctcatgcctcagtctcttgagtagctgggactgcaggcgcccgccaccatgctcggctaattttttgtatttttagtagagaaggggtttcaacatgttgaccatgctggtctcaaactcctgacctcaagtgatctgcccctctcggcctcccaaagtgctaggattacaggtgtgagactccgcacctggctcctttagcttttaagaagagaaagaattgaaattatgattacaaccaagtgaagttgaacttgaactcctaattagaggatggttctgatgttaatttacgtaaaggaattgtgatttttgtttttctgctcccactccaatccgttttttcccacacagaatattcccaactcttccttcttgaacctttgtaacattactggcattcgtttctcttatccataagctctaatcatccaatgtttcttcttgctgttattatattgaacaaatatttattagatcaatcaggaataggaagaatagataattttgttttactttcattttttccttctctaatgtacttcctttctttatgtagatctaagtttctgacttacatcattttctttttctctgaagtccttcttttgacatttcttgcaaggcagatctactggcagcaaattccctcagcgtgtttgtctgataaagtattcatttctcttttacttttgaaggataatttcaccaatacagcattttaggttggtggatttattttttctctctaaattttaaatatttcagtacactcttttcttgctggcttggcccaatccattttatgctcttttttgttctgctctgtcactgtgaagctgacccctataaattgcatttccttagctcccttgccgagtagtctcctgttggttttggccaatggaaggcataaacataagacagaaaggcagaaagagagcagatctgggacattccttttacattgacctccactctctttgtgccttatttcccaccatggcagcttatatctctaactatcctgttaagaatctcctctatggctctatctcttactggatttagaaaatcctacttccttcacttgactcttcaggcatggtaaggctgggaaaggtatatcacaattgcctactggaggttgtctctaggtgcctcgatagccccttttggtttctttaagcccattcacacctctgaaagtagttcctttgtactgttttattgaaccatccatgttgaattctatttcttgccagggacatggctgataaagggagataagaaaaatcagtaacttctccctttgaagtaacaaagtataagatgaaagtaaatgaaactcatagttactttaagaaaatgcgtttgtgtatatataaacaatttctacttttcatgactctatctggtggtttttagtataaaatactcactagaacgtgagattaaagtttgccactccatactgatttgcatatggactgttcgctcaagaagtaagggttgaagaaattggaacgacttatcatttaaatcaggaatcatatgacaattcaactggtgacaatgtgccctactttctaagagcccaagttgtacatatgattgcttgtgtatgtatgtgtaagtcactccacgcacatatgcacgtcacccttgagttctgagtttacaaaactaaactaaattcagttactaaaaatatcaaatttgtgtaattttcatgtatttctatgcaagcacatcattactgaaaggccctattatactgttgcaaaatactcatgaagtaccaaggtgcctgattccaactgttatttatttttttttttttttggctattatgttcctaacatagcacataaactagctcattttctcatggtacttaactaaggatacttttttaaaatctagagtattacagggtctttgcatacctacctcttaaactgatttgttttggattctggaaaacttagcacgttggttaagtggctgtgaagaaattttgatgtatacgtccacctcacatagacctaatagctatgtgtttggctagtattttgtggaaacaaataattaagagcaagaaaagttggatttccttaagaacactgaatcgcatagagattgggtaattactggagacaaaaaggcctgtcaataaaggtcagatatatgcaactccctccttttgctgaaaatctattattccatgttgaattagatattaaaagaatattatactttccaataattatattgttataatgcaggggatatatttctcaccaatgactctacatccacaatgtatgatgaaataaaatatatatttatttttaaaaatgcctttagggttttaagatacttaagaattcatttcttgttcacttttaaatttagtgctcttagttctaagagtttgtcatctgttttatgatacaggttaatactgcaatataagcaaggaccagtcttcattttacaacatgtatcataaaactgtaggctaaagaaaagtaattaaaaaacactctgatgcatgactttaatgtaattaaaatatattttgcattcatgaaaaattacaggtctctatcaatccctctataaacaattataatcttattacttaaaattatttcaacatcatacacatatggtgtatatttagctatagtcgtttaggtttttaaaatctgctttcttttctaaatcataattttagaccttttgctatgttcgcaatctttgtgtaatcacatgcatagcagacaatagcacattgtaagtatattagaaatatgaaaacacagtctaatctcaatgcaaaacactgttgaaaaacacagcatgataaaaaattaacttataaatggagagatatactctgctaatggattggaatactcaacatggtaaagatgtcaattatctccaaattaatctatagttttaatgccatttctactaaaataccagcaaggtctttttagtagacttggatcagcttattctaaatttatacggaaaagtacaagcctgataatagctaatacaatcttgacaaagaagaataaagtggaaagaatcactccactaaatattaaggcttattatgtagctacagtaatcaagacagtgtggaattgggggagagatagacgcatagttcaatgcaatagaatagagattccagaaatagacccgcacaaatatgtgcaaactcattttttaaaaagttgtgaaagcaattccaaggaggaattttaacagcctttccatttctatagccttttcaacaaatagtgtgcgttttttctaagtgagtggtgtttgagcaagtagacatctaaaggcaaaacaaacaaagcccacccataaatatataagtaaataaatagagcctcaacttaagtcttatgcaaaattatctcaaatgtcaaatataaaacataaaactacaaatattttagaaaaacatatgggagaaaattttgtgactgaggcaaagactttttacactttacacaaatagcacaatccataaaaaagaaaaactgataaattggacttcgttaaaattaaaacttttgatctgaaaaggatcctcttaagaagtgaaatacaaggtacagaatgggagaaaatatttgcatatcagttgcaaaaacagggactatatacgaagaacttagaaaactcaaaagcaaaaatccaaaaataaattaattaggaaatgagccaaaggcacgaagagacattttactgaatagtatatataaatgacaaacatatggaaaagatattaaatatcactagacatcaagcaaatataaattgaaaccacagtgagataaaactacacatttttcagagtgtctgaaataaaaaatagtgacactaccaccaaataactagcaaaaatgtggagaaatgggatcactcgtacattactgaaaagaatatcagtctggaaaatagtttggcagtttgttaaaaataaacaaacactgtgtatgtttaccactccagcctgggcaacagagtgagaccctgtctcaaaaaaaaaaaaagctgaagaaaaatttttttaaatggggaatataggtggaagtgagagcctgatagcctaatatactttatcttttctaatgtatttaactgctgctcttatcattgcttctatttaaaaatgtattatatttttgctaaccaaccttctaggagccaattgtactctcagatttccccgttttcatactgaggttttatcgaagtagcccttctccaagtccctcccctttttattttaaatatagagattttaaactatttctaatcttactctcttctccaagttcctgaaggtattacctcagaatatgaaaacccttaaatgtacctcatttgctaacgtggagagagagacatgtaccttggaagataatttgtgatggaaaaagcatatgcctacacacacacacacacacacacacacacacacacttaaacttgggttcaataacatattaaacttgggttcaataacatcatacttctcaatattccaaataaagttaactctaaagattcaccataagattttcaatattttaaaaatgtttaaggaaatataaatgctttaggttgtttaggttgtttagacatctattaaacccagaatatactttaagcactaatctttaatatactatagattaaaagctatctttcaaataaccagacttcacaatgtttaaacattttataaaactgaacagaattttgagacataaaccaatataaaactttttttatcctcctctaaattcaatccatttgtgaaacctcatttaaattcgaatcaaatattttctctgatttccattaacaggctctgactctcaggcttcagtgagtaagtatattcattgtggggctcagaaaattttgaaccaaattataaatggtgtttatttgtgttttctttccatttctttttaaggcattctgtagtgaggtattcaaaacaggatgccactcaaagactctctctctctctctctctctctttaaaaactattagagaaaatagcatgtgcagcttcatctgctacataaatcctctcaaagcttctctcctttccagatgatttgagttgtcaggaagcaaatgaagcttaagcttttgggcccctttatttcatagaagtcttcaaaaatatgtgcagaactttcatataatcacgtgctcgaaaaatatgcacaactaagaatagcctcgagctttaggcaccgcaatcgttggatcttctgttcttatcaattcttaccaattgtttcttaggatgacacattaaaccttcagaaaaaccttatcaggatgaaaacttagccttgccatggaaaaaaatggtggttttaagaacagagtaaaaaaataattctaacagggaggggatttttttcttttgcttttttaaagaaagaaattaggaaaggattttaatttgagcctacaagtttgctgaagttgcactctaaaatgtcatccacatagatttatattgttttctttactctttcttgtgtagtaataacttggtctaggctttcaataaataaacttatgaaacagttttgagtattaacaataacacaatggcactgagagcctgtttttacaagactctaaatattttatttaaacgatacccagaattctgatttgcatatttaaaattttcctgaattagataattcttttaagtgtgttacgttatataatctagttgcagtatccttttaacaaaaaaaagcaagtgcaacagtgttaaacatgacattgatgccacctaatctccatcaggcttcacaatgtagttttatcttatatttatttgtatgcacgaatgtcagtgtcgtatggcaggagtctgtaaactttggctcataggctaaacccagcccactgtcttttaaaaaaaaaagatagatagataactgtaaattcacatgcagttgtaagaaataatacagaaagatcctgtgtgccattttacccagtccctccttaaggtaaagtcacagaactatagaacaatattacaacaagatattgacatcagcacagataaaatacaggatatttccatcaccacaaggatcactcatgttgccctttcatggtcagacccacttttttcctgccctcaggcactccttaatctctagcaactactaatatgatctctatttgtataattttatcatctcaaaagtgttatgtaaatgaaaccctgtattatgtagctatttaggactagccttgttcactcagcataattctctggagattcttccagatttgtaatgtgcatcaacaatgtgttcctttgtactgctgagtagtattccatggtatgaatatgccagtttgattaaccatttgcctgttgaaggacatctgggttgtttccagtttctgcctattacaaatacagctgctatgaagactcatgtacagtttttttatgagcaaattttcatttatctgggattaatgccatggaatgaaatttctgggctgtaggttagttgtatgtttagttttttacaatgcaccaaacttttacagagtacctttaccatctcatgtttccaccaacaatgtgtaagtgatctcatttctctgcattcttgccagtgtttgatgttgtcactattttttaacttagccattctaatatgcacagagttatatcgtattgaggttttaattcgaatttccctaagagccaatgatgctgaacatcttttcacaagcttatccgccatctatgtgttgtctttggtgaaatgtctccatgtcttttgcccatttttctaatggatttttttgtgtctattttgtttttacttttgggttacatgaattcttcatttagtctagatactagtgcatggtcagatatatggtttgcaggtatttttctcgatgtgcagcctgtctcttcatcctcttggcagcatctttctcagagcaaaattttaaaattttgtatgtcaaatttatcaaattgtgtcttttaaggcacacgattttaacgtcaaatctaagaactcctcctagcctttcatcctgaagactctcctgtatgtttttgtaaaatatttattattttgtgtttcacatttaaattcatcatctatttgcattttattttgcataaggtgtaaagttatgtcaaggttctttttcttcttttttctttccattatttttgtccacttgttctaagacccatgtgttgaaaagactatctttgctccactgaattattttgcactgtgtcaaaatcagttgagcaatttgtgtgggtctatttctgaagtctctattctgttccattaatctgcgtgtctatcccaacaccaacaccacactatcttgattactgtagctatttaataagtcttcagtctggtagacttattcctcttacttcattcttccttttcaacattgttttagctattctaaatccattgccttttcacataaattttagagtgccttttcacataaatttttcctacacctaaattccaaaaatattgctgagattttgataaaaattgtgtaaactgtgtaacagtttgggtaaaattgacattactgtgttgaatctctcaatccacgagcacaatatatttcttcattaatttagatgttctatgatttacttctaaaacttttttttgctttcaccatgtaagtacatggcttgttagatttatatttaatttttgtgacatagtaaaatatactatattttaaatttccatgtccatatgttcattattaattcacagaatgcaagtgattgttaatagactttatttttggagaacctttaggttcacagcaaaattgaaagacagagatttcccatctacccattgtgcccgcacgagcatggcctctgtcattattaataactctcaccagagtggtacattcgttacaataaatgaacctacgtcaacacatcattataactcagatccataggttccattagagtttactcttgttgttgtgttttctgtgtgtttggacaaatttatagtgatgtgtatctactatgataatatcatacagagtagtttcactgacctaaaatatttgtgctctgcctagtcatgcctccctgccaactaacccctggcaaccactgatatttttactatcttcataattttacctttcctggatgtcatatagttggaatcctacagtatatagaagcattttcagattggcttccttcagttagaaacaggcatttaagtttccttagtgtattttcatgtcttgatagctcatttctttttagcatctatagtctgaatgtaccagtttatttatccattcacctactgaagaacatcttgttgtttccaagttcaggcaattatgaataaagctgctataaacatccatctgcaggtttttgtgcggacataagttttcagcttatttgggtaaataccaaagagtctaattacttgatcatatagcaagagtatgtttagttttgtaaaaaatccttaaactgattttcagtggttgtacaagtttacattctcacaagcaatgaacaagagttcctattactccatatcctcaccagcattgggtggtgtcactgttctgagtgttgaccattctaagaggtatgtagtagcatcacattgttgttttaatttgcaatttcctgatgacatatgatgtgaagcgtcttttcatacgcctgttttccatctgtatatcttctttggtgagttatctgttaaggtgttttgcccatttttaaaatagagttgtttgttttcttattgttgatttttaacagttctttgtatattttggataacagtccattacctgatatgtcttttgcaaatattctctcctattctgtggcttgtctttacattcttttgacaatgtcttttgcagcatagaatttttcaatattaatgaagtcctgcttatcaattatttcttgcataggtcatgtctttggtgttatatctaaaaagtcatcaccagacccatatagattttctcctatgttatcttctgtgggctttatagttttgcattttacatttaagtttctgatccattttgagttaatgtttgtgaaaggtgtttgcatgtggatgcccagttgttccagcaccatttattgaaaaggttgtctttgctccgttatcaaacatcagtcagttgactatatttatgtgggtttattcctgggctctctattctgttccattgatctcttcttttgccaataagacactgtcttgattaccgaagtcttgaagtagagcagtctcaatcttctgactttgtgcttgtccttcaatattgtttttgtttgtttgtttgtttgtttgagatggagtctccctctctctgtcacccaggctggagtgcaatggcatgatctcggctcactgcaatctccgcctcctgggttcaagcgattctttcatttcagcctctcaagtagctgggattacaggcgtgtgccaccactcccagctaatttttgttgtttttagtacagacggggcttcatgatgttggccaggctggtctcatactcctgacctcaagtgatctgcccaccttggcctcccaaagtgctgggattacaggtgtgagccaccacgcccagcccttcaatgttgttttggctattcaaggtttcttgcctttccatatcatttttagaatctctttgttaatatctgcaaagtaactactgagattttgattgggattacattgagtctatagatcaatttgagaataactgacataataaaaatattgagccttcccatccatgaatatggattatcttctatgatttctttcatcagagggttgcagttttcctcatatagatatggtatgtattttgctagttttagatctaagaatttcatttgtgggaggtgctaatgtaaatggttacaatcaatttttgtatatttatcttgcatcctgctaccttgatgaattcacttatcaataatttctaggagattatttatagatagcttgaaaattttattttcatgccatctacatataagggacaattttatgtcttcctttcccatctgtatggattgatttaattgtcttgcctcattgcactggctagaacttgtagcagtacgtgaataagagtggtgagcgtgtgcattcacgccttgttcacaatattaaggggaaagcatttaatacttcactattaagtatgaagttagctgtaggtttatgtagatgttgtttattaagttgaggaaattctcctttagtcctatttttcagacaggttgtttcaagattagatatatcagtttgtcaaatgcttttagtacatttactgataacatcgtgtgatttttcctctatgacctgttaatatggtagattgtagtgactaattttcaaatatcaagccagatttacatcctggaaataaaccccaagtgatccattagtacattgctgaattttatgtgctgaaattgtattaataaattttccattaatatttgtaaggaatatggatttatagttttcttcttttgtactgtttttctggtttgggtatcaggctattgctggactcaacacatatactcagaattgttttcttcccttccatgttctggaaaagaatgtgtagaattggtgttaattcttcacaagattggcatacttttccaatgcagttatagaagtttgcttttgtagaagtttttaaattatgagttatatttccttaacagttatactcattatctagtatatccaaattactattaaatagccaaagtctaggccattcaaattatccattttatattcattgatttacagtagtttgtgccttttgaagaatcaatctatttcatctaaattattaaatacttatgtgaagaattgttcatagtaaacccttactgtctttttttttctttgtattttccaggcctgtagtaatattccctacttcatttctgatacgggtaacttgtgtcctctcaattttttctttgtcacttttagcacattgtcaattttattgaccgttttgaaaaaatagctctttgttaatgaatcttctttactgtttttctgtttttattttgattagtttttactctttattattttcttcttgagatgagaactttgattattgatctgagacttttcatcttgtctagtgtatgcgtttgggagcagctttttaaaacgcaatgcttaatttaacctaaatgacaatattttatagtaggcagtgcatacggtgttatctttaaaacctggtcttgctattaggtacctctctgagacgaaagtcttcaagcttattgaagtttatcaattagcaggtcgattaaaatgtcaacttttcttttaatatacccaaggtataatctatttgagggcagggacctgaagttgttagctcatatctttaatgcagaaaatctggccctaataaatgtttcataaataaatacacatttattccacggcccagttccattgttttaaatgagaatttgtcactatggtcatcccatagtaccaaggttcataatttcttttagcatacactctcaaagagatttggtttgctactctcaaacattcaaagtttattttaaattttatgatgatctggatcataaatttctttatttccctctcttgcctgtttccttttttccaactgatatcactaaactcctattacacccaatgtgcttttgagagctaaagttatcaacataatataaatagcaattaattcttaatatcaagaagtttacagctgagtagtaaagatgcattcatattgttagacccatctatgagtgggagtgaggagaagctaaaaaaaataatcttcataaagtaaatttaaacaaagcccagaagaatgagggagcatataatacacaaaggatataatacaaagaaattgcaagtggagacaattttattcacacaacaaaatgacaagcaatagtgataaagcaactaaaaaggaagacacaactgttttgatggagcttgccttccatcaggtaagaaacaccttaaacatacacccaatttatttatcacacatgcaaaaagggagtaaagctgcatgctcagaaaacatgtatgatgaattttttaaataatctgagatataatagtaggaaagcacataacataactcaaggaagttcagagatgtagggttgaaaatgaaggcaaaggctacattgcgtaggatctattcatccttgatcatattttctacaaggtatcacactagtactgagtatccatccaagactgaaatggtaggggtgagcctgcttgctaaaaattcttcagttgtattagtggcagtggctccactcctcgctaccacacccattttgcaattctctgccctgttttttgccctggaaagcttgtctcttcatttgtatcaccaacgcctcttgtgcactaacttttaggaaattatgtgacaccagctggacatcagagggcaagggaaaaaaaggtttggatatttgtgttccacttcacatatgcctcactaaggtcctggtagtgactgcccttttctattgctattccaacattattcctttaccttgacatattaggcctggaggtagaaacaaattacctctcttgctgcttgctaggtgactcaccatcccttatttgttctcatcagcctgcctatatgtttgtccatagttctttcaccgaattattatctgttaaatgcttttgaatctgctacctatatttcctaccaggatcttcactaataccccataagagatacaactattaaaacatgttactgattctcagctcactagcatcaatgcatttactatctttgtactcataatacctttcttacattcagaaatctttaaaaatcttcattaatccctgtacatttacctcataaaacagttgggaatcaatccacaaagtgaggagtcattattttcacaacacaggcaaattagttttgagttttgcttatatttggtaagcaaatgttttctttcttgactctatagatagtactgatatgtagtaccaagtcctgaaatcacatcgttatgtgaatgccatgggcttcattgtctatggaaatgtgagttaaagctctttttttttttttgtccagtggaaaaaaaaatctgaacatttaaaaatgaactcacaaggttccagatatctacttactaattttaaagggaattaagatggtgtcaagtaaaatttatttacagaacacacacacacacacacacacacacacacacacacacacacacacacaataatctctaaagtatcaaccatagatggagtggggaaccaggaccttcactcccacctggcaataaggcagcacacttctacctctatcttccaccagaacagtcagaaggggacgagctaaaatagatttaaataagatccagagtctgataatgtaatatcccaaatgccaaaaaagaaaatctcaactggaatgcaaaaagatagtagtcacttatactgacatgacaaagatgacagaattatctagcaaggatattaaagtagccatcccgaaaattgttgagtaagctttttaaaacattttgcaacaaataaaaaatgggaaaagtcagaaagaaatagaagacatagaacgacatgacattttagaactaaaaatatcgtaatcaaaaaaaagttcaataaatggtctcaacagtagaatggaggtgaggagacaggggaaatctgtgtgcagaaagataggacaatagaaattacacagtcgtaacaagaaggaaaaaaacgatttttaaaatgaaaatattctcagttgtcctatgggattataataaaagatctacggtttatgccatcagagtttcaaaaagggagggtgttgttgaacaagtactcaagcacataatgattgaaaaataccaaattttgtaaaatgcaaaaccctacagattcaaggagctgagtatacaggataaacccaaagaaactcatgcttagacgcatcatagtcaaatgtctgaaaactagttatattttttttttaaaaaaagtcttaaaaacagtgaaagagaaaaagacactttatctataggcaaaaaagttcaaatggcagaggatttcttatgtgaaaccatgaaagcccgaaggaagaagtatgacatttttcaagtgatgaaaggagagaactgtcaacttccagaaaatagaagaggaggcaacacttccaaatgtactttatgaggaagaagtattttgataataaaaccaggtaagcacagtagaagagtcaacaaattacagaccaataaaactcatggatatagagacaaaaagccttaacaaatttttacacattatattaagaagctaaagaagaataatcacttgatcatatcaattgatggaggggaaaaaacgtttgacaaaattcagtgccccatttatgataaaagctctcagaaaactaacaatggaggagaacgtcctcaacttggaaaagaataactacagaaatcttatagctaacattgtaataataatgaaagaatttacacctttcttcctaatattaggattaaggcaaagacggttgctttcagccctactattattcatagtactggaagttctagctagtgtaaaaatgcaagaaaagtggataaaagcgtacaaatcaggaaggaaaagttatactgtctccatttgcagatgttatgatgatctatgtaaaatcccaggtattctacaaagttactcttagaaatgatgagtttgttaaggtcttaggatacaagatcaacttataaaagtcaattgctaatcaatgaatatgaagtttcatttatataagatgaataagttctagagatctgctgtacaacatcgtatctatatgtaacaatacagcattataatttaagaatctgttcgttgggtagatctcatattaaatcttatcacagtaaaatgattattaaaaattaattgtatttttgtatacaagcaattaactactgaaacccaaaatttttcacatagtatcttgcagtcactctgaaacaatgaaatacttatgaatctaataaaacatttaccagatctatatactacaaactaaaaagctaaggaaataatgcaaagacttaaataaacggagatatatactgtattaatggaattggaggatacaacatagtaaatatatcaattcttccaaaactaatctatagtttgaatgcaattcctatcaaaacatcagtgaaacatttttgtctatttggacaccctccaaattgcttgaattctatttgtcttattttttctggtcctagtgcctataaactcactcacaaactagcatattttcccattggacttaactaaagagattttttaaacacctaagaaatatatgccttataatatgggtaacatttcaaccaatatggatcactgtggaaaaaggaagtagaaatgatccataatgattttttccctaatcaataaatttgtgaattttatataagtatattacctaataagcctgtttctcttcaacttatttgtcctgtgaagctgcattaatcataatgcttggaattatattaaataatcaaacaagttgggaaaatgaccctgcacttccaaagtaatataaaataatgcctttagggtttccaattatttaagaattaactccttgttcactttacgtttaccatattcagttctttctaattaatatgccatctatttaataacacaaggatgactggttaatattggaatataatcatgggccagtcttcattttacaacatgtatcatctaagtgtagacaaaaaaaagtaatttaaaaaaatgtgtatgagttcactgtaataaaaattatgctttatatttttgaaaaatgtatgtctaattaattcatctgtaaacaattgtaatttcattaaaattttaacaaaataatttcaactttcattttgaatcgggggtacatgttcaggagtttgttacaagggcatattgtgtgatgtggaggtttggggtactgatgatccagtcacccaggtagtgagcattgtacccagtaggtagtttttcagctcacacccgcttccctccattccccctctagtagtccccagtatctcttgttcccatctttatgtccactgtgtactcagtgttttgctcccatttataagtgagaacatgcggtatttggttttctgttcctgtgttaatttgcataggataatggcctccagctgcattcatcttgctgcaaagtacatgatttcattctttttcatgaccatgcagctaaccaaggaggtgaaagaactatacaaggagaactacaaaacactgctgaaagaaatcagagacaacacaaataaatgcaaaacatttcatgctcttggattggaagaataaatattgttaaaatggccatactgcccaaagcaatttacagattcagtgctaatcttatcaaactaccaacgtcaattttcatttttcattttcattagaaaagactaatccaaatttgtatggaaccaaaagagcccatagagccaaagcaatcttaagctaaaagaataaagcaagaggcatcacactacctgacttcaagctatactataagcctacagtaacccaaacagcatggtactggtacaaaaacagaccatagaccaatggaacagaatagtgaacccagaaacaaagcgacacacctataaccatctgatctttgactaagtcaacaaaaataagcaatggggaaaggacttcctattcaatagatggtgctgggaaaactggctggccacatgcagaagattgaaattggacctctacttttcattatatacaaaaatcaactgacggtgaactaaaggtttaaatataagacctcatactgtaaaaaatcctagaagaaaacctaggaagtacccttttttacattggtcttggcaaagaatttatgactaagtccccaaaagccattgcaacaaaaacaaaaattgacaagtggaacttgactaagccaaagagcttctgcaaagcaaaagaaacatcaacaaagtaaacagacgaagaatgggagaaaatattcacaaaatatgcatctgacaaaggcctagtatccagaatctataagaaacttaaatcaacaaaccaaatacaaatacattcattaaaaatgggcaaagtatatgaacagacacttttttttttttttttgagatagggtcttgctcttagtccaggctgaagtgcagtggcacagtctcggctcactgcaaacttcacctcccctgctcaagcgattctccagcctcagcctcctgagtggctgtgatgacaggcgcctgacatcacggctgtattttttttagagatggggtttcaccatgtcgccctggctggtcttgaactcctgagctcaaagcgatctgcctgcctcaacttctcaaagtaatagaattacaggcatgagctaacacacccggcctgaacagacacttcttgaaagaagacatacaagcggccaacaagcatataacattttttaacaacgtaaacatttttaaatgtgcttctttttacaaactggccgagtgtggtggctcatgcctataatcccagctcctggggaggctgaggcaggaggattacttgaggccagaagttaaagaccagcctgcgcaacataacaagaccctgtctctaaaaaaaatattaaattagctgaatatggtggcattcacctgtagacccagctactcagaagattgaggcaggaggatcacttgagcccaggagtttgagactataacgaggtatgattgtgtcgctacactccagcctggatgacagagcaagcctccatctcttaaatgaaaatttcttaaaaagcaaaaacaaacaggaaaagaacgggttttggaaactctgctgttttcctttttttgtgcaatcacatgcataaccgacagtagtgccattatattagaaatattaatatatctaatcacaacacaaagcactgtgtaaaaaagccgagtatgatgaaataaattaaagataacctaaatattggacatatgtactatgttaatgaattggaggaatcaatgcggtaaaaacatcaattcttccaaaatgtattcataattttaatgcaattcctatcaaaattctacctgaaagatattctgtagatagatctgtagatctatttgtagataaacttattctaaaatttatatggtaaattataaccacactctgggacatgaatctagaggaatgaaaaatgaaaaactacatgattgttttgcagctttatttgtagtgaccaaaccctggaaacaacgaaaatatcccacagtatgtgaataaagtaactatagaacatccatgccatgaactactactcagcaataaaaggaaataagctattgatgacaacttaaatggatctcaagtacagaatgccaaaaaaaaaaaaaaagccaatctcaaaaggttacataccgaatcattgcatttatctaatattcttaaaatgacaaaattacagtgatggagaacaaattgattggtaccaggctttagggatatttagggagggtgactgttgtgactgtaaaggggtagcatgaggcaaatctctgtggtgatgaaacaggtgtttatttgtggaggttgaggttacacaaatcagtgatgaaatagaaatatgtatacatatcaatgtcagtttcctggttttgatactgaattgtagttattgtaggatactgaattgtagttattgtagttaatctttgggagaaactgggtgaagggtacatgggatctctgtatactatccccgcaaattcctgtgaatctataagtatttgaaaataacaagttaaaataaatttttaaaaattctgtgacagttattaaaaatggaaatttgagcaagttcctttattatggggctaataagacctacaagatgtagttattctgaggactaaaggagaaagataagtgattaagggacacaagaaagtactgtggtgacacagtctgaactggagttcaatttgttcggtctaaattttattttacgtgcctttcacttttccagttattgtaagcatatatttgcacctggattataaaatcttaagggaagtatatgcattccacacaatgcagaaatcattataggtgccaaataaattctgattatcaactaaggctgaatggcaattaaatgtatctcagggcattcagatctatcaggatttggtgctttagacattacccaggacacatctttgttacatttagaaccacggttgtttttagaaacatacactttagggtttctcaaagttgaccatgcattagaatcaccggtaaaacacagagtgctgtgtcccaaccccagaatttctgacttttgaggtctcgtgtcaacttgcatttctcagaagttcccacgtgatattgatgttggtttgggaccgacaagttgtattcacgccttggcctaaacaagggtttatgtttgtagaaaactcacagtgcaagatacaaagggcacttatactctgggcaatattgtacctcacagcatagagggacactgatgctaacatgcagacttagagccaaatcagccccaaaacaattttttcattttttctatgttgttttatgaaaattttgcttatatgcatatttagacaaccacactgagaggaaaggaggtgacctagggaaaagaatgttttaaattaaaattaggccttatgttttatctcatacaccttttgctggggaaaatagcaatgttatgacaataatattctaaaacacaaaatgtacaattaactattaaggtaaacatcacagtctgactcaatatttttttaatttttatctattactcattgcagtcgcaagcagttgaatgtttgacatagaaaaatgagtctgtcactttaacaaatggtacaataaaaacactcaaacaaaaattttagtagggattattataactataaaaagaatatctttctttaaaaaatgtttccaatgttttctatcaattttgggctcgcctgttgcataaaagtaataaggaacaagatgaagaagctttctattggcaaagaatgatttacatgctgaatgacataatacaactgtattcacttaatacagaaaacaagcctctattcagaaccattaaatgatcattaactcaatgtctaaaaaaatggtgttttaagaattggcaccagagaaatggaagaaagaataatttgttagtaaagaagttttagcataattcacaactgaaatttaggatttgagaaaaatttctttcctgcattataagagtattctttattttagcaggaaaacatgtcccatgagacctatacacacacacattctgccttcagaattcagctgctgcattctgctgctgcttctcttattcagactgttggcatcatcaatacataacttttgattgaatcccaaggggaaaaaataactttggtagacagtggatacataacaaatgcatggattattctgggcattcctttttatttggtagagtgaaatttttggtgttgttgagaggataaaaaaggcatttaaaagtcaattttgaatccggattttctgctctgttaataaattcacatgaaagttacagaaagtattgttatgcttttgtactgaatagtttttgtgtttagaaggctttaaaagcaagtactatgtccactgtgctattctggtttggatattaatcagaacacagttgagcattgtttgaattcacagagcttgccatgctggaagcacaaccttatatgtagtgaccatggacagtcctattatgggaaaccaacttgagagagaaggcgggtcacttgcttgtgcgcaggtcctggaatttgaaatatccgggggcctctacagaatcctggcatcagttactgtgttgactcactcagtgttgggatcactcactttccccctacaggactcagatctgggaggcaattaccttcggagaaaaacgaataggaaaaactgaagtgttactttttttaaagctgctgaagtttgttggtttctcattgtttttaagcctactggagcaataaagtttgaagaacttttaccaggttttttttatcgctgccttgatatacacttttcaaaatgctttggtgggaagaagtagaggactgttgtaagtacaaagtaactaaaaatatattttactgtggcataacgtttagtttgtgacaagctcactaattaggtagattgattttaaattatcacagtagtttgcaaagaagcataaatgttatatatactgcatatatatatgtatttattcaggaatatatatttttcattgggaaaacttttcaacagaaatggagtgtaaaagtttttctttgcgatagaactaaacacatgatttcttgattaacaaaccactgcagtaatagaatatgcagaatgtcatttgactataacagatttattttgattgctgtgagatagtttgtatatctgagttattattttgattagttgatacttccgtatttagtaacagttacataaaggttactgacctgacatatattctcaattgaactaactactgtataggaactacatggaggcctaaaagttagaaaaagtttctctgacacatcatggataaaataaagaataaaatgagttgggacggataattgaaggatgtgaaaagtattgataaagatttaattttaatgtttcttactcacatttactatttcaaatgctcttttctgtagcatatcatgataattatttcaaataatgatgtgatctatgctatcaaatgatcagatgatttcttgggtaaacgacatacaaacttgaggaactcctaattatatttagtagtaaagtcaccttgttgtttcatgtctattatgagccagcttttcagttcaattttttagtttgtctttcatatagaaatacaactatttcgtttatttttaagaaagtcatgatgactaatgaaggatttaaaaatggactgtggcacaacagtaaaaataatatatgataaggactgtgtgtcccgaagagatgggagtttatctcttccccacccatctttgacttgtggagtgtagttattctaaaatagatatgagggcaatgcctataattaagaatgaaaaaataaatctctccaaataagtaatgctccacaactactaaaaaaaaaggcagaagttttgccactgggaaaactttgtggaaataagttaacattgtccatgtattgagtcacattaaaagctaccagactttataatacaatatttacttacattgttggcttgcttcataaatttcttttggtggacatcattattacttttagattgaaaaactattatatttactatcattacaaatatatgcatggcatatatctgttgtttgcaatatacacacacatttttattttttgtttttatttctttgatatatgtaacataaataccatcaaaatcactagtgattttatatatatatatattctacataattaacatcatatacaagtatatagagcaattttgaaagaatatatgcaattctgctgaaattaagcaaggtaaatctacactctgctttgtcatagatattcaaataactttcaattcttagaatgcgaagaaaggtaatctttttgggacatgccctgtaggattttttcacgctgcatttaaaaaatcatcaagtaatgcctatgcaacatgacaatgagtttggtaagaaaaaacggagatatactcagggctatattatacattaaattttgctgtttgacaacatactgctacttggatgtttgacatttgaatccagtttgtaaatttgccgtagtttgataaacttacaaaagtacgttttgttgttttttaaccaaaacagttaccctttaaaagagatcactgtattgtcaaacatattgtattgttcacttttagaattactcaaataatgcattgtaaagaattattcaaatagtgtactgcaaatagacatttcatttgaatatatttaaatgatgtaagtcatctgaggtctaataaaatcaccttttagaatttcatctgcagaatcttttaaagacatcttaactacgaaaaagagattgctgatctaaattgatgatatactgttaatacaaagcttttggtgtatcttacatgacataacattatgaaaaatacaatagagtatgtcatatagatgttactctaaactttaaaaaaagactacaaagtgttctatgcataattacattatttaaggggaaaaaggtgttggctgacactattccagctagacagtactgaattgcaaattcatcatttgggcacagatattaatacagcttcctctttattcctatagcattcatttgaaatccctgtactccatgtcatttgctacatatgaaacaaattgtcaagtttttaaccacttgtgtagtttaataaaagagattaaaatcattgtcttggaaacatcaggtgtttttcaaaattctattttattatctttcatcaaaattttatctcaagagtaaaacaaagtcatttcccaaactttccttctccttccaccttctattgtaatattttcctaacttattaaaaatgatttatcatactttttcatcaactctttatttcatcacacatacaagaaacacagtattttggtatgagtatatatatttatatatatgcacatttatatgcattcaaatcacagggtataaagtttcctaagagggtctaattagaaattaacctttctttaaagataattttctgttcatttttctaaattttctattttaaacacacatcattttttaaggaattgacaaatgagactaatgtacattccctgtctgacaacacagaacgaaccaggaagaaaggatttatggggcctgaggttatacaattgggggtgctattttaagaaaaataatagaaaattggatacagccttgggaggggcccctcatgtaagtaaggctttaatagtttcttgggaaatcacctctgtatgaagagatgtgttgacatttaatcttttcccagttacattttaaaataaaattgatgctagttatatttctttagagcatttattatttctcaaagacaaccttttatttaatgcagattagagagttaaaagaatttataatggtaggaatttgacatttctgcctttcattctgaaaagatacattgattaaagtgatgtcaaactcagttaatggaggcggtgcagttatttgaaatatacagggtatataatttgaaggcacgccaaatcacaatgacaaggaataatgatgaccttggtttatttttatacagtacattcaggttttgattggattcagagagaggcaatggttttctttctcacaaagtcctgctatagtcctaggaggtttgtgttctgttatcaaggcagttggttcgtattggaatattttctggggaaggtcatgggctgcagtgtgggaaataaacgtttttattaaatgcaaccaggtttcatgaaaatatttccccttgtagagtgtgctcaatgcagtatactgatcttcaaaaaacaaacaaaccaagcaaataaatagtttgtagtcttcaccttttccctacgtaaaacatctattagttagacttccttggggtttcatgctataaaatattgacatatgtttggagttctgaagtttcattttaatacagatatcaaagttaaaatggcaacaccatgggataatttattattttaccaagtttggagggttttttctatttatgtcacttatagaattgtccctaaaatccttgcaaaatttcaagctccctctacttaatactaaaagtgaatgtgtcttccagagattctgataaccccttcgaatgggagagtaactctgctatttgtgaatcactcctatactaaatatagttccaagattaaaagctaaaatgattttgtttattttttcatgaaattttttcatgaaaggcttgatagtataaaaagtctgtttccctcatatattacagcatattatagcattcaatgtgccttcttaaaccagatggctcctctagagattatgaaatactttaacacccagggcatagcctttctgtttccccattcaagattacttccttgaatatggcccaacaaaaagaccaaaaaaatacatttggctccagcgttttaagggcatataaattttcttaagcacaattctgataggcagcagacaaatgagaatgaggaagggaaatggctctgctgtcttatgcttaaaagtgtcctcatatagagagaaacaacacaccctggggcctttcggagggtagagggttggaggaggaagaggatcaggaaaagcaactaatgggtactaggcttgatacctgggtgatgaaataatctgtacagcaaacccctatggcacaagtttacctatgtaacaaacctgcacttgtagccctgaacttaaaagttaaaaaaaaataaaataaaaagagtcctcatctcacggccatacaacctctacctcattcccattaaaaacacaaagatcagtactccctcttttatagctcacatcttctgtttaggctgccattttaagggataatttctattcaactctgagctcgatctttattttaatctgatatcactcgttcaaaatacttgggaatttcagtaggcaacggaacacacagagcaattttctggaggcctacaacctctgaaggtgactttgcgtagtatatgtaatgatagtaagccctgagaaaaccaatgttcttagtagtctggatttggtttagaaatcaatgtattcctgctttcttttgtgatcttttgccttctccctcaatgcctcactttcactctgtcattatgaaccccattcctcactaatgggaactgggggagaatggacaatgatcctttaattgaaatggagttgtcatttccttgccatgctgataaaatgttgttgctgttgttgtttgttgttgttcttaaatgactctttcagaatttttaactcagtattttgattacataccattttaagaaaataattgtccataaattaaaaatgctagcaaattgatgaattgattttctcatgccaatttggaaatctgaaatatatctaagactggtgaataatatgtaggtctaattgccatttgaataaaagaatctgaggaagagctttgcctttatttttgtttattattcattttagtttagttatttattttagtagaaaaatgtggttgtgtcaacgaagaggaggtacattaaaatgcattattaaagccaatgcttatccatgtaatgaaatgagaatgtagatggcttaatgggttttggagaggattaagataattttaaagaaacttcaaaaaatcagatgctcgaatcatgatgttttttgtttatatttaataaatatgaaaaccatacatgggcatatcaacaatgaggaattcacatatatatcacgaagtctcttgctaatttgtcaacttttaaatgtgttgtcttcactatcatgaaaattttgatttttaaaaaaggtcagtgttagctgagcacaattaccattacggtgtcccatattatttccaattatgggcaaataaaatgcttaccctttaaatgtttttaccctcttcttggcttttgttttgttttgttttaaagcgttctcccttcttccactctgcttttggctaagactgtcatggaatcaggactataaaagggcataaacatcagtagcttttttctcattcctggcactcatctttatttgcactcaacttgtctcttcctttatcagattacggttgcaatagtaccttagcctgagctaagtgctgacttaaagggcaagggagtcagtacactgttacaagtgcagattttagccttggaagctgtgtgaggaaaaattaaagaaataagaaagaaaaatcacaaaatcagaatggcccacgtattttcatcaaaggcaaattgagtaattcctttttatgttggtgcttaagaacgatgtattagaaataaattggtgactaagtgaacaaaatattaataaactagttgagtaagtgaaaaaataataatctgtaaaaatgatgaatcccaatgactcacatgttgcaaaataactaggaagcaaaagggaaattagactttaaagagcgtaatcagatgcaagaaatgttggcttgtaggtggttaactaaaatcgcttacgggaagctcagacagctggggaatcctgatttagtagacgctgaagggcagggcatgagccatgtgaacagctgctgaagagctagaggattcctttggattaggtgtacacaccccgtctctaatgggctgtcagagagcaccaagtgttatcacagaggttcactttgctcaagcctatggcttttgcagtgttttactttaaatgtctgaaaatggattggctctcaaaataaatccaaaaataaaagtatcaaaataagtgactctctaaaacttgtattgtgtggttttgggtgaccacagtttaaagaagggacttacagctgatgatttgttatccatttattgattcatttgtccatgtaacaaatacacatattgagtgcccattttgtgccaggtactgtgctatgctctggcgatagtattctaaacaagtgaactcaaagagagactagcatttcaaggaggatgtgcatattaaatacacacacacgcaaactacttgcattggagataagggctatagaataaagcacacattgtaataagaatgtataatagggagagttagaccagtcttcgaaattggggaaatacttctgagaaaaaaaaaatattcaaagcaaggcaaagaagaatgaggttagagtatagttgtccaaaagaaaagagggagcaaaaatgtccctgtcagagggagcaatgtttctgaatgtggaaaatggtatggagaaagatctaaaacaagtacagctttcctagagtacagtgagggcagaaaagtgtggaacaagcttgcatctgaatggccgactggggtccaatcattcagagccttgaaggttatagaaattatttttctctttatactaagatcaatggacagccttatgggtttcaggtagaaaactgatgtaaacatatttgtattttttaagactatcactctgttttgtgtgaaagagattggcaagtgcctagggtagatgaaggactatcaatctgaagcaattacggtagctcatccaaaagaaggtgatttggactagaatggggacagtggagatgaaagaagtaaatctattcaagatttgtatatgagatagaatcaataggaattggtgttgtattgcatgctgtgtgctccatgaaatgcacacctgggtggataatggtgccatttgcaaggagattggaagggaaattggaacaacaggaaggattaggggtgtggatgctaaggtgtttgttttgttttgtatttttatgtagcgcgtgggtattgtgcctagaaatgaagtcattattagggatttaaatatgcaactcatggagtggatgagaccagctagaaagataatagagtgtgaagaggagatcggaaattcaataaagaagacaaaagcactaaaaaaaaaaaatcagagaagacacatctagaaaaaatgatgaaattctaaggaaaataatatttccataaagaggtctgttcctttcgatctccaatttaatgacttcatgaatgaggatcccacttttagcattaggtgtcttggtttccacagtctctaccatctatttacccctaatttcctcccatattgctatttctgtgaatattaccaaaatgttgccttagtagaaaagcttcaataaatatttaaattgtataacgtattcagctttttcctgtactctgcacttcctaaaaataccttcttcggaaaccccatttcaactgactactgtataatgaaatgagccttcagtgtaaaacatttatcatagtctcaatttcaattgctcagtcagaattgttgagtaatatgaaaaatcatcctttagagaatacagaattgcatagttatgacaaggtaagtttgcactttatttaatgctagtttagttaatatagatgcttattggagaaatgtctaaaaattctggaggaccgttagtgaaagtgattatcccaatatctgcaaaaatggtaaaaatacctagaaaacattgacatttcagtttaaataaagccagaatcacaataaagagatagaaggcatttgagtaattcaatctaatcatggatgaatgtaatgtacttatcagttagctttggaggaagtaagactcgatagaatagtaatatgatattgagcaactttttttaacattaggtttttaattgcttataactcaacattgttgaacacctatgttctctttgctttttatgagacagcaactctaagtcagagaacagatacacacacatatgtatatgcgtacaactactataaaatatcaagaaagttataaagcatggtacaaatcaatcataaatgattacttatgaatagtgtgattatggacattctcattgaagaatccatttttataaataggcataagagtatggacatacagagatgtgaattagagaatgattgcaagaagcagtgaggcaaaaaggattaatgaaacattgatctgtcttacatacacagctattgacagtaccttgtgtgtgcatagcactattctagattcacctaatcttcaatgataatactgtatttaccatttaacaagcctgtaataagtgtcaggcacttctctgattacatcacatacatatgtgataagttccatattaactctagaaggtggggaaacataatcatctaaatttaccagatgaatatgtagaggtacagggagattaagtaatttgcttaaggtagctcagctggtacgtggtagagtcaggattttaatggtggcagcatgacagtaggattaaagattcttaaccagtcagttgtcacgatctctcagattttaatagaattctaaaaaggatagaacaaaatataaaatggcaggaatcatagtatcttctaacaagaactagacatgtcccattgaggatgctctttaaaaataaaacccattaaaattttgggttgtttactcaaagcctatagacattggcatattatattttcttagataaaaactgagatatcctaaataactcatgcccattctctagacttgcatagggagctgtctatgataatatccataacagttatcttgtttcacaattttattactatctcactcttcttactttgtgaagatgaaaaagatcaaaaataaaactaatgcagccctggtttgtttgtaatcatctacagttagccatccttagagtggtctcactagttgttcttttagagtttatttcagttatgtacaggcaactgtgctacatgaacaaaaagctaagaactgggctaacctgaacatgatttagtattgtaaaaaaatggtttacatagattaacgtgccatactattctgaatagtacttggcataaacagtaggttatttaagttactataattactgttgcctttttacataaactaatttttctcttatcttcattatgttagtcatccacagtgtgatatttagttgcatacattcatatagtgtacactgtacaattctagagtgtaccagtaacgtggactattaatattatgctatgaggtaaatgacacccctggagttaagcaatgtgcactctgtacgataacgtcaacattggcattctcatatatatgattagaaataatactgagtttctctgacttcacaagcaattttattctctcatctcataaagaggtaatgaatgcacacatatctacatatttaaaaataatgtcagagatcgtgatggaacagaattattcaagatgtataaatgagggtgggaggcaaagggaagtcagaaatactccccaataatttatttcaaattaaaagcctattggttattggctggtcgcggtggctcatgcctgtaatcccaacactttgggaggccaaggcgggcagatcacctgaggtcaggaattccagaccagcctggccaacatggtgaaaccacatctctactaaaatacaaaaattagccagacgtggtggcgtgcacctgtaatcccagctactcaggaggctgtggcaggagaatcacttgagcccgggaggtggaagttgcagtgagcggagatctcgccactgtactccagcctgggtgaaagagtgagactctgtctcaaaaaaaaaaaaaaaaaaaaaaaagtctattgattatcatgtgcgtttccatggtatcaattgtttagtattgtccagtaactaactagtatataaaactatcaggataatataaattttaacatttatttaaaatgcatcttcttaactgtaaggttattgatctttggataagctatagaaataagccttaattcagaaatatatttcggagacccagtaggttaatttgtagcactactctttaatattaaatatacaaatatacattgtttttataacttactgctataatgacactaagatgtgtgattatataaaaataagaaattgttagaatttattttattttaatcaatgctgatccatttttctagtgtatgagattagatgaggttgtatgagataccacttttctaggaaaaaagaaagtctttatgacagtgtgatgaatgaagtaaattagctcatttctttcaatattactagtgtgcatagatcttctctttttgtctttctgtctatcatacatacacagaggcacacatacatacacattacttggaaattaagtggtttacgtatgaaagtttttggctttactgataagatcagtaacatgataaataatacaacactgaatacatttttccatttgaaaagtgtaaagaacactacaacacggttgggaaaaaaaaacaacttattatattcaaatgtcattcccaattgtaacaaacatataattatttatttcttaattaagaagctattaataatagtactttaatattcaacattagcagtaactttgttggtttcttttttgataatttgtttaagaaaattagattataaattctgttatggtaaaaatacaaaaataaagcaaagtattatcttctttctatctcttatatgcatcagttggacaagatattgagattctcttttcttttaattgcatgctttcattatttttctattcaagcttcaccctgctaagttcaagtgaagtagaggacttcatgtctctagaaccaattaatgaaatttcttcgtctttcttgaacttgcagaaggtcaatagtgaccattttctcccttcttaaaaatgttgtcgtctttaagatctgtgcactgtcctctcatggcttcactactactttggagggtgtttgtattcagtctgcattgcaggctgatcctctcttctcagcctttaaaaattaggtttccttgggatctagtcctagcataattctcttctcataatgatctcttcctcgatcattgcacttatgtccacagctttattaacacttatatacagataactaaccaagttatacctctagcttagatttctccaatgaattccagaactgtgatttcaactgcctgggtggcatctccattcttatgtgatagtcacctccctctaaatgccctaaacagaactttctcttcaccgcacaaaacctgcttccttctcattgtttttcttatcattgaatggtgcaaccattcacccagtttcacaagccagaaacatatctcatccttgaaactctgatcttttttacccagttatttctaagtcattgccagtcactgtgggttttatcctctaatatattttcatccacttctctttatctcctctaccatcatcctagcgcaatatattttctctcactaggaatacagcagcctttcctttccagtttctctgcattctctttcgtattcttgataatccactctctaaacttcatgcagccaattaaattcgaagataccaccacttgttaaatcatgttagtagtttctcttggttgctaggaaagccaaacaaaacaaaacaaaacacatttaaaaatcaaagtctagacactgcctacctctcctatctcatttcccatcatgtttcctttgcctcgcccccttactggctttctttttgttccctgactaggtatagctttttttttttatctacagtacttttgtgtatgcttttctatttgtctagaacctccccgtttccccttttttaccttgatgacaccattttccacctacaagcttacctctggatagacatcaaaatcccctaagtacatcaaattcctctaccacgtaacatctgttcataacacatagcactgttatgattccatatgtatgtacgtgactaattaatacttgccagtcggattatgtggtaagttctatgaaccaagacacctcaactgttcttgctcaccactttattacctggaaccaaacacattaggtttccccatatatatttttaaataagttacttgatgtgtaatgctttaatgaacataattacagatgtttacatataatatgttataataatgatattttgattgcattttatgaaaattttatatgacaaagcactttcattttggttaaagcttcatatataaatatataataaagatttgctttttgtcattgggtgctgttcccttttttgatttcccatactgcttttcacttgtggttcttgattttgttttttactgtttttaacccatgtcctttttctttccttaatctatctttgtaaagtctcaaagaactagtatctagaatatataaatatcactcaaaactgagcactaaaaccacaaataatctagtggaaaaaaatgtgggaaaagccttaatagacatttcactgaagaggatatacagatggtaaagaaatgcataaaaagatgttcagcttcactagccattaaagaaatgcaaattaacactacaatgagttatcactatacacctatcagaatggctaaaattaaaaaaagaaaaacagtgacaacactgaaagctaacagggatgcaaaggaactgggtctttctaatattgctgatgggaatgtaaaatggtacaaccattctagaaaacagtttaggagtttcttctaaaattaaacatgcagtcaccatacagcccagcaattgtactcttgatatttatcccagaaaattgatgtttatgttcacccaaaaaccttgacatgaatgcagtagctagaaacaagaaacagctcaagtatccatcaatgagtgactgttaaacaaactgttatatactcataccactaaatactacacaacaatttaaaggaatgaactactgatactcaatattcacaactccaatggatgtcaagagcaccatattgagcaaaaaaaagtcaaaggttaaatactgtgttatttcttgtatataacattactgaaatataattatagatattaagaacagatattgatattaagaacagatattggttgccagaggtcaggaataaggcagagggtatgctatataatggtgccacaatggagccttgtggtgatggacctgctcaatattttgattgtggtgtttgttacacaaagctacacttgataatgtcgaatagagcttcacacacaaacacacacacacacacaccagagtcacacaagtgcatacttgtctatctggtaaagcccgaataagctctatgaattatagcaataatttcccagtttttatattgtactatagttatacatggtatcaacattgggagaggtaaagtgaagtttgcacaagacattgttgcatatttctttgcgacttcctgtgagtctataatgattgcaaaataaaaatttgaaaaatacagcattagacctttaataagctcttggttttctgaaggctagggtatcatcaccaaacctaatcgaggataagtcttgtaaattaataagtctatcactcaaggtacaaaggatggtttaatgctaatctgctagaatgcaatccatttctattatatgggaacgtgcatcactgattgaataaaatatcatgatgatggaggccgtattctatatgtcctactttgtaaggtgttgtgtttcaggttgtttatgaccaaaaaccctatatgacaagcgctagaagttatgctggtccacgggcatggtaacttgacaatgcctgagactacctgggttttaaacttgcctctacctacaaaggcaagtaatcctggacaagccaatatttatttaactagtattaattgagagcctaccatatttctggcactgagctgagcatgtctactactgtcctcaagaggaaattaggaaaaataatgccccttcacaagcttacttattgttggctttaaaagggggatatataaagtttcttggtgagggtcaaagtgttgagaataatttttctttgtattattttaactattattgttaatcacaaataactaatgtatataactctaaaagataaatgtacatttggataccaacttgtataaacagatacatagatcaaaagactacctctgattttatgtttgtgcgtgtgtgaatgatctccttgctttcaatctggtcttcagaaaatcccaccttgtaattgctgcccccgttgagtttctaaaacaaataagattgtgtgcctccagcttaacgtcctttagagaatcttctagcttcagggtaaaatccaaggtcctaacgtacaaggtctttcacagtatggcatctgctcatgtctctcacctcctgatctgctgttccccaccaggaacacttctgtctagatataaaattactttggttcagcaaataaaataactttggttcatgtaattttgtgtctatgacttgttcccacttcttggaatgttctcccaaaaaccactatcaccatgtctcttccaccaatgactattaatattatttttatctttccttatagaatattgtttaaaagaattccttactaccctaggtcagaaaatggggccccaatatgtattcttattgtaaactcactatggataattctagacaagcaattatatcccctattttagctgtcagtttgcttctcggcttctgactcactctcttgctccttgaggagatagcctgtgcttattatatgtggattaattgtgcctaacagcttgtaggtacacaaatgaatgactacacagcatttatctgactattgtttagccattacatcactgtatacatatttgaaactcaggcatcattcagattggaaaagccttatgaatactggcatgcattattttgtacacacacacacacacacacacacacacacacacaaaatagaacaggatgggataatcctaagtagatacttttttgtccagtgtactcaatatattgtaaaaattataaatcttagactaaaatgttggttgcttaatttggatgattcatataatctgtcgtgtttttggttatctgtgtactttgttttctctttctttcttagtctcaaaggaaatgtccaagttaaaaaagagccccaatttgtggggattcctttgaggagttacaaagctgagatatcttaggagatgccaaattgatgcaaagtggtggagaggtgagcagagtagaaatttggagaatcacttctgctcctatagtgcatgcatgccagggctgctgtcctttgaggtgggcacaggagctctaagtccagtgggtgtctgaggacagattactgagaaagtgaatggttggcttggactacctcaaagacaagtgtttgctcctgcttgagctattgttggaggtttcctgaaggagacttagaacggaatgtccattccagagagtattcagtttcagtttgctgcattcctaagcttattttccaccctgggagctggccacaatgattggaaatctttcatctgttttaatctgggattgagctcatttataaaaggaaacttagtgtctggataaatatgtgtgcacaagcatggagccccatacaagtatgcccaaattcaaggtgagaaatgtttattgcatgactcaaatacatggaattgaatggactctgaaaacaaaaataggatctacagagccagtctaacaacctattcatatttattatttttgcacttaaatgtttgtaatattttattgaccagtgaatatgaactatattttgtatattacgttaacatattattcatgtaataatgaatttttaaaaactggtgtcttgaaccctttcaatttccaaagtattacagaaatccacagatctggtatgcacaggcattttatgagaaaacttagcttgagtgatatcattaatttactgaagtagtaggccctctgacctgcttttataataaaattaagtttctgtaaactaataagaccatagtaactttttctttaatattttatctttgaggagatttgttaaagaggcttgtatgtgacatgacaatctattttgacttataaaatttcaaccaaagaaaagatgcgatatagtatctttgttcttatctatgacaatttttatgatgatagttccataattaaattttttcttaatgaaagtgtatattattgtattatcttcaactaaattagatcatataacccaattttgatctccgtatgccaaaagcagagaattgaccagccagaaaaccatccaggccttatataatatattgtgcctagatgaaagcttataagcattcttctgcctggggctcacattgtagaaatgtggtgtgcaattttgaaagttgaaaatatagactctgattgagaaatggaaaagagtagagttctaattcatgacatctagaaatcaagttctaccactgaaaaattaatttgcatatattcattatcttttatagtgaatgataatgataataaagacaataaagataatatacatataattggttttataaaaactatggcaaaaaatatattaccattctcacttgtcagatgaggtaactgagtctatattatttgaaatataactttaaaaattatattatctccgctactagattatatactcctggatgccgcaaaccacatcttctatgtgtttatattctcatagagttttgaatatttccttgtactaggaagaagttttataaatgtgttttgaattaattaatatccaaaagtgatggaaagaattataagttacttataaatttcttttgtttcaaaccattagatgatgacacttaattttttgggtataatatgatatggaaagactctcagataacttcaaaaactagaattatgcatacatacactcagatttctaaaaataacatgctatcaattcatcctgcctgccaggtatacaattcatttgagttttgcatgcgcgtttcaattgttcacattaaactgtattcatagatacaaattcacttttggaatcttgggtacttaaacaaaaacatagcctttctaatagaagtataaaaaggatactaattgatgaatataccaagtatctttccaattgcaggaaaccattaaaattgtgtctatacactgtatctcttttatcaaagactgtaacaaaatcaattgctatacatattgaaatatttatgtatctggtatgattacattagcttcagagtggttccaaatttaaattcccattggagaaaaatggagtgagaaatttgtacataagagagaagaaatgttttcttttttttgagacagagtctcgctctgttgcccaggctggaatgcagttgtgtgatctcggctcactgcaaccttcacctcctgagttcaagcgattctcctgtctcagcctcctgagtaactgggattacaggcgggtcccaccatgcccgcctaatttttatatttttagtagagacggggttttgccatgttggccaggctggtcttgaacttctgacctcaggtgatctgcccacctcagcctcccaaagtgctgggtttataggtgtgagccaccacacccagccgagagaagaaattttacagttagaatttatttggacacattttagaaatttttttcctgtaaaactcaagtttcatagtgtgtacgtgaatgcatctgtgtgagtgaacacctgtgtatttgtgtgctataaaaagatgaacacaggaatctaatagcataagtcgcaaggtaagagtattgtccaactaaaatagctaacttcagaggtatgaattactttttgttggtgggtatgattttaacattcccttgaatttattattgtaatatttgccactaaaagaaaaaaatcatggcttagaaataaatttaaagtaaccaagatcattgctatataaaccagaatttaaattgagggtttttgaaccattagggtatatttcccctctggcttaaatttgaaaactgatgaaattttagatctcagcacatttaatatgtctaaacaatactcatttgactgcaaaacctgtatatgtaatttccaaggcccagaagttcagtatttgaaattaaattgttgcatattactgagaaatattatcttaaagcatctgctccttctgctgttctaagttaggtgtgtatttctcgttagtgctcagtcgatgagtacaaataggcatgcagcatgagagcagagcattcatttcattgactgcaattactaacatgatttttgacatcttattcattgggagagtgtcttttaatgttaatttgaatgaatgggaatactttcacattcttaatgaatctgctcatagagtaaaataaaacatgactgttatgctttgaagatcaagaatcttcttttacacaaaagggtaaaaaaggccaaagaaggtgaagtgacactcttcatgctagttccaacacgagtattttgatgaacaagaaaaaaagccttctttagatgtaggtgaactgggtgatttggcattccttcctctgaattcccagggtattttgcctgtttttctttaactgcatgcaattcttgtcctttatccactgtttacaggtctgtttctcacaataggcggtgagtttatttacacagtgactgctgttacatatcacatgtactaagtctctagtgattgttgcttaacgatgactgaattgataggtcctagcatggctgatctctcacattattcttgtttggtttgggtttgggtatgaatggtggaaagagaaatggctggctctgagcaacatattacaatgggtttctagcatctactcctcacctagtactagcttagacagtgagcaaaataaaaccataaagcaggccaggcatggtggctcatgcaagtaatcccaacactttgggaggccaaggcgggaagatcacttgaggccaggagttcgagaccagcctggccaacatggtgtaaccccgtctctactaaaaagacaaacattagctggacgtggtggtgcacacgtgtaatcccagctgcttgggaggctgaggcagaagaatccgttgaacccaggaggcagaggttgcagtgagccaagttcgtgccactgcactccagcctaggtgacagagcgagactctatctcaaaaaaaacgaaaaaaaagtaaaagtaaaaaagctaagaaagcaaactatgtgttgtcaagaagtgtttatttttgcatcttgaatttttaaaggaggaggttcagatctatttgttagatgacacagggtttgtgaaaactcttgcagaccaatgaaatcagaacatacaggcacaccaagtgcagattgtgtttagagccactgttctaaaagcaggtgtaagagggttgcagttatatcccagataagagccttagggcattaggaatgaaaaagacaaaatgcaaacaaaagatatttagatatttaattagtaaaacttatttgcgcgggtaatgaggagagagacaaaaatagtagagagcaaatcatcaatactgacttcctgatttcttactagggcagtataggtgtacactatatatatatatataatattatatattatatatatatatataatattatatattatatatatatataatattatatattatatatatatataatattatatatataatattatatattatataatatataatattatatattatatatatatatataatattatatattatatattagtactacttccttttataaattggacagaaagcttatatgtatagaaagaaagatcaggctgggcgcggtggctcacgcctgtaatcccagcactttgggaggccgaggcgggtggatcatgaggtcaggagatcgagaccatcctggctaacaaggtgaaaccccgtctctactaaaaatacaaaaaattagccgggcgcggtggcgggcgcctgtggtcccagctactcgggaggctgaggcaggagaatggcgtgaacccgggaagcggagcttgcagtgagccgagattgcgccactgcagtccgcagtccggcctgggcgacagagcgagactccgtctcaaaaaaaaaaaaaaaaaaaaaaagaaagaaagatcaatattttttcaaatgtccagccaattgtttaagtaagttaaggtatgtaatctaaacttataatttaagtttaaagaaaaacattagaccaaatatttagccattttgatgtagccaagtttatgcttcaggagagttgcatagttatgaattgagctcacagaaatacaaatacacacgtcatcatagtgtgatatccagcatagatggggggcagttatcataaatcctgtcctaggctgggtttggaatgtgagacagattttataataataatatttcatctacataaaacagtccatttcctggactataaggatcatgataccatttgtttatcatggctacaaacagaacaggaagtagtatccttcaacagagaagataaattataacagtcattatttagaatatttgcaattcctttgtgtagggctattctttgttagctgaaataaagctctctgccttgattacagttatcattttgtgaaaatattgaatgagtttagattcctaaaggaaattagaagttgagtaaaatgtacattcacttagaaatttccttgcagtgaaagatgctgattactataaatgaagacagggaaatttcattcatttaaagagattactacaggtgacaagtttaaaattagccttaacttaaaagttggaaaatattttttcctgctagagactaatgccaactccgtgatgtatgtaaggtcatgttatcaggacccagcttattgctgctacctcctctcctacccttctcctcatctcttactcctaaccctttagccaaaggctcctatgtgcgggcccccaaactaccatgctttcgtgttgtcagggataagtcttcctgaaattaccctccttctccttaccaatcacttaattaattaaagcctggtttccacttcatctcaggaaaaattatttcctaacccctctcaccaatctccattgactccgccaatggaggttaggtatggttttaaagtgttctcatagcataagttcatcaaaatgcacaatatctttcaccatattttgtcaatttatttactttaatatgagaatacaaatatcttggcatgtttatcagtgttacacggatactgttattttatcatcatgtttcccacctctcccccatacctagagatgagcataaggcttaatatataaagttatttggttaatgctttttttgaataaacaaatacatatctaagggcatgtgagcaacagagttcattgtaacactatgcttacagttaatcatctttttgttattgttctagcagcaagaaggatatatatctatatatatatacaaaggggagaatgagaatgatctgaattcaaatataaaacattacaaatgaataaggaatgtattattttgctagcattgccataacaaaataccacagtagactgggtttcttaaacagaaatttattttctccacagtagtaaaggctaggtataatcagggctgatttcttctgaagcctccctccttagtttgcagaggctgccctctccatctgtcttctcatggtctttcctctgttcctgtctgtgttctaatctcatctttttataaggatactaatcagattggattagagctcaccttagtgacctcatttaaccttaaatacctctttaaagaccctatctccaactacagtcacattctgagacaatgggggttaggacttcaacagacgaatttgggaaaggggcaatttagcccataacaaggagccctgtcaaataaaacagctttgagagcaaacaaaaattggcatctgagtgaaatatgtgggaagaggaaaataacttggggctttgctgttctcttcccactcttcctgtgacccgactggttccctgggaaatggtctttggatccccactgctgcttaagagtctgttttttttcccctgagttactgaggactgctgtcagtatgattgtagtgcaaattgatcctttgtgggaagtacaatagcaactggtaaccacaaagtaccagagggcaaaagaactgtagacgggtaaataaaaggtgtccgaaaagagcaaagggctggaagaatgggaaaatggagaaagtaagatatgcattgagaagactgatgattttttaaaatagtagatgttagatagatgatgagagagacagagagagagagagagagagagatggttaaaggaaaactggtatttggtctgcagttttgctgtttcaccagcttaacaccctacagtgaataacaaggtcatagatcatcacaactgcagaaaacctggagaatattttccatttcctcattatatagatgtggaaagtgagactccagttctcagaaacagttagatacaaaactaagacccagctagttctcagccagtgattttcatatcataccacacgctatacagttgtaggtttagaaaaaatctatggtataagaggaccatgtagtaccttacaatgcttctgtaatacccacagcatcataaagagtaataaatttaattattgcaacttaatgattcaacaattgtatatgtatatacgtaattatacatatatatgtgtatgtataaaatctaccaatacatatgtaatgcacatgtataaaatctaccaattttctatatatgcagaaaacaacaacaacaaacagtattagagaaaaccagggaattaagtcaaaatcatcactcccagacctgaaataaatttcaaaagctcttcgttactggtcctttatttgtccttcctacctcattttttgccccactcatataccacacattgcaactatgctaaactaccttattttttttagaaaaggacatcctcctcatacctacatttgtacatttcctttttatttgcttttttcctctcctgttgccacagtaaattcctaagttttctctttaaggatctgtggcctgctttggatacagttgagtgtagtgatattgtgccttgcacatatctctagaacaaaagttattctgttatagaaattacttatttactatcacttaagatcatttattaccatttactatcatactctaattcacagaaggcaaaaaataaacccttgaatggcaagaaatgtttaggcaatgttgggcaaattgtttatgaatagtgattgcaattaacatagagcttcatacttactggattaaatattgatacttttgagtcatatctctactcttagcaataatattggtgaatattctgtgctgtaagcaatgtaaatcataaaaacattctaatgtgtatatgggtattgaatattcaatgatattaaatcaatgttcaattcatatagatgattcttttggaaattaagaaatggatcccattttaatgagttttccccaacataaactatactttgttaagttcaacttgacaatttacaacgctcacatagctttcagatgtatacttaagatatatggaaatgaaaagcaaaatgttgtgaacaggaggtgacaagatattttaaatttaatcatcatatcttttataattaaccttttaaaacatttaattggcattattgttagaaaactttagctctggaagctaaatctttagaattgttgacttgtagacaagtcaaatatccaaaataaaatttcacccatcattagcagtagatgtatctagggtgaaattacacgctggattacttcaatattcttatatttacatttttatttttttcaaagtttctccagtgagcattttattgtgaaaatattaattatattttaaacttatttttagtttaagatgagaagatagtctttggggtagataaatacttttaaatctttcatttagaagttcctggactaatattatccaggtcccacttccttaaaaaaacctaatgtaacctttcccatataagcattgactgctatttcttgtttcacaacatttatgtggtatgtctatgcctatggtattgaatatatatttgaactctgctggcctattcccatctctcacagatcccaagacaatagagatcatgtcttacccatctttgtatctcttacagaaaatagatctcaaattctacagaagatattgaattgagagtttgagatgttagaataagaaaaggcagtgaaaggagagcctacatgtagcctaggccagatttacaaaagcagtagctcagaatgagatagggattcaacaaggagaaccaaattatttggtagtaagttgttgctaaattgtgggagatgaggaaaagggaataatgatagcagactccctgatattaatcccccaagagtgctctatggcacagtaattattcattatgggccccctctgtttggccccacgcccccaaaaaagacttctttagtcataaaactgaggggaatactacatactaaatccccttagagtttctcaatgtaatgcatatgcaaagatgctctggaatcctgcaggaaagacagctgtttaacttttaacctagtttcccaaactcatttcaccatggaacttctttaacatgcagtcaataaatgcccatttatctaatgtttaatgaagcatatgttggaattcttaaaattgttaatagctaatcaccgtgaggaactggtgagatgatggtaacattaacagaagtagagaaaccaggaataggatcaaaattggaggggaaggggaaaagggccttttgttttgagacatcaacttagaattgttgatgggctatccaggtgggtagataataaaagtttttgtgggggaggactaaaactaaagagttagacttaagagagaaatacttgagaatcacttacatggagatagatgatagttgaagttaaagaagagaacgagatttctaacggagggaatacactatcaaggaaaggattagagaaccctgggggagtgtgaatatttgtgcctcatttaattttcagaaccagatcatgaggaaagaatacttcccattttagagattaaaaaacaaaaccgaagcacagtgcttaagtaactttctcaaggccatataactaataagtggcagatatgagattttgagccctactctaaaacttgctcctcaatttgaatgtttacatatttatgtaaataatatattttacaatattaaaaacgtttttgtagagatacaataaccatataattttacaggattgtcttttttatttacgtttttctttggagtataatacatttttaattattggcctgagaagaagatacaatagattatttttggcaaatggtgcactcattcatgagagacactgtattttctaaagcaggctgatctctgcataatactggctccctgaaaataaatccttgctgggccgggcgcggtggctcacatctgtaatcccagcactttgggaggccgaggtgggagcatcacgaggtcaggagttcgagaccagcctgaccaacatggtgaaaccccatctctagtaaaaatacaaaaattagccgggcgtggtggtgcatgcctgtaatcccagctactcaggaggctgaggcaggagaatcgcttgaacccaggaggtggaggttgcggtgagccaagatcgtgccatggcactccagcctgggcgacagagcgagactctgtctcaaaaaaaaaaaaaaaaaaaaagaaagaaaaaataaatccttgcaatttatctgccatattgaatttgttctggaataatggggataaaatcaaaataggaaataaagtatcaattttattccactattattttatttattattttcatcttagtcatatggaattatatttataggaacatgttaaaatgcattttcaagataattattgcacacaatttaaacaattgttttgagtgactttttgtagaggtagaacagttctgtaaaattaaggtttggctttgctttgtttgacctagattccctattaatttcaaaataaatgtgccttatatttcaaaatcggatttcgtatatgaaagctcatgtcagttcacaacaaaaaaaaatcattaaaaaagaatagtgcgttattttattactgttttgatagcaatacctgaggataccgtaaatgtgtgcatgtacttttgtttacaaataaaaaacagttatgagaagacaaaaaaatctaatgtagaataatttattccactaaaacccagctttcctcatggaaatcatgcaacacctagtgagattatgctagcacatagggaaatttcacaaatgcacattcttagacatattaaccttctggatcagcattcaacaaaggtaaaataatgtacgctattgatatcagactccttagctccctattctggctcccttttaactatcaaaacacagtaatctgtgttttccttctttgtacatcagttattgtacctgccactctttataagcattcacttttctcttgtttttaagcacagtggtagcaatggccatgacttagaggcttaatgaaatgaaggacagattataaacaaattaaacccacactgctttctttatagaagcagctgcagagtgttctgaggtttttttttttccttgttgagtaaaggaactaataaggaaaatttcatggcttcaaggtctagagataagaaatgaaagttgtaacaggagaggagctgggaaaagcacagaaatgtagatttcgcggatcatgatgaaagccacaggtgacttggtgaccacagaaatgagaacacagggttgggtgtctaggcaggaagttgggaggctggtggagtcctggttcaactctaaagtctcagttatctcagcacatgctcttgtggtgctgctgagatttggctgattgcctaccccaaacctaaaaatagccgagcctcattcttttgtagtggcagccagaggcgcagctgtgtggggactggctatctttttccttagctttgacaaatagctgagagttggtgggcttgagtgtgcacctgttgagacagaaagtgctgagtttagttgacaacactgctgaaggtaatttcacactttcattccaattgatcaccgaaacttagaaaaattttctccttttctaaatccttctccttgcccatgaatatatacatacatatatttttctcgaactgtttgagagtgattgttaccaaaggcaattgtttttaaatcagaataacaaatctcctgtttgagtggctaactcaaattttattttcttatttaatttagtagaatttaaaagatttaaaatagttttgaaattaggaaataatatttttattcccataagtctaaaggtacaatctagcccattacatcactataaaaaatcatctccatatttattagattacaggatattccgctttaaactagaatttgcgttgcatacatttttgcagaaaaactcattcttaattttttctaaaacagtagattggatatgtgttaaaggttcatgttctagtacttctttaaatgcttattgtcagctttataaaatcattttatcacaaaaagttagttttctgtaggcttattttccttgataggattccttctcttacaaactggttatatgaattaaaatgtaaatgttagtgaattgtcatatcttgtaaatatactagggtagaactgatatctttatgcaaattagaaaaatattttacagtatcagttatggagttttttttctactcttcctttttctttgttaatattggcatgtgatgaaatcactactttataagtttgctactttgattaagactcagaaatcagagtggctgggtgtggtggctcatgcctataatgccagtactttgggaggccaaggagagagaggatcccttgagcccaggagttcaagaccaccctggacaacagagtgagacctcatctctacaaaaaaaaaatgaaaagaaatgagccaggcatagtgacaacacgcctatagtcccacctactcaggaggctgaggcaggaggatcactggagcctaggaggtcaaggctacagtgagtcatgatctcaccattgcattccaacttgggcaacagagcaagattatgtctcaaaagaaacagatcaatcagagaagtaactttaaatattttaatataaaaaaaggcaacatctcttagcaaataaaaatagcgacgtccttctctttctgtaaatctatccaagacatgagtgctgttatcgattcggtttagggttttgttttgtaatatttttttcccctttcacagcaatacattttggggtatggtttgctgacaatattttccacagtaatcagtggcttagctgtaaatagaggataagtattgcatctggggaatacacattagaaacaattggtatttctggttcatataaaggtggaaaaatacttggccagatgggcacttatttatttattttcctgaccagaaataacaggcaatgtgtgagaaagtgtggaaagcactgggttggccgtcaaaagcaggatcttacaaaggttgaaggaagctaatctgctgagaggttttctttttttaatgactttcacatagtatttttcaaagcctctgtgcattaacactcacgccaaaggaaatgatttgttttttcaagcacttggtcagtgcaatagctccgcagctaataatgacatatggcaaattttgagtacttactttgtgctacgtactgtaataagagctttgtgtatattatgtgagtaaatacttaggacaagcctgtgagagagctattattgttcccattttacagatgaagaattctgagttagaattagactttgaaagtcaaactttctccttccctatcccttgctgttatccaccacatcatgctacctccctgagctcagtgattacctacaatgaggtttaccagcttgtcctatagttacctgtgttataactgccatgttcctgaaataaattaactataaaatggtgcccatcgactgatatagagaccagtcattttttttttatagttttatctggcctggggttatcaagatactaggtttaatagaacttacttccagatttaaatgtctttgttcattcatgaaaatcaattgattggatccaatgattttagatctagacaactgtcagtcatgtaatctaactaactcattgtttaaagaggcaactgaggtgctgaaactttcaataattggattaattttatctttagtcagttatatcattagaacctaggtctctatttcttaatctcaaccaaaatatacatacatacatatatgtgtgtatgtaagcaccatttctgctaatttacaaaaacctagcaaaccagtttaagaaaaaaaaaagtttcctttgctcatgtaacgaaaaagtgaagaggtattacttacttcagatacagttagttttgggatctcaagtgatgtcacctagcccagtacctctctcaccctttctccactgtgttttcaaaggctcttaaaaaaaaaaaaaaaaaaagctcttagacattatctctcgatatgggacccattattagtcttagacttatatcattgtacctcaattccaatagaaaatgaaaacaccattctctccaacagaagacctaggattacttgtaattgactctgaagaaatcacctacacattcctgaatcaatcaacctagttcaggagtacagtgttctgattgggcaggttccatcagacacccactcctggaaccagagccaggtaagttcaacccaaaactgtcagagaggagcaggggtgggtaggccacaacgaacagagatacaacaagacaaacagtgaagaagaagatgaaatgggtagcaggcataataagattataaagtcttgtaggtcccaaactctgtgtgtatgtgtgtgcatgtgtgtgtgcgcgtgtgtgtgagtaaccctcaaaagtatacaagtattgtgcttcctgtaatgacagacacccttctgttgataataatgattcatgtagcccaagaatataagaaagtattctgtttgtaaaataaatatttagaatgggaataaatttgtataaacagaagcatgtttgattttctttaaaaagtgcgtgataaatatgatgatcccaggaggtttgttcgttatttaaatgtttaaacatgtgatatgtctctttcagaataataaatagtagggaatagcaatatagcacttttcggccgggctcagtggctcacgcctgtaatcccagcactttgggaggccaaggtgggcagatcacttcagatcaggagtttgagaccagcctgaccaacatggtgaaaccccatctctactaaaaatacaaaattagccaggcgtggtggtgcacacctgtaatcccagctactcaggaagctgaggcaggagaattgcttgaaccctggagacggaggttgaggtgagatcgtgccattgccctccagcctgggcgacaagagcgaaactccatctcagaggaaaaaaaaaaaaaaagcactttttaaaaatcataatggatttctaagattgtaatagttttggtatgctgattggctttatttttggctacatttattttagaatctctgcattatcaatgaactttcattcaatttcttttctttctttttttttttttgagacggagtctcgctctgtcacccaggctagagtgcagtggcgcgatctcggctcactgcaagctccgcctcccaggttcacgccattctcctgcctcaggctcccgagtagctgggactacaggcgcccgccaccacgcccggctaatttttttgtatttttagtagaaacggggtttcactgcgttagccaggatggtctcgatctcctgacctcgtgatccgcccgcctcggcctcccaaagtgctgagattacagtggtgagccatcgcacccggcccattcaatttctaaattaggcataaaaacaaaattatttcgtaacatttctacaatgacctcctttttctgttaagtttctaattctgaagacccaaattcaattttatatttcagtatctcacactgattattctgatagttacattaaatccctcgtttagaaactgatgcaagttactgttttcaaatgttcatgctttgaaagtacatgtttgtcatctgatttcaaatctgcatggttccatgctgattattttagataacttcaggctgtactccaatttttttctgagagatctctgaagtaagcttttcttactctgttacaattttaatgagatacattctatgtattagagtgtgaaatatctctttaggacaaaatttaatcatagtcagtgctccttatttaaaggctaaaggcatcatcaatttggcaaaaaataaacaacactatctggctgcctgagggtccagtgactgaccttgagttgaaatcccagctgcctgcatcatgtgaccatcaacattctgtttttatcccagtggtaataaataccttatactcaaaaagacaagagcaactcagaagagagatttggtacttttcaaagaaacgcagcagtaaaagttgcatgatgcttttcatttcaaagcaggcaaacagagctttattatggcagagcagtccaatttaattttcacttgtgtgatgaaactattccacacgtttgcattaatttatgagcctttgtctggttttaatgtatttaataatacatttatacactctttgttttaaaaataatgatatgttttgacaatgcactttttcaggaaaatctgaggtgtaacaaaaagtgataatggtaagatagttcccattttgagtattaaaaaatgagtgcatcaggtaggattgggtttggctgcgtgtatcagaaatccagaaatagaagtgtgttaagtaagagagatttgttgccttgccacatgagtgagctccagctggaagcagtacattgccggtagagcagggccatggtggtcaaggacccaggaaccttccatctttctgtgcaactttcggtcttcgatgtaacatcattgtctaaaatggctgctggacctccagcctctttccaggtgtcaggaaggactccagcagagtgaaagggtttgtccaatttaagaagcgccctttacacagctttcctccaaatcccactggatatttctgcttactttcccttgcagtggattatgtcaaaatagtctaattccttcttttataacaattggagttgaaagctttgtttcaatctctagtgacaatactttagattctgattcccattctctgagggcatacatccgtgttactaggttgttactaaatatgcatgaatcttaactcaagttttttaaaattccagtttggaacccttggagaaatcaatacatctgttcgtattttgcccaatagtctctatgagtgctttatctaaaaatcataaattcagatacatttttaatatcatgagactaaagaaaatatttcccgttgtcaacagatatcaagtttcagttataaaaaatgagtaggttctggatatctgttgcacaacagtgtgcctgtagttaacaataccgtattgtatacttaaacatttgttaagagagtagatcttatgttgtcttcttattataataaaataaaataaggtcgggcgcggtggctcacgcctgtaatcccaggactttgggagtctgaggcgggtggatcatttgaggccaggagttcgagaccaacctggccaacatggtgaaaccccgtctctactaaaaatacaaaaaattagtcgggcatggtggtgcgcacctgtaatcccagctactagggaggctgaggcaggacaaccacttgaaccagggaggcggcagttgcagtgagccgagattgcaccactgcactccagcctgagtgacagagtgagaccctgtctcaaaaaaataaataaaacaaaataaaataaaatttccgtttgtatactgtctttaagacccaaatcaattctctctgactctagtgggcactgatatgttctactgaagtccccatcaccaggtagcacacccatcccctagctgctgggagtgcttgttgcccacagctgcttccttctccagagacttgttcttaccctgaagaaagccaggagcctgaaaggccatatgtgccccacctcaggtcagtttgcaaccaacgactgaaagtacaagagtccaacccatttgccacaaggtgagatcagctctgggatgcaatttgccctccagagctccctgtgggatcatgtggaaattggtctctaggtgagatcgcattcttgttttgttttccccaagccctaaactgtccccttcacacagtttctcttttgagcactttctctttttattttattttttgagacacagttttgctcttgtagcccaggccgcagtgcaatggcatgatctcggctcactgcaacctccgcctgctggattcaagcaattgtcctgcctcagcctcccgagtagctgggattacaagtggagcgccaccatgaccggctaatttttgtatttttagtagagatggggtttcaccatgttggcaaggctggtcttgaactcctgacgtcaaatgatccacccgccttggcttcccaaagtgctgggattacaggcgtgagccactgcgcctggcctattctaattttcatcccttcactcacaaatgctatgttccatcaacagcttgagtgtgcacatgagcgcacacacacacacacacacacacacttctgtgcttgctttttcgtggctgcaaacctgctctcttgtgaatccctgaatccacgtatgaagccgaagcttttatttcattttattttttagttgacaatataattatacgtatacctggttttttttttttttacattaactcttctccttatttcagctgagtttctatttatgcacaatatttattgttccgactcaggggaagtttcaagacacaaaccttttgacagcctaaattagttcaggtctaattcagaaacagaagtttccagattagaaaacctgaagctaaagaagtgcttgaagaggaacagggattcatgcaaaactagactaggtaacagagttactcatacacaagaatcttggcaagggttgaagtgggcatgtggaaggggctggcttgaaaatcaggagggtcagagaaagagctgttattgttaccctttgttcctcctcagatgtctatgcgaaaggctctctgagatgagagcacgatatagctcatgccggttcagccacttaatcttttttgatttgactgcacccaggtttctttaaatctgagctttagtttccttaactgtaaaataatggaaaaattcctggcccctcctcacctggttgctatgaagattaaatgagataatatatggaaaagtcttagcatataataaggtctggaacatgatatacatttaataaaataatacattttacttattattatcttatacctttcatatgaatgttaactgcaaaacagcatagccggtatttgctccttcacaatagaaggtaatatgcttccctgttttactaatcagaaaactggcctcgaagaggttaaattcctttcttagaactattaagaggctaagccacacttcaaactcaggtgtgtctgactctgtagtcaatgttcttttcacttcatggtgcttttttcctgtaaagtgagtataatatttcctaaatcataataaagctttgtgcattggatgacataaatataaagggcatagtgtataattggtactcaataaattattccttttcctccttccctaggcaagaactaattttctttctttgtttagcccctgtattaccagccaagtgccttgggcataatatacgtaaataggcctagtatgttgaattttaggcagccatcttgatttttgtaacaaatctagttctctttaaactattgcttagctcttccaacaataacaggccttgtagttatcccacatggggtgatttcaaagccacagagggaagattgttcttaagttactcctgcatgcagtgtcaagctctcacaactttcacaagaagttaaaaactacaattttatgtcagtctctcctccagtaatcagatagcttctttgattgttctgataacccaagagggaatccttctgatacagaaggtggctatatctcatatattttgcaactcctcccaaaacatagatcgatcatctcaaagaactacatgggaaacttgatagccttttggaggctgagaaagaaagctaagccaaccttgaaggaagtcaacaaattgtcaatggcattttgaaaaactgcattgcaatagacatctacactcatacgttatttagctcccttagggatatgattactcttggggtccacaagattcgatgcatgatcatttgagaatatttgtggctactattattttttaaacagatcaacaggcatgacagaatttcatgcatgaatttcatgataaggcattctcaattttatgttttcacttaagtgattatctctaatgttcatctatttccttcttatttcaatcctaccctagtttcaacccatccttttttatttttttcttgtttgaagtttaccctaatttcatgactgagcttctctaaattccttaattaagtcctccttgtccatcccagtacaaggtgtaatcactttcccctatatctggattgttcatctggttgttatgtattgcattaagttaatatatgcaaatataagccttgtaaatacagagaccaatgcagtccaattttgggtagatgccacattcaaaacaacaataacaaaaattaattaagtagtcacacacttaaataactcaaaagtgttaaaacagatatgaagaaatccacagcaacatttattataaaattactctttctcttccttggttttgcggcttctcgagttcataggagactttcagtttccagtgacctggaaactcaccattcctcatcaccatcctttactgtagtaacttccttttacctgaccaccctgcatagtcacagaagatgcactcctgacaagtgatcctcaaaacaggtagtaatctctttgagaagtgtgaaatgtcttttgttctccttgtcgttcccatgattgtcagctgtgaggacccttgtcattctaccctcaatcccaattctgcagggtctggggattctggggattcttttttttttttttttttttgtagttaccaatcttatatagatacaataatttttatgtgtattgatgtttattgacaaccagattttaaggtccttagaaattggagttaattattatttatcatccaagctcctttccctctgccctcttattttccaacacagtgtcttgaattttatcactttatcgtttagttattaagggtgatttggtgaaatgtagaacagactatatgaattacctcagcttatggtattatatgacataataacagaaacataaatagactatcataaatcttaactttttctttattctttgtaatattttattagtcttatccatcttgcttggattgccaagttcttctgagaattccagtaataatgttatcattctatcgagcttattattcccaactgatcttctattaagccagtatgaattagctactgtttatgagattagattatgcactttaatctctagaagaagcaaaagtaatgaatacactgaatctgccactgagaagacactttaaactgaaatgtttcattatttttctaattcctctctcttttgaatctgagtatgtttttggggtacgatacagtgtaaaggtttttgtacatcaagtcatagacttggaaataaaacacaaacaactacccttttgatgaaaatacataaacatcatagccatttagccaacttttaaatttaaaacaataaattcatgattttagttggagggtaaacatgcatctttttaaaaatcaaatgtaaacacagaatctatactcatgatgtacacacatggacataaaatattgcatatattttgggagattcaaagaccactggactccaagttaaggatatttttctctaaataaacttagtgattgaattatagaaaaccacaaactaagttattgactgaagtataggaaaagtatagtgtattaaaataaagttttggactaattaacatgattttactaatagtgacaagaggatttaccaagttctgattttttctaatgtaaaaaaaatttgttaagtaagatctttcaattagtaatttctgaaaccccctctaagtaaattaaatttttatatccttgaagaaggatgttgatcagtctcaccttatggcaagtatctcaatatatgtgatctgtcacctagtcttttctctattttattatttctgtgtttgttgagaaaaaaattatttgtatacaagtgcatgtactatttaatgtcatgtaattaaatccctttgatagaaacagttaatgttagactaataatgtttttagctactggtgaaatacttcctcctaatgcgttaaatgcaggataagatcttacttgatactaccacgggagtgtaatctctcccaatagtgtttgtttcatcgaagttggctcatttaggtagtttgagtggccagagttgtataagtatgtttggcagtggtggatggggaatggacagcaccaaaccattctttctctctgtttcgatttttctcctttgtctattgctagttgcttattcctgagatatccttcacctctctcaagaggcttggtcacttaacttcattccaactctacacctccattggtggaaatggaaagatggatgaaattttagcccctgtttatggccagcatccgactagtccttctttcaaaaatgagtaaataaaaacttattatggtatctttgaaaagttgcctgtctatgctctaggctttaactcaataaattattttaatggaaactgtgaattcaaaggaaataaaagtatggcggggaattatgcagaaaatactgtaatatatgttgataaaattttcccaagttaccacacctccagtacctagaacatagccagccatataatagacactcaataaaggtttgttgaatacatttgtttaatattcctttttactcttttcctcccctcttctttcccatgcatttctagttactcacatttataataatatattcagtacattttttgtttgcgtcaagatgcatcatgagggaatcacctgaaatttcaagtcaggatgacctggttagaacatcagttccaaaactgaatatttagagatccttttcctatctataaaattggatcacaaaatatctctcaaagggtacaaagcacagcaccaaccatatattaataataaggcactgttacataaatgtcagttcattttctcatcaccttcttaaccattttgctctctcttctgtttcaagacagtaaaatccaaatctctgtcagtaaaagtatatctgaccactctaatttaataaaatgcagcaataaattgcatgactcatttctcaattattttgcatgacttactaaaagtataagacagggtacctgagggatctgtgagggaaaggaagcaaaaatcatatacatagaagtggttggtttcaagtgattaagaataacctacgagtaggtgaaaaaaagaatcaggacaatacaatagactgcaaccaaaggtggaaaaaactgtaaaagaaatagctttagaggtctcaaatctgctttcagaatgctaggatctagttttcgtaaattagagttctcagtaaatgtaggacaagtcccagctgtactactgtagcattaacattaaaactaagccatatcttgaatctccttttctcttaaacccccagaggtttcaaaccagagaggtggtcaaaatagattcccctactacttcccctttctcaataagaagctctcatctgttgaatttccattttgaggcatttagacagctgagagagagagagagagtttaaaggagtgttcaatccatctggtctgttttttccccaaattgcggaagttatcatttcagtaacattatatgttgttaagcttatacaataagatctgattttaaaacttaccacataaccacagcaacaaatattgtgttatattgtcagaaggattgacacatagatcaattgaacagaataaagagtctagaaacatacccacacaaatatgcccaacatatttttgacaaagtttcaaaataaattcagtggaggaagagtagtgttttcaacaaatggtgctggatcaatgggacatccacggacaaacaaaatgtacatagacctagacctcatacctactacagaaattcacagattagagtgagattatttttctctttcttacagaaatcacatccatattgtctacttctgtgaagttcagtatggtagccacttgccatctatggccattggaatgtagctagcatgaattgagaggtactataaatgtaaaatacacactggactttgaagacttagtgtaaaaataatatgaaagatctcaataataattttatatgcgttgcatcttgaaatgatagtatttgggatctgtttggttaagtaaaatacagtatggatgttagttttacccatttctcattatttgtaatgtgggtatcagacaaattaaaattacctatgtggcttggatcatagttctattgctcatagctagcataatctataatttccagtttcagtttctttatatctgaatgagaaataaaagatatttgtgaagcaatctgcacatagaactaaagatttttattatttttaataaaattttacatttgtctgtccaagcatttgaatcattttgcaaccatatttattgattatttctacaacattcagtttagattttgcataaataaaaacttttgtaagtgtatgacttaataaatattaagcaggatctagtctagttacttgggaacggcaaagccctcgtcttcatggagcttacatttttcagttgataatctttatgtaactctagaaataattataactggcttaactaagttagcttttgggtacatactcaacttgtgagagcggaacctcatgggtctaccaatgagttgagtattacctaaaagtatccatcttgccctgggcattagccaatgtacttttcagaggaaatgcagggtgtttgttaatctggcaaattacctgagtaggcattggttacatggaagtctattcagagattttcctctgtactacgttgtattgactgattgcttttctgactttctccctagattctgaattcatcaagagttctaggaggggggctagcgattaaaaaaaaggacacattaggtacaatataccctactcaggtgacaggtgcactaaaatctcagaattcaccactatagaactcatttgtgtaacaaaaaaccacttccacccctaaagctattaaaattaaaaaggaaatacaaataaaaataattttaaaagtttttgctgcgtgttagcacctatgtcagtaattggtaaataataagtgtaaataaaccaactgatggatgaaatattttgagagaacattaattcaaaatttaaaccagtcaatgtcacattcaagccagattgcccaacctagtatatcatgaccattgacttcaatctttaatatggattgtctaagtcattggctggaagggagcatctgtctttgttttgtcctttgaagcaaacacttgaaatcagtttagactctcatctagacatttttgttgtttagaaatatatttaatggaatctttaggctagattcagaagagaagtaagctgtcattacccaaggattgttaaccttatcaataaattcgtagccctagggcataaagatcatttgtattgtttcagaggccttcgtgtctagtaaattttctagctattgatttttgcaaatgtacaaaattaacaattgtgagagagcttttaacaagcttgatttcagttgaaataatatgaacagtaattgttttttttctgttcattgggtaataaaagcatgtatgtaattgggaggccccaatactgttgaaggtaaatctgatgagaaacaaatattcaaagactttgtgcatgcaagagaatcaatagaggcaaaaaaaaaaacctatcttctagagagttgacaggaatctatcttatttggaaattcaaaaggtattcatgcatttctgtgttctgtgccagttacattatttatataataaatgcttttccatattgctttttatttgaaattctcaatcctataactaattattttacttagggaatataactgtatcctttacgccttctctttgattttgtcaccatgatcatcaaaagtttctccccatcaataatccaggtagactcccagccacactcaaggcatcatcaatgatctcagagtactacattggattaattactaatttttcctcattgacttctgttttccacaattcaatatttttctaattttcatttatctgcttgcttcttcctaaagaaggctcatgtaagtttgtatatgtgacaccaatatctctttaatatgtttaatttccttgacgtttctaaatagggttaatttaaatttaccttaagacccaaattatctgaatgcaagtttccaaaaaaaaaagctatatatcaggaattttctaggattcaatttcaaaaacaactttcagagtatggctaataattcaaaggtcaacaaaacacctgagcccactacaatcccagtaccatacaggtcaaaatcaagatttggcaggattgtaggatcccaacgttctttctgatgttaaaaaatatatagtaaataaagttattttttgttcaacagtattttggaagtagtaattgccacattgtatatatgtttgccattagccataaacgtgattttaccaatttattttcactacattgtgcagaattccggaaacttagataaaatattttaacacctaaatatatacacacacaaacacacacacacatgcacacacgctactcttccatgcccccaatctttctctttatctcagagttcaagtgtagccatgatttgacattacaaaatagaaagagtactgttggtttacctgtcaaattacttttatcaagccattaatggtgcttactgtgtgccagacattttttctaagcactttataaatattaactcatttaatctttataaagcctttaaatgatatatgataatattctctctttacacaaaaggaatttaagacactgaatggttaatgagcatgctgaaggccacaccattcataagtggtaaatgggaagtgactctgggccattttgttcccaagtccaagcttttaaatattttcctctgctcttactagacatgatattgctgagaaaagttttggtcccctgtgcttgaatataagtataataattaagtcatcttcttttccatgctcaaattttactctcaaaatcatttttctgtgccacacacattttaacagtttttcattatatacttgttcttctgagtagaaattgactctaaaatacagacaaaaagaaattatatttaagataaagtaaaaaaaaattctgggtgaaggatacattagaatatgtgattcaatttttacaactttcatataagtctaatttctttcaaattataaagttaaaaatctttcaaataattactagtcgaattgaagaatatgaattgaagcagtaccatttagtgcataaattcaaggacacaattttcaagttatattttctatgaacagtcctccctgaagttgtgcaaggagaaagacctaaatcgaagttagtttacctacattaaaatgcataaaataataatagaaaaataaactgaagcaaggacaataatatggattactctccagctttcataactgtgtttttaaatgttcttcagcagaaattattcaagcgttgtttcctactacagaaagaattctcaggacttctcagaaatacgtcagtttttaataataccaatacctgataggagagcagggacaatttcagtgtcattcatagatgttgtcccagaaccaagacagcatctgctccatagtaggtacttaatttgtggaatggataagcaaatcagtgatacatatcgatggtgctttttctactttaaaccacttttaaatgtgttaatatcccattaatagccttctagatttatttgagtagaaattaattcttttatttgatagactagtaaaaggcagcctagacagtttaaattgctcattcaggttcactcaatgaatacacactgaggaaaaaaaatatatatatatatatgtatgtatgtatattcagaaataaagcccagccatgactttttgttcaaggttctttgtactatattccattctttgaactgaaaagaggagaaattatagaagaagcaatgttttaaaaaatagacataaatgcataaatcaggtaacacacttttttggatacataccccacaatacctgaaaaagtagtaagcaaagtcactgatatttaatagaggaatgatctgaaaactttacaaatcaaaataactttgcgctttcaatttttagaaattaagtatttctccttactgaattcatccgtatgtagaaaattatgctgtattatttcaccataagttttaatttaggagtatgggttattatttggaaagggaaatgtttctcaaatttacttccatgttttaaagaataatcctgttaatctctttctcacatcttctcatatatcttatttcacttttaatttcctgtaagcttatcattcctgttaaattactccttgccttttctcagcgatgattgataatgatattgttgagctgtgtctctttctaacacctagactactattcaaactatatcaatcactccattatatttttaaaacctagaatatactactgagatctctcttgacctggtattcctgtatcctgccatctccgatttcccacactgagcacctttccttccttcagcatcctttccaatcagttcagaaagctgcccttaatctgctattctgttgccaaaacaacatcattaatcactttcagttaccttctttgcttcctatacatcaaaacttgagcgcttcctttaccctcagttactgctccactagagctttcttgttttaacgccccatcttcttgtcctgtgtgttttggttttcttcctcttcttacttgatgcccttgttttctttttgtgctattattaccttcattttattttctgtgcatgagcattgcaaattacaaaatcatctctttccccctttgtttactacttatttggttccggtacttcttttattctgtttgtataaatatgtactgaaagcaactgcggaaaaaacacctagatgaattgtgatcctatgtcgtcccttagctgagaaacatttcattcctgagctgtattatttgtcttttctctgaatacatttttttttcatactggctattctcctgtatattctaaacacacctttgtgtaatttaggtgaaattgttggaattataaattgtttagttagtagttgtgaatcatgcttactacagacatgtattatcaaaaatttcacaagaaggatagcgtgatactcaggcactccccacatttcctcaagccaccaaagagttttttgatggatgttcttgtttattggatgctctaaaactagacagacagtaaagattatcttttcctgctgctgaagtttaagtcatttttcccctaacttttattcacacttccaattatgaacttctaacacataaagaaaattgagatttttgtcatgcaatgctgaaacccaaactgacatgtaggaggaaggagcagcagttctgtgggtttgtcaggatgctaaggacatgttgtttttcaaattcgttattagagtcagtgagtttattaggctgaggtagaaaactgtatgctattagtcaaatttaaactaaattcctaaactcaagtcccttatagctcaaaatctgtagattcaagtaaacacttctagaaatgtcctaatatcacattgaaggagatgttcaatatgattttaatttagctgtctaagtctgtatgcaaaaaaaaaaaaaaagaaagaaagtaagtaaagcaaagcaaataataacctcaagtgccaactctaattaattggtagtatcttcttgaactaaaatgtggagaagtcccatctggcctctgtaggagagtgcaatgatctattagccatgctaatagatcagcccaggagaaggaagagaacaggattgttgattgcctgtggaccctgttgtgctagaacatttttcgtatgaaagtctgcatttcaggtgtggtaaattgtttatcagaccacttattttctgatgtgttctactttatttctgatacttgattaaaggtatgctgtgaaagtagtgtagtaataatgactcctaaaatgagtttatgcctctgaaatatagacacacgattcttcttcaataactctgcttatctgcttttagaaagtaagcccggaagtttacggactattgcaatattagattttaccatgtgtgtttattattgataatctaaaggtgaatttattaagctctacattggctaaggagccaaggctaaggattacaattaaacagctcaattatatttagcaagcaaataaaaccttaaattataaagcttccaatgatagcttaaagctcagaaatggccagttttttaaactaagcaataaatatatttttaaaatatttatttctagtgttacacagatgaatttggcacaagcttttcacttccttttgtgaaaaacttgttttgtgcatattccgtccactattttgtgtgtaatactctgtcatatcaaattcgattaattaaacaacctttatgggcatgaaccagccttggtctataacaatttgcaacttcaaagagacaaagtgattttcaaattactgcctaaaaatctatttaatatatataaataagcagaaaaaatatctatagtctttactggagaaccatgcagtagggtggggggagcatatggattttattttggcaagtgaagaaaaaagttattaagacatacaatacaataaaaaagaattcacaacatttagcaacagattggctgtgggtagcagaggctcatgaggagtcgacaacaactttctaagatattggcttagaaaacatgagtgggttgacttacatgttgttttctggagttgagaatgtttttactttgaagaacttttaacctcctctacaagactttttagctacgaggtccccttatcactatgagtaagagaggaatgcaattctgagcagatttctcctaaaactttatatagatagatagatagatagatagatagatagatagatagagatagatatagatatatatagatatagatatatacacatatacatatatatatatatatatatatacacacatatatatttttgagatggagtctcactctgttgcccaggctggagtgccgtggcacgatcttggctcactgcaacctccgcctcctgggttctagcgattctcctgcttcagcctcccaggtacctgggactacagtcgtgtgccaccatgcctggctaattttgtatttttagtagtgaaggagtttcaccatgttggccaggctggtctcgaactcctgatctcgggtgatccacctgcctcggcctcgcaaagtgctgggattacagacttgagccatcgtgcccggcctgtatttttaaaagttgtctttactgaagaggtctgttctaaacacgtattctgtgaggatttgattccatcattttcacacctgttactggcctgacatatcacaatgttttatgagaaaatagaaatgttatgaattcatttttaaattgtatatattgtacaaatttgtattaagcgaagccatggcaggatagcagtctattatttgccttctgtgcactgcagagttccagcagaggtggactttcctccagtttattagagaattttaaaatgtcaaacttcagtcaatagtttatgctgtttctagacctaatataacaaataataacctaatattgcaggtcattttcagaagcagtaaaatgctattatcctactaaaaatttttggagcacaatcacatgatatgaatttcttacacaagcatataagcaataaaaattttacagaatcttaagtgaggaaaaatttgaaaatgctaaaaaaaaaaacagcataaaaacagagatcagaaagtggctttgataattcaacatagaacagcctttagcttttgggctatggctctcaaaatatccaaaaccagttatttttggtgtgtgcgtgtgttttctgattctatttgctcccactcttccaacagcagtcccctgactcttccaatccctcagactcaaaatctttgagtcagtttcaagtattcgtccctttttgtcaattcccattaaatctgcttttgacacatctattcacttttatctttttctaagtgctatcatcctagtgtagggcttcatctccattttcttactaattattttttcaactttcaaagaatcctagaagtgtacacttattaaaatgcatttcatgctttggccctactttaaagcctatactgcattgatttgaatatacacttcggcagtcaacgtccctaaccatctgatcataagctaattattaaattggtatttgatattttaatggcacttgaaaatttcaaagtttccacagttattttattggattttctacaaaaccatctgtgccaggtagtttttattacctatctcttatccaagaggaatataagattctttgaaatttgacaacttacagactacaaatctagcaggtgttagctgtggaacttgaactcatatcctcagattctaaaacagtgtcttagtcacactacccccagtggcttccctctctatccaactctcactgtccagatcatgttccataaccagagttacagaacaattataattaccttccccatccaaaggcttactgtgccacagctcatttctagctgaaattatttcattttgagagatgaacttggacaattaattttggaaatatgaatgcaaaataacttagtaatttaacaacttcagattagtgtagggatagtttcaggagtaaattaaatgttgttgactaaggaagagaaagagaaataatgtgataaaaattattgaaaaggggtatacggtaagccttgtgagataaattctctctactcttgggcttattcgtggtagacatagagctcagaataggttttgtgagatgggaaggaggaattgtatgagctgttattgagagattaaaggttattctgggaagaatacatgtttcagaaacagcaaaaggtgggctcgattcctggttgtcactcattagtcacgtaaatttggttgtgttgtttaacctttctcaacctcagatttatcaataataaaatgggaataacaatatcaccctttctggttcctaaaatactgaacataatatatataaagagttttgtaagaaataggcactcatacataaaaaatggttttattctctaccagcatttgaccttgggcacattatttaacctctctgttcctcaatctacctcttctgtaaacatggggaaaataacagcacctacaccttgttggactgttgatgattcaaagagcagccgccatttgtgatacccttagaacagtgctcaataaatgatataaatgatgtgactaattgataaagacaaaagtcttgtgtttcccttagaaagatgatctaactatactgagactcaatttcctcatctgtaggattgggacagtaatttttcctttaatgttttgctttagtatttaatgagatacgtgacgtatttcatatgcaacaaaatgctattacaatgcaaagagttctggaatatcgaatatgttacaaaatttggggagaaattattagagtaatagagaatttttaacacctaggttggacatttaattcattgatagagttctaatttaaataagattaaaggtttaaaaatccttagttttgtctttaaattttgttatactatcttaaagtttgctaaaaaattgctgtgtctataagtttactagatcatcaccggcaggcaagaccaagattatcatctggatgagttctgtttgttagagatagtaaacacgtgatatctactcaacaccctttgagagaaactcacatttcctcttgataaatgaggtcagatattggtatcatatttaatgtcttcttcaaaagatcgcaatctaagatcactgaaggactttagaatccttgctggcttttgaataatagatttctaaacttaactttgccctgccaaatttatgtatttgttttaatggaatgtatttaagggttccatgtaccattgtgctatttttgcatgcccaggcatgctcggctgagaaggcaggtgaggactgaaatccagccctttgtaaaggcatccaagacacactcatgggattgtgtctgccctgaggaagtagagccttccttcacataaaggcagtgtccctgactaggctgtggccctggtagctgagtccaccctagaggacactttgcctctatttttcctaaacgcgttgctgatatccctcgacttacagtggggttatgttccaataaacccaccataatttgaaaatattataagtggaaaatgcatttaatatacctaatctaccaaacatcatagcttagactagcctaccttaatcatgctcagaacactgagattagcctatatttgggcaaaattatctaactcaaattctattttataataaagtgttgagtatcttttattcagtactgtacttaaagtgaaaaccagaatggttgtatggatacttgaagtgtggtttctactgaatgtgcactatttcataccattgcaaagtcaaaaaattgtaagtggaaccattgtaaatcggggattgtcattatatactttagaggtaggcctgaatgtgatatagataaaaaattgattgtatttttaaattgtatttaaaaattgaggtatgcaattcctcaaggatctagaaccagaaataccatttgacccagcaatcccattactgggtgtatactcaaaggattataaatcattctactataaagacacatgtacacgtatgtttattgcagcactattcccaagagcaaagacttagaaccaacccaaatgcccatcagtgatagactggataaagaaaatgtggcacatatacaccatggaatactacacagacattaaaaaagatgtgttcgtgtcctttgcaggaaaatggatgaagctggaaaccatcattctcatcagactaacacaggaacaggaaaacaaacaccgcatgttctcactcataagtgggagttgaacaatgagaacacatggacacagggaggagaacatcacacactggggcctgttggtgggtgaggggctatgggagggatagcattaggagaaatacctaatgtagatgatgagttgatgggtgcagcaagccaccatggcatgtgtatacctatgtaacaaacctgcatgttctgcacatgtatcccagaatttaaagtataataaaaaaaaaattgaggtctgcaacaggcaaagccactaaagaaactcagatatttttcattgtaatgttgaaaaagttatgaaatttcactaagcccgtgtctatgaagtgggaaaataacagtgatatgaatattatatgagaacatatttgtaaaatatttgttgtatgatagatacctagttttgaatgttagctatcatttttggctcttataataggttattggaaggtaggtgtgactcctatcttttaagcatgcagaatactgaagtgataaatttcatcattaattttcagacctttgacacttacttcggtgtttaaaaatattgatgtatgcagacagtttatctcctaaatatgagggaatgttatcatgatcactcaaaggatataccataactcatctgacatttaaaatgtcagtttgattgataaatgagagtcctgggtagatgaatgtgatttaaatggggtttggtttgcatacagaccaaataaataatgattcagttctgaagactggctagactagggctagggcaattaattggggtgctgggacatgatatctgagcaacagatgctaggttatgctgctttggtcaccaacaggcctgctccataacaggcaataggtacatagacctgacatttaagagcagttaatgtaggcctcaagaccttgaatggtaattaactaacatgaagaaatggaacagagtgtcaggattatctattatggcacaatttcctattctgagcatgcccagtggtgggtcagaggggaggtcaaggaacagatgggatcaggaagtaaagagagctctttccagctaggacaggcctgaggggaccgaatagacaatgcaaggcagagaatgagtcacaaggaacaaagaacctggcgaaaaccagagccacactaggtttctgatgaagctggccaccatgggcttctctcatttaagacactctctcaatccctcacgttcttcaggttggcatatgactgaacttaaaggctggagagctgcagcctacatgaggctagcaaataattaatgcattacagagcacttaaaatatgatacagaaatatacaattctgcatgtaaatccaagtattatgaaggaccaacacagaaatatataggcaataatattatgtgaggccataagataatgactttttattataataattatgcctgatctaaatgagctatgtttgatttctgtgtactttcatagctttatagccaagcatgacttctctgcccagaaaatcctgcctgatttactctttagcttctctctaatttactttctttttttgagatggagtttcactcttgtctcccaggctggagtgcaatggtgcgatctcagctcactgcaacctccacctcctgggtttaagcgattctcccgcctcagcctccagggtagctgggattacaggagtgtgccaccatgcctggctaatttttgtatttttagtagagatggggttttgccatgttaccctggctgtggtctccaaccctgacctcaggtgatccacccacctcagcctcccaaagtgctgggattacaggcgtgagccaccgctcctggccctactttacttttaccagctagggactgtttctcattcaatacatatatttgtttgtctgctaagttggatgtagtagttgagtagtggagttgaaaactgagagattgacagcagtcagttcattgaggattgtgttatcacgtgcactgggttagatagtgcaccctcaaaattcatgtcttttctggaacttcaaaaatgtggtttttgtttgcaaatggggtctttgcagatgtaattagttaagatgatgtcatattggagtggggtgggcctttaatctaacatggctgatgtccttataagaagaagagaagaaatacagagaagacacacagggagaatcccatatgacagaggctatcccgagtgacgtgtctataagccaaagaatggcaaggattgctggcaataccagaagctaagaaagaggcacggaacagactctctcctagagtattcagtgagagcatggccctgctaatactttgattttgaacttctagccaccagaactgggagacaatatgtttctcctaaaaaacaaacaaacaactacaaaccctacccagtttgtagtactttttaacagcagccgcaggaaactaatacatcatggaaatgaatttaaacatcttattatctataaagaatgtgaactgtcaaagcttactgttccattggacatcagtttcgtgtatcttttatcgtataatgcatgactagagtaataatttcaaaggacattaaaaaatacagacattttcttgaaggtacccaaacgtttgaattgtgggtcaggccaatatcagcaagggcatttgatagagtttctcacaataaccttctgtgcatgtaaataactgtatcttctcaatagatttgttattgtatatttggtcttgtagacttacccgaggaagtcagataatagcgtatttcgatatactgtgagaaaaataggtacacactaaataggagtatgaaaatacacaaagaattacccatcagcaagagcacattatatttgtttttcttgaaacacccattctttcctccttctactttgttttatttttaatctggctctcttgcttatcttcaaagttttatctcccccaataaatcttcctgccatggtgaaggttaaatgtaactcttccatcatccacgctagcacataccatatgcatagaagttataaagtccttgaagacagagactctattttacacatctttgaattcaaagccctaaaatatttgagccctgaagaagttgttaggacattttagccaccagtgcatactctagtagtgacggtagtgatgtaagtacattcctcagcttttctgaacattagtgaagaattccttttaataaagagcaagattttccattgatactcagatggacaagttttggagtattctcagagatgaaaaaggattatttttcatttgatgtacatgtattctgtgattttgtgaacacaatggatgcttgctcttttcattattattgttattcctttgggtaaggcctttatgttgtcaaaaacttctatttaaaaaaagtgaaaataataaaacattcagccatttgcagtcaattattcttgccactggttagtatatttatttaccagggttcttaattaatgttactgagaggctcaaagatctgaaaaacagcattggttccaagtggctgcatttctttcttattcatttatttattttttagaaatgaggtcttgctctgtcacttgggctgaagcgtggtggcgcgatctgctcactgaagcctcaaactcctgggctaaagtgatcctcctgtttcagcccatgcctggttaatttttttttttttctttgtagagatggcatctccctgtgttgcccaggctggtctcaaactctgggcctcaagtgatcttcccaccttggccttccaaaatgctaggagtacagatacgagccaccatgcccggctagctggctgcatttctttaaggcccagagcctcctgtggtagcatctggatttgaaatgctggctgggtgcagtggttcaaacctgcaatcccagcactttgggaggccaaagcaggtggatcacctgaggtcaggggttcaagaccagcctggccaacatggtgaaaccccatctctattaaaaatacaaaaattagctgggtgtggtggcgggcacctgtagttccagctactcaggaggccaaggcaggagaatcgcttgaatctgggaggcggaggttgcagtgagctgagattgagccactgcactccagcctgggtgacagagcaagactctgtctaaaaaaaaaaaaaaagagaaaggctcataaacattgtctatgtctaagctgcaacaatgattgatattgtgaagattattaatagtgtgggtcaactgaaggggaaggaaaacaccaaaggagaatttttccctcccaaatcataaaggcattcatttttcagagaagaagagaggaatattactttcattaaaagaataggaaaattaaaattgttgttattagccacaaatcagggtagagctgtgtgaatccatggggagaatgtaagattataagcagaaatcaaggttagttttgtcttgtacttctggaataagaaagatgatatgtaatcagaccatgtctctgataattttgttaaattagatgaagaaaatcacatggataagaaaatgtaattaaatcactaaaaataagaatgtcattgttttcactttcttttgctaagtaggaggtgaggaaaataaccttttactctgtacatgagtaattccaatatcctcttagaaatgacaattggattgtaaaatgggcttgcctttgaccatattctgaaaggataatataatgagttggcaaaagaccccatgaatagagtttatgtagaaagcaacaaaaaaacacaaatataaagaaatgcctacaaccaaaggtcagtataattgatagcaagatttcaaggggaaaaattagggtcagggaagatataaaatttctgtctccttgttttggtgatttttaatctagaaataaaacaggaatagtgaaatattccatagtatatctaaatatccatctttgtggcagggagctagaaagattcaggattattatttataaaccaatttagactaaattcaaagactgaggagatacacctaatttagaagaaacaggagctctgagacctgactttgcatattactactaatttttttcttagtgctcgttttgctgcccaggctggagtgcaatggtgcagtctctgctcactgcaacttccgcctcctgggctcaagcaattctcctgcctcagcctcctaagtagctgggattacaggcgcccaccaccacgcctggctaatttttgtatttttagtagagacagggtttcactgtgttgatcaggctggtctccatctcctgacctcaaatgatctgcctgcctcggcctcccaaagtgctgggattacaggcatgagccaccgtgcctggccagggcctttttaagtattattttttcttctaaagttactgatgctcaaatgaaacctaattttgaaaaatagaatgtttgaaagaaatagattgaatgaaaataacacagctgatatttttagcaagattcttggatatagctttagaaataaactagccagaaggagcagtatggcaagattaccttttctttatatcaattagacatattgtatcgtatgacttatttagtactgaagatgtctgtgcctttctgcagttgtttttcatctattaaaagagaaagatactatctatgctatcttttcaagatccctgtggatttgaattttcaagtgtatagataaaccttgattgatgaaaaattgatggacaaaattaattttataacaaaggtaaagaagtgagtattgccttcataatgtgccccacagcttttaacagaatttctttaaacaatatttaatgtatttttaaacaattatatatttcaatattaaatcttaagtatgtttcaggaatatcttctttaagataattgatatatcccagttttcatacgttttaaattttttacgtctacagtattatattttcttttgaaaaattgcgtaacattaaggtagtaaataaaaacaaaaatagtttaatgtctcttgtgggaaatacagttttgttttgttttgtttgtttgtttgttttgagaccgagtttcactcttgttgcccaggctggagtgcaatggcacgatctcggctctccgcaacctccacctcctgggttcaagtgattctcctgcctcagcctcccaagtagctgggattataggcaatgcactaccatgcccggctaactttgtatttttaatagaaacggggtttctccatgttggtcaggctggtcttaaactcccaaccttaggtgatccgcctgcctcggcctcccaaagttctgggattacaggcgtgagccaacgccccctgcctagttgtttttgaccacatattttttctctgaaatataaatgatttgtagcccaaaagtttaagtctgaatcaattgtctgtagtaaatgctgcaccatctacatttgttaatgagaacaatacagaactaacttgaaaactgctcaaattttcccttgcataatgctcagtttttaaaatgtattgccttctgtcttctcaatgggattgctgctttttaaattttcattaattcctaaaccatattccattgtattttttttgtacatttgctttaagtgactgtctattggaggaaaagaaagtgtaggttttctggtgaattataatagcaatatgattcctggaatgaagcagcttttctcgtttggaatgaccataaaatggcaatacacttaacagtaatacccttgtctgtgttacagcaatgggtcttaatggttttccatacgtgaacttagccgcttgcctacagagaattactaagtaactagtatattccacatgtaaaaatctccagagggcttccacacactttaatacacgctgatatacaatataaatgcaacgtatcctgaagaaaaaaaaaaatcacaaactccgtgtgtggctctcaacaagctactattttctcattagaaaaataggaaagctggccaggtacagtggctcacacttgtaatcccagcattttgggaggccaaggcaggcagattacctcaggtgaagggttcaagaccagcctggccaacaaggtgaaaccccttctctactaaaaatacaaaaaaaaattagccagtcttggtggtgggtccctgtaatcccagctacctgggaggctgaggcaggagaatcacttgaacctgggaggcagaggttgcagtgagccaagattgggccactgcactccatcctgggcgacagagggagactctatctaataataataataataataataataatagtaaagctaataactatacaatatcttacctaaatgtttaagaacacctactaataatacttaaaaataccaaaatataaaaacaaaacatacaaatgtaaagaacatacagtcagtagtacagcaaatctatttgattacttttttcaaaattctattttaatttttttgctaattttaaagcactgttattaaaagaaaatattttcaattggttttattctcattgtatcttctagaaatactagttcattttaggaaaataaaaatagtgagagaaaacttttagctctgaatatggaccatgtcccatgcctgccactttgttctagtttttgttatttaattatcacacactataaaggagttcttaccaattcttttttttcttcagaaataattgattcttcagttttttaaactgctttattgaggtatgattggcatatacaccaattctcttttataggcaatgaaattggagatcagaaaaaattgagtaacttacctaagactacaagtaagtggcagagctagaatttgaccccagacaggcttcacatacaagttcacagggccatcagctgcctgaaggcagagaccatgatttgtatccatagtatttatgtatctctcatatctaaataaaatctagtcactattcagatttaattgatattttcaattacctttgtatttttaaaagaagacacattatagaaatttgatactaaatgtaagtattcagttctttagttaaattgaagaaaagcagaaataatattctgtattaatacattagtgaaaagtcagcagctaaaatgtaagagatgtttggtgacacaagtaaaaatggattgtatactttttgccttatactacctgactctggcatttagatataacttgttccagagacctgtcataacttatatgtttcagacaagaaaagctttgggttacctgaaatagtgtagttaaaaatcaaacgctgtactcatctagagggactttgtttatccattcaaaaatacatgaacagggctttatcttggcctatttgaactccatgccagagggcagcataacatagcaaagcatgctgacctctccttatcactgcccttgttgaaaaccttgagttcttcttaatagtctggtatatagttttaaaatgttgatattttgttcacagctatatgtgatctcctaaacctttgcttcaaaatagtctatttctctgttgtggtttgcttcagggtaaaagccctctgatttcccacaatcaggacagtaatttggtaggttaataagttatgttgtgtgttagtgaaatataagtgctaaggaaaataaaagtagtagggcaagggaaatcaggaatactagggcctggaaaagagcatgaaataatgtgttatgatgagttgcactgagcaggttaaatcagaacgagacaagaagccaactagatagagaagattgttccaggttaagggaatgagtggaaaaaaggctctcaggtgagagtgtgttcaaggaatagcaattaagactgtgactactggccaggcgcagtggctcccacctgtaatcccagcatttttgggaggccgaggcgggcggatcacttgaggtcaggagttcgagaccaacctggccagtatggcgaaaccccaactctactaaacatacaaagattagccgggcgtggtggtgcacatctgtaatcccagctactcaggaggctgaggcaggagaatcccttgaaactgaaggcagaggttgcagtgagccgagatcacgccactgcactccagcctgggcaacagagtgagactccctctcaaaaaaaaaaaaaaaaaaaagactgacttttataaggaagaaagtagtaagagatcataaaatcaagaggatttggtggtacagattagagacttgtacgttttcgtttctgtgcagtagagaaagaacacagagacatttgcaaaacaatttaagaggggattccttcaatacttttctaatatccctctcccaaaggcctgtttattcttcagctaatttttactgataatttgtattttttagaaagaacgcatctctttattttatagtcatgtatcatcaaattatgtagtatataattatattagatcattacatgagcaggaatgggaacaatcacagttgattcttgctatgttccggttatctattgctgagtaacaatttattataaaacttaatagcttaaaacaccagtcactttttatagctcatgattttgtgggtcataaatttgagcgtgggtcaactgggtgattttccactctatgtggtatcaacttgatccctaaatgatactcagctggcagatgagctggtcagcagaatccaagacagctgtactcatatgtatgttgctttggtggagacgacagggagacttgggtcaactagatctattgactctagtacctacatgtggcctcttcagcatggtagacccaggattgttgaacttatcacatgggagctcagggttctagagtgaatgatacaaaagacggaaaatataagtttctggtatcttcaggcctaaccctggaaactagaacagcagctctttcactgcaggggtccccaacccctgggccacacaccggtacccatctgtggcctgtgaggaacccagctgcacagcaggaggcgagcggtgagccagtgaagcttcatctgtatttacagccacttcccattgctggcattactgcctgaaccctgcctcctgtcagatcagcaatggctttagagtctcaggagcacaaccctattgtgaactgcacatgtgagagatctaggtcgcatactctttatgaggagtatcaggcaatctagtgactgatgatgtgtcactgtctcccgtcatgcccagatgggaccgtctagttgcaggaaagaaagctcagggctcccactgattctatgatatggtgagttacataattattttattatataatacaatgtaataataataatagaaataaagtgcatgataaatgaaatagtctccaattatcttaacactatccctcacctcccccccactaaccccagtctgtgggaaaattgtcatccatcaaaccccagtctctggtgccaaaaaggctggggaccactattctactgcattctattagagcagccacagaacccacccaaattcaagggaggaaacaaagactttacctccccagtgaagaaatgtcaaaaaaattcgcagctatctttaatccgccaaagcatacgatttatctctcatagagagatttctagttaaggtttttcagcaggtcatcttgatccatagtaaatctaacaaagggaatggagagctttggttaatctaatgattcagttaaatggagatccattaaaatagattctactataattccattcattatttttcacattttttctaattttttattattcatagtgtttttgtccaatgacctttaaaatcatgaacatttaatatataggaatggcatccatctgaatatggcataattataaatgaatttactttaatatctagaaaacattcttgttcgttctctaacttttagataaaagccatcccttcttttatttaatttaactctactttaaggctttaaaaacctgactgatagggaaaaagtccaaaactgggacgctcgtgtagactatttactgcaataaatcattgtgaaaaatatgggcagtcaagtgctggatattctatttctgtttgaaccctaagaaatatcaaccgtcttctcactggcttttagcacatctgctccatttaaaactatggcagggaggtgtgtaagattgaattgattgtctcttggagtttactgtgcttctttcgaaactttgtttttcagtaaaggcaattgcttcttgagcagtactggttattccacacccactaattatcatgcagccatttagagttgaaatggtaatcaaaccaatgaaagcccaagattagcagcgttccttcttcatttctggtagagagattcatctgaatatctataaaggattttgtggtgcattctctggcagatgcagtaaaacaagtgcaacatgaactttaaaatacagctttgagttttaggttgaattttaagttgaacatatttcaaattttgcaatttaattataggagttaaatgatcttaaaggatcattctaggtctgaatagaattttaagagctagattttattaaagaaaagatatattttaagtgataaaatttatatattttgcccttcagaaattactggttgatgtttctattaaaattattaagatctaaatatacaatgatactcgagaccaattctcatttaaggaatggcatactgtatgacaggatgtgaggtgttaagagataattacatgcctagaaggtgtagtgaatcatatgaccaaaagccaagaacatccagagaccaaaattcacagtcatttcaaatatcattactccctggtgtgtgttattctacttagaaaattgcatgtttgttgtttgtaaatttagagacaaaaaatgcttaaattaattttttcatcatttctaaaaatttgctttaatatttactagcccagtaaaatgtattcaaatcataattataaatatcagggctattgagcaggggaatgtgtcaactgccattccggaccttcttctggaactaattttgattgccagcagaataaaatgcatgcaatgaatacaatgaatgtaatgctaaatcaaataatcaagtgtttatgtttatgtattttgatccccctatacatttaaaataactctgttttattagaagttctgtatttgagataaaatgcacctccctctcatttttcctggtttgtatgtgagaccacagtatttcacagtagatatccagggaaataacagacaaaagaaaggagagcaggaagaatattttaagatttattggccagcggcggtggttcacgcctgtaatcccagcactttgggaggctgaggcgggtggatcacaaggtcaggatgtcgagaccatcctggctgacacggtgaaaccccgtctctactaaaaaataaaaaaattagccaggtgtagtagcacacacctgtagtcccagctactcgggaggctgaggcaggagaatcgcttgaacctgggaggcggaggttgcagtgagcagagattgagccactgcactgcagcctgggtgacagagcaagactcgtctcaaaaagaaaaaaaaaagatttattaatttgtcttcaacaaaatactaactctgcagtgccctcaccttgattccttacttattgaggactaagcctatttttgtggattgaaatgatgttaattatctgcatccaaatacccctcataggggcgactgtgagcacgtccctctactagtaacacaatactcaggtgagagctggcaaacacaggaagactgaaaagcccgacttggaatcctgacttctacattttttaactgtgtagttctgggagtttcttaaactcgtgtgcctcagtttttccatttgcatctgtagaaagattgtaatagaaactaccttctctgttataatgattatatgagctaaagcatgaagaaatataaagcagctaaccctgagttagctctcaagaagtattttattattaacttgttaataccttcaacttataaaaatttaaaaattatgaaattttttaaattatgagatttacataaagttttcagaatagtctaatcaatacagacagaaagtagattagtagggcctggggacgtggagaaaggagagtgattcctaatgagtatggggtttcttttttgggctgacgaaaatgttttatattagaaagtggtaacagttggccaggcgcagtggctcacacctgtaatcccagcactttgggaggccaaggcaggtggatcacgaggttaggagatcaagaccatcctggccaatatggtgaaatcccgtctctactgaaaatatatatttaaaaaaaatgagctgggtgtggtagtgcgcacctgtagtcctagctgctcgggagactgaggcaggagaattgcttgaacccaggaggtggaggttgcagtgagccaagatcgcgccgctgcactccagcctggcgacagagcgagactctgtctcaaaaaaataaataaataaaggaaaaaagaaagtggtgacagttgcataactatgtgaatatactatatatcactgaattgtgcactttaaaagagtgaattttgtggtgtgtgagttatagctcaataaaatgattttaaaaaataaaatgagaaggatgagagaccggtatatttcagaatagtgcacttaaaaaatttgtttacagaacactaattgttcagcatactttctactggacattactgtatatatatatatatttagtattatataaatacattatatgataaccatatctgataaatattatcttactttatagatgatgaaactcagatcttcaatgatggaagtgacttatctattgttgagttgtaattggatcttatatatatttccctgctcccacagagcctacatttctgaaaaagaaattatgtctcttgtgataaataaacaagaaacatatcagataaaagtgttgcattgagaacaaactgagttgagatagtgagtgattgggtagttattccagcttcagtagtaaagagaatctttgctgaagaggcatgtcagctgagatatgactgtctagaggaaccagtcatgtaaaaactgaggaagaaccttccagaaggaaagaatagccagtgctaagacactgaatttcttatattttgtgtttagaaatgctagggttatagttagcaagatagcctggaaggagccttcccatgttttctcatatatgaaataactaacatggaggattattgtgaagttacaaaaatacatgaataacacctagtatagtatctcactcgtggttggtatataaaaaatattgctgttctattaattcctcaatatatagctattctatacaggtcttatgcaaaaaagaaccttagtgaacgtatttcaacttggtaagagttagttacacatgggctgacacaatcataagcatggaaaatagacaatagattgaaagcattaacaatggtagttggaacttcagaaaaacccactctttcttaatctatgatgaaggaaatggtgggttttccagtggtattgaaataaaaggaaactttttagatggtggagtaaggtatgcaaaggtagcgagcgtgtgcatctatggctggagagaaatccaaagacaagatagaatcacccttttgctctctgtgaaaactctgattttcctttcatggactaaggtctacactctccaatcatcttagttgcatacactattaattcatcaatcaagctacgtcatcctttgtgatatgttttgtttttctttcttctttttaattattgtgggtacgtaagagttgtacatatttatgaaatacatgtgatattttgatacaggcatacaatctgtaataatcaaatcaggataattggaatattcattacctcaaacatttatcatttatttgtgttgggaacattccaagtctactcctccagttaatttgaaataaacaattaattattgttaactataatcaccctattgtggtacagaacactagattttattcctactagctaactgtatttttatactcattaaacaagcccctcttcatcaccccctccccactacccttcccagcctctggtaacaatcattccactttctacctccatgagatcaattttttagctcccacatacgcgtgagaacatgcaatatttgtctttctaggttgtgttttgattagacaacctcttatttctaaaatttgcttaaattatttgagtacttgatccttcacattactgccaataaagcaaaccacagttgaaacttgatttttttctaatattttgaatgtatgctgtgtgcaaaggtaacaaagaggaatccatttaacagaaaacagattgctaatatcttcatcatttactttagattccagtctttggatatcagatttttctctggtcttcatatttatttgttttggcatcagattgcattttcttgcttggtttaaaaaaaactgtatttttttccctgtattatcggtgttgatttcctctgttcttattcttcaaattatgcagagaaatgtgtacaaagttaggaggagttaacgctatataaaataaactatctattaatatcattcggttaattttcaaagaggctgtaaatagatcatggatataggcaaataccagatgccacataaaaggaaaacctcaaagacattttttcttttattaaaaccatcaacagtaagaactgtgacagtaggttttgggtttttttattgccaaggttattatcagccctctaccctaaataagggaataaaatgatttctagtttttggacactgtgttatattattctgtaactacaggaacataatataatgctacagtcaaaagaataagcttagaaatcatctaagtttaaatttgtcactcattttctagaaggatgaccttatactatctatttaacctttctaagactcaattgccttataaataaaatgattataataaagacttcataagttgccatgagaaaagtattaagcacagtttctgagataaccaatattgataataatataataatcatcacaaaacattacctttctccttgtaaaaattataacgttaatggttttaaaaatgtaattctagtaccaaagtgaagtttgtattatgttctagttaatatatataaaaatttaaagaaaaactaaaatacatatagctgtgaaaatactcactaaaccaacatagaaaagcatttgttttgctctgtaaatctaaccttgatgattatgataataaaaataatcactgttaggttattttacttgtgattaacttctatttatgtaccctccctctattgatgtttaacaatagttcatagctatgactatttcatttcatatggctgttcctaaaatcatactgaacatctgactccatattcttaagacaacttgggacctctatctcttccctgcaacaatatttgtgagttgacaaacataaaagcctatgctttagcacgcacaagagatgtggaaaggtaccatttaaattagtaccataaattttcctttttatgtttcctaacctcatatttattgaaatgcattaaattaactcagacatctaaggatataacatttaatttacaataatctttatggttacttaattccattaaccttatctttgaaaggcgtcaaattaagaaatacagagcctgtcactttcatttattcgggggaggctgtgaactattcagatgatgtatctttgattgagggaaggaggtgcccaagaattagtcaattacgcaattaaaaaccccaaacctttcctttggtatgtttcacacaaaatctccattgctgtgctagattacactggatgatgaatcactacttgaatcacttcagttttgattattcaaagtaaaaattgaatggttggcattttcaccaatttaaaagcctcgccgggcacagcggctcacgcctgtaatcccagtactttgggaggccaaggcgggtggatcacctgaggtcaggagttccagaccagcctgatcaacatggtgaaaccctttctctactaaaaacgcaaaattagccgagcatggtggcacatgcctgtaatcccagctacttgggaggctgagacaggagaactgcttgaagctgggaggcggaggttgcagtgagcggagattgtgccattgcactccagcctgggcaacaagagtgaaactccatctcaaaaaataaaataaaataaaagccttaactttcattttctcaccagattttagcttgacaaaagctatctttaagggttgcttaggcatttcagtttgaaatgtttatgttcttgctataaaatgtgtggacatgtgtgtccaaatatatacacacaagaaattttaggtactgtcatagtgttgggatcattaagaattgtgttttcatggcgagtaaattaatttcctctgctgtgagtcactttttggtagtgtatgcatggtttaaatgaaactcactgaactgtttttgtggattcactgcttggttgttttactaccctagagagcaattaggtgtatgtggagtgtgttgaacctataaaattttacttgtgtgatgactgcaaagaaaatgaaagtagtgtcatgcaatccatgaaaactctgctgagtttctagctagtctcttaataaagtttacacaattcaaactctccaatcatactgaatatcactgaggctcttaagacttgtgaaaatcagatattttaaatttttaaattgtcatattatgtcgccaatttccatttctactctatatttatagtacttttttgcattttgagtgcacaagtcaacccgtttggccatacatagcaagacatgtattggtgagagcagcaaaaaatatgtaactgctcgtttacaacttttgaccagtagcgaggtcacactgagagtaccgctcaggagaattgagtcaagttttaggctactaaaatttgctgagctctgtgacctagggacatattcctgactccagcaggcctttgaagaaatcacgctggcaacctcacaatagatgaacaagaaaatggatgaacacaaccatattataagaagcagttatcagacgcatgggttctggagccaggctgtttgctgagttcgaatctcagtgctgctatttaatgactgtgaccttaggcaagttgcttaactctgcctctcttaattttggaaattaggaaaagaactacttacattttaggtttgttggaaagatttatatcacttaaaatgtatacagcatgtaacaattattgaattatacttaacaattattatctaggggaaaatatactgatgattttgtatattgtatatatatacacacacgtatatatcagtaactttaaatggggaagtcactaaaaaaatcataacttggtgtaaatatacttaatctgtatgccacggctagttttttgtttgtttatttttgccaagtttctttaatttctgttggccttttggggtcaccccattagcatctgcaggatagcttacttatacaggggaaagtgtctgttaccagtacagtacagtggtggtataaggaaaatctattaaatgaagtcctgggtgtttatccctataattgcataaatgtatgtttctcaggagtagtgttgtgtaagtaaatggataaaagtcatagagtgctaaagctaaatggaaacaaagttatttagtccaattcccatattttatagatgagaaaactgagaatcagaaaatggagggatttgttcaaggtcatagtagttattgtctgagatgaggaaaatatccaaatgtctgcttaaatactgagatatgcttaagttagcgttgaaaatattccatttaaaatagcaatattttcttcctcctgaacatctttgtactatttagaaaaacctagaaagcatgctggaaaactatccctttttcccttgtcaacctccaattaacacaaaagcccaaactgtacactgtcccttataaaaacaacctaaaattttgagaataacattcataatcttaaaagaaaattacctacttactacatatgctggcaatgtacttgctgggcaatcccacttgaaattcatagaaattaaacagcatttcagaacatcattccaacacctaattaatgacagggagtgactgctgactaaagaatgtgtccatgatactttcaatttatagcaaaaactcttaactattgatagcagaaatgtgatatataaggatcttgttctgtcctttcaaaagtcaaacagaaccactgtcccttaaagctgatcggcaaaggaagaagctgggagtccaaaggatttatttatacaaaatatgtatttccctaatgttcactttccaactttgattagacattttttttttttttttttttttttttttagcgatggggctgtattagtcaattctcacactgccataaagaaatacgcaagatgaggtaatttttaaagaaaagagtaattggctcaaagttccataggctgtacaggaagcataatgctggcatcttctcggcttctgggaaagcctcaggaagctcaaaatcatggtggaaatgaagggggagcaagcatgtcatgtggccagggcaggaacatgagagagagagtgggaggtgtcaaacacttttaagcaaccgtatctcatgagaatacactcaccatctgaagacagcaccaatgggatgatgataaaccactcgtgagaaatccacccgcatgctccgatcacctcccaccaggccccaccttcaacactgggaataacttaaccgggcgtgatggcaggtgcctgtaatctcagctacttgggagacagacgttgcagtgagctgagatcgttccactgcactccagcctgggtgacaagagtgaaattccgtctcaaaaacaaacaaacaaacattggggattacatttcaatatgagattatggcagggacaaatattcaaactatatcaggggtctcgctctgtctcccaggcttcagtggcaccatcgtaactcactgcagcctggaactcctgtattccggcgatcctcccacctcagcttccccagtagctaggactacagttgcgccaccacatctggctcatttttgtagaaatggggtctccttatgttgcctgctttggtctcaaactcctggccttaagtgatccgcccatctcggcctctcggagtgctgggattacagacgtgagtcactttgccctcccggactggttttatgtgtgaaggaggctgctgctgatttcatgagtaagctggagaaacacattaaggaatgatactgtccccttagttgtcaaccttcaaaataggaaacaaataatagcaaagaggtaaacgtggcagaaagcaggggtgagaaagggaacaatcagatatgcgaaacatcaaagaacaagaaatagcaacaaacccacgccagaagccagcaagaaaaggagaactgttataagtaccagtaaaaatgctgaagaatggcaataaaaaggagaaaaaagtactcacaagggaggccttgaaatgacaataatctattccaggatgaaaagaaaaggaaacactactccaaggcaaaaagaaaataaaaagtaaggaaaatcaagatagatgaatatcttcaaaaaatcagcacaatggagatagagtgtttagggaataagaaaaaaaataaaagtagacagatacagaaagaagtagcaaatgcaaggagcaatatccctattattaatgctggcaaattgtacttatatctctttccagctatatagcatgttcctgggaaatagcctaaagcactgagaattagggataggagaatgctgttactgtgagaatacgaattaagtaatgccagagaaaggctttgctgccaatataatagctgagtgatcaggccacgtcatttctgtctgatgtttcttcctgtcgaataggtaatagtattatttctctaactcaagggacattaaaaaaatattcagttaatgtatatataaatggagacaatatagacagatgtttaagaatattttggttaaaaggacagactcaaagccaaactttctgggttggaaatccaactctttcattttctctcagtactgtactgtaggactctctttttatacactttttttgtactgtcttttttatacactgactctcttttttccttagtttcttcatctgaaaaatagagttaataatagcacctacctcataggattgctgagatgagaaaattaacaaataaaaatcacttagaccagtacctatcacatagcaaggaaaatctcaactatattcattgtggtgatgttttgttaataaacttttaatatgaatgtaacatatcacattcattaatatataggaattatatttacttacattgataaaagtcctatctgacatcatcttctgttccttcattatttttcccttcttcctcactttttcagttctgtctctcttggttcattccaaaaaagggtcatttcttttttgcctcaactgcagaatgcatattatttatcaagcaattattgagcacttaccatatacaggcactgttagaaagacatctaaggcacaattttttagtgtgctgaaatagttattcattcagcaaaagaaggagctcataaaaataaaaaagaaatgctatgggtaaatataagaacatggtgatttcacttggtcctcttggatgtaaaaggaagctttaccaaaaatgttaaaataataattgatggttgcagtgctgctgaattacatcaaactttctattgtctcacatttcactttctaatttgtccgttcctagtgaaactagaagctgaaaccacatttttactcatttctcccgttatcctccccccaccactataaaaagagaacatttatgcttaagtgcttctgatgatgtgttctcagtatctcattctgttagactaatagtcctcatgccaagttaaagtggttggaaatcctagcacaccttgcctaagtgtgttttatttatcttgctacaccccgttttattgtaatagtcttgggagagccccgaaagatggcattgacctatttctataaactttaagggagcaggggacgatctccctccataacaaattccaataaatgatgaggttaaaaattatagaaaggatatttctagagaggtatttttatgtgataaattttaatatatatgtatatagtttttaaacttgaatatataaaatatatactaaacttgtatatttatatatgtattaaacttgtaccacttaaaaattcttctgtagaaatatcttttctataatttttaacctcatcatatataatgatggtaattcttcgtacttcttactcctaattgtcttagttcaattgggctgctataataaaaatatcatagactgtgtaatttataaacaacgaagatttattgctgcagaactgtttctgcagcccaggaaatccaagatcaaaatgttggcagatttggtgtctggtgagggttctgtctgcttcacagatggtgccttcttcctttaccctcacatactggaagggcaaacaagttcccttggcctcttttataagggcactaatcccattcatgagggctccgcttatatgacctaatcaccttcttaaaaccctacctcttaatactgtggcattggggattatgtttctacatatgaattttggagggacacaaatattcaacccatagcactaatgaaatacagcatttttagagagcaatgtctactattttacaggcagcttgctactcgtgatgacaatacttcttcgatctagtatcccagcattgttccattaacaatgtatgcatcttaccaatgtaatgttcagtaaatattttgcatattttaagaggaatctgttgtggttttttttttttttttttttttttttttgagacggggtctcactctgccacccaggctgaagtgcattggcttaatcacagctcactgcagccttgccctcccagaccacaggtgcgtgccaccacgcctggctgatttaaaaaagaaattatttgtagagacaaggtctcactacgttgctcaggctggtcttgaacttctgggctcaaccacccctctggccttggccttccaaagtgctgggattacaggcatgagccaccaaacccagcctgattttttataatacaaaataatatacactcactgccaaaagtagaatacagaaaaacacaataaaggtaatagttgcctataattttgctattcaggaataaccagtgttacctgtttggcacagacattcctattgagaactatataatgatagctaatatttactagcacttggtacatacccatgtttcaattaccttatatgttaaatattatccatttatgcctgaaaataattttataatataagtactgttattagaccattttaaaaatgtgaaaattggtgcaataacaagatgcattaacttgttcagggtcacaatgccattataaaatggagccggaattctaaaccaggcattcaggctccagagcctaggtttttaaccactaagaataatacattttagtattttagcatacacatagttttggaagctgcttaattcacttaatatatcatatggttttccaacgtagttaaatattccataagaatgtgatttttttatgtctgcatataaatatattaataggatgtaccagaattgttttcatttctatttcatgaatatttagtttgcttctaatttttcacaatagaaatgatctagcatattttataaaatttttgagcagatgtacaagtatttagagactagtatttgtttaaataacacgtgttggacgttagtggggtatatatcaatgtgaaacatgaagtagatgtttgctttgtggtaactatgttccaggaacagtgctaggaagcactagggactggaaagctgtaaaaaagccagtctttctgttcttaaatatcttataatctaatggagagagaaacctgtagaatagtgcgtttcagtagaagcaagcttagtgtactgagaaatgaaaggcagatgatgaagtttggacaatggatggaaactatcttatcaagagttggggttataagaatgacagtaggtgatatgaagaaactagtgttttaagaagatatatgtggcagcattatagacatatggggatttagaacaggattatacctactgaactggacttattttatttctagaaattttgtgataataaataccatacattatatgttgttctcatataggagacgtaatatatgggtatgccattaatcaaaggctgattttaagtggaagaattcgttctgttggtttacagtcccagttataaattaatgggcttaccacgtagttgttcccagatcttggaagtattgaagttttttaaaaattaattaatttatttttaactgacaaataatagttgtacatatttaccgagtacaacgtgatgtttttgatctatgtgtatgttgtagaaagagtcagtcgagctgactaacatatctatcacctcaccaacttatcattttttgtagcgagaacattaaaaaatctattcttttagcaattttgaaacctataatacattatttttaactgtggtcactgtgaggtgttgaatgttttaggaaattctcagataatctcagggccaagtgttaagcagatcattctctgagactggatcttctgcagtatgtctgcgaacttttttatttcactctaagcctttgttgttgccttcaggggttactgactcacgtttaactcaaggctgactgagttagatatataccgcctatagttgatgggttttgttgccagaaatattcttttgcttatcagtggggaaggtttttgcttctactgctggatttaaaggtgtccctcaagattccattactcagttcattgagaaaagcttaaagctaacggaggggagttctgagctctgtttgatgaaggaggctgggtaaaataatagctcccaagttggctcaagttcttccagatgttcatgtttatgtaaaacttaacacttagagatattccatgttgtaagatgtctgtgcaaaagttccttatatcaaattctaaaatgatttttggtcatcaggtgcaaaaattaacactaatcatctaaaataaccaaccagatagattttcattctgtttgacttttgaaagcaaatacccctatgatattgagtgagtgttttattgtttgattttccttcaaacttgctgtaaccctatgggaaagatatgcaatcaaaataaaagaacagtatccaaaaataaatgggtcatgaagaattgtgcttaaaatcgttaagtaaacagacacacaccacagtgatgagattgtagaaactggaaaaaatgctgccagctgaagagctgcaaagagtttggcttttcatgaacttagttactgaaatgaaagttcctccctaggagagaagccaaaatcatagcacggtttgaataaaagtacacctttccaaagttactgcagaacaattatggccgggatcctttactcttattgagaaagctcggtaacctcttattttaaattgacttccattgagcaataatgcctccctgcttgcactgtaaggtactttattgggtaatgtgtttacaagctggtctcatttttctttttgtaataggagatgggtagcttactgctatttggaggtgactccaggaaacatgattttcaagatggtcattttaaaaaattgtgattattgggaataataactctagagacaagatttaatggacttacttccaatttattcagtatgtcaccaggttattgcagttctagttttaaatctgtacattcgaagtctacgttgttccctgatgtactgtatatttaggtttgtactactacatataggtgctaggtttagctccaactctcagcaggagcctaacctctcagaacaattattgtagccagatctttggtggccctactacttgctttttttttaaccactactatttctttaaaatcaaagatatggcaaacatattactaaaaggaagaaaacccatcttcaacaacattatggtgtttttcacttcaaaggcttattttgtatgcatcatttgatttaatttcctccaaagccttgggaaatgtgagtgattatcatcttattattgttgttgataaatagtagctactatttatttagcactaactctgtatctggaactgtggtaaacaccttgtagtggaaactaacaatagcctcaggaggctggaattgatattatccccattttacagacaacgaaatgtgatataaataacataacgtgccaagattatgcagctagtacataggagaactggaattcaagccctagttaaattgctttgacttcggagcctgagtgttgattgtctatggcatgttgccaagctattttatagctggaaagcctggtgatgctaaaagtttaaataccttgccctaggtcataaaattagttcccaatgccttccaactgaaatcccaaacattttttattacactttgttgtccgcaggactgctacccgcttatatggtactctttgaaaattaaacaaagaggcatcctccccacttcccaaatccacagaatagccaattttgaaagaaagcacgcttttttttcagtatgactctgctttattggaggatcacagggatggctggggggaatgtgggtatgatactcaagcacctttgtgcaaggtgcaatgcccagagccataaggagtggccccagttgtgctcatttaaaggaatagttggacaattctagataatattaagggagatatccaaaagagtttcctataagtatgtgctcttaagagctgtaaggaagtaaaattttgaccccattagttacatttctaacatgatctaacatcttcccttcactgccaacgaaaatgtttaagaagatataatctgacagcagttatgctaaaactcccctgaagccaaaatgtgtcacttctcaaaatgaccctcatcttcacaagcccttgaagaggagttgaggattatttatgaactaggttttaacctaaggtgatacattgtgctgcagttgttactgagcttagggatcattttgtctattcatttcaggttaccattaggttctttttcaaaatcaattccttttaattatacagctaccctgggcatatattaaatgtcttacaacattgatacgctttcccctgaagtactgacaaagtaatagatttaatgcgcaaccacaggcataaaaacccacacacagtgtaagcatacaatgagtacactgatactcacaaaagaggtttaaaaaaatgtctgtaactggggatgtggtggtgtgagggccccatgaatttttagcttggaggatatcttatcgtaccgatgaaccctgaggatatgcatgaaaacaagctcctactcacaactttttttgcctgaatggtaagtttgtctgcagggcttggtctgattgatttgaaggagcatggtctagaaagtggttctcaaactgttggataacagaatcacctggggggtctacctaaatgtgcaaaggcctaagtcttatcactgctttaatgaatgtaggtctctgggtttataatgagctcgtcagttgattctgatgagcacctaatttgataacaacatgtcaatgggtacagattctcaaacttggctgttcattagaattgcttgagtctcatttctagagactctgatttcattgatatgaagtgcagtttgggcactgggtttttttcttaaagaagttcttcaggggattctaatatcagcaaagttggagaaccacgggtctaggggcctcgctacccgatgtgttgtccaaagaccaccagcagcagcagcagccgcagcagccccagggaacttattggaaatgcagaatctcaggtcccacctaaaattaccgaatcagaacccgtattttaccaagatacccaggtggtttgtatgcccattaactcttgacacacacttgtttagggagtcaggtagagctggattcttaagcacttccggttagttggatgactgaaaaacctctctgagctccaatctcctcacctgtaaaacgagtttaaggaataacattaccaatattgcaggtttgctgagaagattcttgaatgcaatacctgaaactcagtttaattcctagaacagtgaaaagcctcattaaatatgaagtcccggccaggcgctgtggctcacgcctgtaatcccagcactttgggaggccgaggcaggcggatcacctgaggtcgggagtccgagaccagcctgaccaacatggagaaaccccgtctctactaaaaatacaaaattagctgggcgtggtggcgcatggtagtcccagctgctccggaggctgaggcaggagaatcgcttgaacccgggaggcagaggttgcggtgagccgagatcacgccattgcactccaacctgggcaacaagagcaaaactccgtcatatatatatatatttatatatatatatagtccctactagaagagagtccctgtgaacctttttttacactagtggccccagagctaatgaggccaagccccaccaatgatcgtcgtcacagacattcctgtttttctgatatttataaaggttccttttaggtatgaggtgatttttattcaaaagaacaaatgttcccagatgccaagtgtcttccgctaaaaggataaatgatcagaaagcaatccttagctacagtgtccttgaaggtgcattgtggaatcttgcactgttgtgcaattgtgaacaacttcatcagacagtactgcgtatttgtactgtgttatccttaatttttccctttagatcttaatttgttatttatttcttccctggccaagagctaatttctttacagaaactcatatatagggttccttttttcctcctcaagtcagtaacttctgcaattaactacttttttcttaatttctctaactttggcccaactaaatattttcccatcattcctgttttgccgccctcgagctaggacatggaacttacttgttcggaaaagcttctatctgattgaaagggcatgctaattctttctttatagtgtaattgtttcacatttaagagggaaggagaaacgcctaaagtaataccacagaagaaataccctcaactaatctttctaagcagtacgacaatgagtaatgattacagttaattaagttaggcaacctccatttccattcacttagtagcactgctaattatactcatgctacaaggtttctttagttcttctgtaatttggatgcagtactctttgtagacaagggaatacggtacgattaatgagatttttcccaccaacacctcctgttctctccaaatgaaatttccgcatctgaaaattgagagtagggaacggagaaaaaaaaaatcagtcacattttaacttactgccagcacggtccatgcttataattgccaaatattttatattaaagaaaacaaggtgtgggtttttttttttgtttgaaaccttgtaaaattgtggcttacgtaaaaatgaaataagtatagaacatggctttttaaaaatatcagtggcaatgataatgacactttatattgtatgcttttggtcgcattaaataaacatatgttgagcacatactgtttgccgggcactggatctactaaaaaaaaaaaaaaaaaaaaaaaaaaaaaaagcaaaccttaactgtaactctggatttcttttacatgaacttcaatcattttaacaacttactctaaagaaaaccaagaactgcagctctacttggttatattgttaatgaagtccttggaaaaatttagtttatatgctttgatcagatggggattgacatacttaagagttttatttttaatctgaaaatccacttcaatcttatgctctgggtaaacagtcattacagaagcctgacacaattctgttttttcaagaagcaggattcaaggtttaacttcaaatacaaatttgagtaagttatacggattattccttttaattctttttttaaaacacagggtttatgtggatgaagtttcgttcttaatctccatttgccttaagaattaacttctgcattgtggtttagattgagtttaagattgtttcagattttaaaatgtatttttaaaggtgtgtctggaggaagatatttgtatgtcaagcactgttggttttcataggaagttcaaatgtgttttcagcagcactggacgtttttagagttattttcttctcctagcatcacacaggtgcgcaactttataggtccagtctcttctttttgcttccttctctgcttctttttctttttcactaacaccagtttgcataaatgagtgcactgtcgagttcacgtgaataccagacaaaaatacaggtgtcttcataataatcagctcctctaagtctactttccagtttctgcttcagactcagataaatcctatataaagcagacgacacagttatttctagaggaactgaggttactgattagaagggaacgtaatcaggtagattgagccggtgagggaagaaaccattgctgtgagaggggagtgtttgcaaaatgctgtctgtgaagctgaatctgtgagaacacctcactattcacggcaaccggagtggaagaaacaggtgcaaaaagattgtgtgtttgtctgcttttgtgaggctggtcagagattctgtgcctgctttatctgtgcttggctatgactctacctccaggtttaccataccccatagaatgtgtaagagaaaagtaccaacagggaaatcagcaaaaagctttcctatgaaggtgtgtagccagcctccgcagaatttgaaatgtctgaggtctcatctggtgagtaaaagctgcagataaatgcaacagccattcagaagaatgataaattccacaagcattcagaagcaggcttccctaaaggtgactcttttggtcaatttgcaacccctgggatatatttggatgactcctgttccatatgcctttctataaaagttaaattggggcttttgttgtgaggaagggaagaaaggggtttgacaccaataacctataggataatgcaaatcactgaaataagaaggaacccatattctactttttgggttgtggctttaatgaactttgtcttcaggtatctaaaattatttctagtatgaagaaaagaaaaaaatatccagaccttaatctataaacgataatatttttacctcaaattaaatttctaaggacgtagactacattcataaactcattagaaaactaatgagggatttttatattaacaatagaaaaacctgtgtttcacatatatatatgggcttatttatgcatatatgtacatatgaatatgtgtatgtgtatatatatacatacacatatacactcacatttttaagaagtttttaatcaaagaagacggaaataacaaggatccttgtgaatagtaatttagacatgtttagacaagcacaacttattaggaagcaaactgggacaattgtaaacagtaattccaggctgcctaattatctgaaatatctcagaatgattttagaggttaaacacttattattaaatggtagcttctaaataaagtgaaaaggtgtagtgatttatcaggtttttttttaattatagaatatcctaaaattctaaattagcatatattctgttgccaatatatactgtcagtatatttgaagtatattaatttctaaattatgttacttttattaaaattccaaagagtttctgacttggacaagttttctctatctttaggaagacagctagtttttttttcaggggggtgagctaaaagagttaggataaagtacaccgcattaaattaaaaacgtgtgttgggaataaagacaatccaaagttaaaagtctatttggatctcaaattttcccataacttgatttgtaagaaaagttacccttttgcaagtcttctctctcatttggtctggactaagtggttgtcatttctcacttacagattgctgttttactaatctctttataaatatattttttaattttatatctgtattttattcatcagattgtcctggaagtacagaggccagttgatggtttatgagttcaagctgagccgaatatagctaagccctgtcttgcctgacatttcatcaaaagctgtgttgatttgcaatgtttaccgacctatttattgaaccttcacagcttgaactatgccaccaagctcgctgacattgctgagattatctctaaatgcatgtacaaactaaggaggaaattgaaaaataagttaaaaacaatcatccgtctatttattaaattatgcttatagagtccttgatttatgtatttgtttgattgttctccgcaaagccccatgacctgatttttctttgatcttcccacacactcttggaagacgatagattagaacagtggttctcactcttccttgagtgggcatcagattcacctggagggctggttaaaccacagcttgctggatgccacccccagagtttctgattcagtccttctgaagtggggccccaacctctgcatttttaacagattttttaggagatgctgatgctgctagattactaagaacagaaaatgagtgttctaatacaaagagcagaaaataattgttcttaatctagttacctgtgttctctttatgcgttgtttagtttacactgtacaagaaaataaacacatatcctcacaaaattgaagcatatattctactaaagattaatatattaaaatattgaataaaatattaaatatctatgttaggaaattgtattcctgctgaaactggcagtaaaattacttaaattacttagcagtaaaattactgttgacaaaagtaaacaattggtcattaggtctcaaatacgtaaaacctcaattttttttttttttcttgagacggagtctcgctctgtcacccaggctagagtgcaatggcacgatctcgggtcactgcaacctccacctcccatgttcaagtgattctcctgcctcagcctcccaaaaccctcaatttttaattactcctttgattcttattctctgcgatttctccctatgtaaagttttagtctattatatttttagtaaaatgaaagcatgatccatgagataagcacttgaatctatactatacatcaaagtctccccttttgggccattaaaactaagatgttttccaacttaccttaccaaagccacagtttgaaaactgaaactatgaaaaaactggatattttgcttaattataatgcttcgtaaaaaattagaacgtctttaaaaatgttaacaactaaagtcaaacattcaaaaattataacctttgctataaagttatatgttcattcattgtagtcactttcttttagtaaaatgtaagcttttgatgtattctaatggggcgcaacgtttagattaaatgtttaatatggataattgacttttaatgaaatttaatctagatgttcgtaactgagagttaggggtgaacatgcctttaaggatgtagacatttttattacaattattttctccatgtttttgattaaacatatcaaggaaatatatattattttttatttaacttttctaatgtattaatttttggccagtcctacctatcacatgcttcagcaataatcagagctttgatgacaatgtcacattattttaattcagatgttattccagtttgataagatggagctgatctttagaaaacaagtgtaccatatttctaatctttaaatattatattgaattatttcagcctggctcacttgccagtttttcccttttgttttcatgattaaagcaactgataattattaacatagataagatttatgacattaatttatggttttcttcataaaaataaagccttttttttttttttttttttttttttagatggactttcgctcttgttgcccaggctggagtgcaatggcgagatttaggctcaccgcaacctccgcctcttgggttcaagcaattctcctgcctcagcctcccgagtagctgggattacaggcatgcaccaccacaccaagctaattttgtatttttaggagagacggagtttctccatgttggtcaggctggtctcgaactcctgacctcaggtgagccacctgcctctgcctcccaaagtgctgggattacaggcgtgagccaccgcacccagccaataaatccattcttaacggaattttagagcataaatctgagaaaagaaactaaggctgtacgtactaggtctcctatacaccttgtctttcatcattgaatccttagtagttaatacctgcttggaatgtaatgggaattcaataaattaattaaataaatggatgagtgaatcctacagacaattttgccaaggaagaaaataaagacagggtatttttatttctttcggttttttttttttttttttttttttttttttttttcagacagagtctccctctattcgcccaggctggagtgcagtggcacgatctcggctcactgcaacctccgcccttcaggttcaagtgattctcctgcgtcagcctcccgaatagctgggactacaggcgcctgccaccacgcccagctaatgtttgtatttttagtagagccgaggtttcaccatgttggccaggcttgtttctaactcctgacctcgtgattcgcatgccttggcctcccaaagtgctggggttacaggcgtgagccaccgtgcctggccagggtatttttatttttattttatttttttgagacagcgtctccctctgtcgcccaggctgaagtgcaatggcactatctgggctcactgcaacctccgcctcctgggttcaagcaattcttctgcctcagcctcccaagtaactgggatataagcattcgccactacgcccagctaatttttttgtatttttattagagacagggtttcaccatgttggccaagctggtctctaactcctgtcctcaagtgatccgcccacctcggcctcccaaagtgttgggattataggagtgactcacaacgcccagccttttatttcaatttttactgctgtttgttttcttccaaatgaataataaatatgacattttattctgatagctattagattatgaattgaatgtgagaacaaaaggcattctggttttcgtttgttttaatattggactgaaaaaaaaaaaaaaaaactcatttgaaccgggcgtggtggctcatacctgtaatcccagcaatttgggaggctgaggtgtacagatcacttgaggtcaggagtttgagaccagcctggccaacatggcgaaaccctgtctctcctaaaaatacaaaaattagccaggttgtggtggcaggttcctgaaatcccagctactcgggaggctgaggcaggagaattgcttgaacccgggaggcggaggttgcattgaaccgagatcgcacccctgcactccagcctgggcgacagaggtagattctgtctcaaaaaaaaacaaaagaaagtagaacaaaaactcatttgagactttcaggatacaataatttgtttaccttttcagttttctgattcctcatggtgaaggaatcatatctcttcagtgacacacaaacacacacaggatatatacagttatgtgttaacaccagggatacattctgatcaatccatactaaggtaatttcatcgttgtgtgaatgtcacagagtgtacttacactaacctacgtggtatagcgtagtgcagacctaggttgtatggtatatcctatttctgtttggctacaaacctgtacagcatgtgactgtactgaatactgtaggcaactgtagcacaatggtaaatatttcaatgtctaaaacatatctaaccattagaaggtacagtaaaaatcccgtgttataatcaaatgggaccactgcggtatatgcagtttatcattgactgaaacatccttatgcagttcctatcttttcttttgggccacacttggaattgaaatggaagctggagaaaggaagaacatgaaataaactgatgtttttccagccagtcaaaactcagcctctgtgttttagagaaagcattcggaacacagttgagagagggagagaaagagaagtggaaggtttagagggaggtccccgcttgtttttatctcttcaagcagctctaaatttgtccaaagcagaaaaagttgtacttcgcttcactctatattcaagactcaaaccaagattaaacatgaacctgtgggaaagttctttttaattaaactcatgttatttgaaaatacattatggtaagatatttttttgaaagttaagagtcagattttgtctgcataatgaaaagtgactaaggagtgctgaagttatcactcaattatcaggaaatctagaaaaattactttccaataaaaatgagcatcaatgatttctaccacagccttttggttaaagagtaatgaggagaaattctgccatgtaattaaagataatgaaattatcaatcaaggctaagctgcattaggttctttgactaaaataattttatacaattttaagtataaattaagttaaaatatatacattgagtgtgtgcattaatgtagacagtgccaaatattcaacaaaattatttcaccacctttgatttttgttttttgttttttgtttgtttgtttgtttgtttttgagacggagtctcactctgtcacccaggctggagctcactggtgcaatctcggctccctgcaacctccacctccaggctcaagcaattctcctgcctgagcctcctcagtaactgggattacaggcatgcaccaccgtgcctgactaatttttatatttttaggagagacggggtttcaccctgttggccaggctggtctcgaactcctgacctcaagtgatctgcccatctcggcctcccaaagtgttgagattacaggcatgaaccaccatggccggctgatttaagcacctttggaatcataattattaatcataaatgaaaccaaactaaaaataaagtataccacatgtgagaacattccaatgaataaaatcatttctgtgtgagctagcctgctgttcaaatttgtttatgcttatgcttcagataatgtttacaaaagtactgacagattcctagaagcacaatttctaaacacttaccttggaggtttctagggccctaaaaatatttctagtcatttcaaaaaaccacaaaacaactacaaaaaatgtacttctcccaaaggccatacgtagcacatgcaaaaagagattctgcagagcattttggaacgtaagtagcttttgtggttctgtgtctcaaattagcctgttcttaaaagtctgcaaattaaaaaagaatgataggccaggcgtggtggctcacgcctgtaatcccaacattttgagaggccaaggtgggcggattacttgaggtcaggatgtcgagacctgcctggccaacatggtgaaaccccgtctctaccaaaaatacaaaaaaattaaccagacatggtggcatgcgcctgtagtcccagctactagggaggctgaggcaggagaatcacttgaacctgggaggcggaggtttcggtgagccaagatagtgccactgcactccagcctgagagacagaggaagactccgtctcaataaaaaaaaaaaaaagaatgataaattgagtcaaaattataaaaattcaacagacgctggcacagatttgagatttgaggaaccagtaaaaaacgtagtacatattgataaatggcaatgtggtgtcaagatattaaaattggttttaatcttattaaccaacataaaatatggaaaacttatacatttaagtgggcccagaaaaaagtttgcaaatagcattccaaaaatcgatagaataatgtgaatgctttgttttctaatcttcacataatagggttggactagatgatttataagatccagtatatagcccctaataataacccctttaaaaagtctttttttttttttttttttttttttttgagagagtcatgctctgtcacccaggctggagtgcagtggcacgatctcagctcactgcaacctccgcctccctgtttcaagcgattctcctgcctcagcctcccgagtagctgggattataggcacacgccaccacacctggctaatttttgtatttttagtagagacggggtttcgccacgttggccaggctggtcttgaactcctgacctcaggtgatccgcctgcctcggcctcccaaagtgctgggattacaggcgtgagccactgtgcctggcctaaaaagtgtttcaatagaggagagaaataaacaagatcctgaagggataagaagatgtaaaagttgttgctgatgttctgccgcatatttctttccccacccgagttccatgcagtatcttgctttgctataaacaggagtaagccagaaatatgaggggttgtgttaatgtcaccagaagcgacctttaactacgaggggatggaagtacttgaaaaaagcacgcagccatctcatcttctggtgcataattctgaggcatgttcctcacagcttctcagagattcaccagcaggactgagccccagaataatgtgctcattgacacacctttgattgcctccttacctttcctaatctcactttctctttcctctcacttgtactttttgtaatcaattgccagataaactgtgtacctgcacctcaaatccttgcctcagtgtctgtctggggagaatctaaagtaacacagaaggttagcgagaaattgtttcacatgcttaaacaaaacagggcaaaggcacttaagatgttagagggagggagggtgaggaaactcacacgggatgacttcactctgtttagtacctaaaagtgaacaggaggtggatcgaaaggaaacagttagtgaacctgcaaatcaataggaagggttagaagactggttatgggagatggaccagatagcccagtaagtgaagaaaaggctcatggaacagcagagaaaatggacatatatcatccatatattttgtttccatcctagtctaatttacccttagatactacaataatcccccaactcatctttgccacttgtgcttttgtccttttctactcactccatactctacatggcctaaaggttgagcttttaaaaacataaaccaggttgtgtcaatctctgattaaaattcgttactgctctgatgcgtccaatatctttaccaagaaccacacttcatttttcttccttttcttctgcagtcttgctgcatttcagccatactgacctgctgccatttctcaaatgccagtctctgtactgctattgcctcttcctggaatgctctcctcatccatcctctaactgccttgatcgccactgaatatacactaacatgcatattgtcagtcacgcagtagtagcttaatatgtatttgcggaataaactaatgggaaagagtaacagcatggttcagttgatggtggataatagtgatttactgagtcacaaacaacatcatctgatgccttagcaaagaggagtaggtattggagaaagaagacaatacttacaattctttacttccttgagctcattttatatgtgtgtgtgtgtatatatatatataaaacatatatatgacatatatgacatatttttgacatatgtcatgttatatgcctccttctctattatatatacaatgtgttcaaggaagtaaagatgttcaataaagttcaaggaagtaaagtctaaggtgtctttgtatgtagcactgaagtgatcagtcagagtccaggcttggctggatatcgaacagtggatgtgtgaagtagaagtgagtgatgccaattttaaagataatgagcagtttagtaggcaaggatttagtgtcagatatggaggttgtggttggcagtagtagtagttgtactgggaagctcttccacagtggtgaagaagcatgctgagaaaggccaaaaagtcaaagtagcatcttgctgtggataaggagattggcataaatggagtaaaagttgagggtgaaaagtgatgtgagacaaggacaaatagacaagttggcttggctaatgtaatacccatgatgtaagaaaagctatgctgagatagctaggctaattccaagggacttttgaggggagcatatcaggttatcacatgccaaaaatgtttcatttcagagactttagtcttctcattaattttatcgctaatccattcattttcaaaatgtatttcaggatttcacatcaggtcgactttaaatcttttgttcagatgaacgtttcttttcctaggactgagtaagacagtttgtcctatccagtgcttaagagtaaagcaagcttatgttgccactgcaggcaggattattaaataaccaattactattcagactgtgtcacatccctttaaattactcaagcaagagtcttggccgggcgcggtggctcacgcctgtaatcccagcactttgggaggccgaggcgggcggatcacgaggtcaggagatcgagaccatcctggctaacacggtgaaaccccgtctccactaaaaatacaaaaaattagccgggcgtggtagcgggcgcctgtagtcccagctactcgggaggctgaggcaggagaatggcgtgaacccgggaggcggagcttgcagtgagccgagatcgcgccactgcactccagcctgggcgacagagcgagactccgtctcaaaaaaaaaaaaaaaagagtcttgaacttgttcagcctgaacacatctgatatcctcagccaagtataggatgtaaattagatagcttctggctttactagtgtggaatcaggcatgctttttccccttaggactccatgactaatgacctgaattgtctacatttcaagactagtcagatctctaatggtgaacctatttcattgtttctgcttctgttttgtcccgtagtatatgagacaaaggatatttttatgtgcaaattgcaacaagttgagatactcctttaaaaatggattttctttccatagttgattagcgtatggtaccagatttcctagaaatgtttttatgataaaagtttcaggttctcgatgatgcaaggaaattacagacgttaggtaatgatttgtaatcaggacacatgagaggagttgtaactttactgcttaccctgtggctttgagaatcattaatcctcaatgggcctcagttttcatatctaaaaatactgctttttaggttcagttacttcaagggtcaaatgagataaaatatatgtgttataacaataaaatgtaataataaatatgaggtaccttttcccccagctttattgaggtataattgacaaatggcgattgggtatattcaaggtgtacaatatgatgatttgatacatatacattctgaaatgattatcacaatcaagttaattaatatatccttcacctcacatagttgccattataattttttatgatgagaacacttaagatctctcttagcaaatttcaagtaacaatagagtactattaactatagtcaacatgctgtacattagatccccagagcttactcatcttataactgagagtttctatccttcgaccagcatttccccatttttttccatccccagttactggctaccactgttccactttgctttgatgagcttaacttctttagataaaatgagttactttttgaaaaacaagtttaattggcaaaattgtatatatgtattgtgtacattatgttaaaaaatatatatatatataatgtggcctggtgaaattgagctataatagtagtgtttttaatgactatgtagccgaaagttccaaggctttcagctgattgactatgtaattcttaaatctagtagagtatcttctgatttgagagcagtatgaatcctggcagaaaactatgctggctatacacttttaagggtttgaactgtgttactttatctatatactctgcataaaatattctctctcctatacaggccagctcatttattcttgcttttctagtctgattccccctttctggaatctttttcctccatcgacttttggttctaaagcattcccatcttcaaaaattcaattcaagtcctagttaccacaacactttctctaacggcttgaaacacctcttttttctatgaacttttgttccacatagttatttctacccagttatcgacataattgcttgctaattatttcctgtggattaactttgattccataactttttaacttttttatagatttcctgagagcacgtgctgtgctttatatttctttgtaaatacctcagtagctctgcattttttttctctgtcatccaggatggagtgcagtggtcgatcatggctgactgaacccttgacctcctgagttcaagtgatcctcccacctcagcctcccgagtagctgggactaccagcgctccaccacacccagctaattttcgtactttttgtagagatggggttttgccttatcactcaggctgatctcaaactcccgagctcaggtgacccacctgcctcagcttcccaaagtgctgggattacaggtgtgagccactgtgcccggccagccctgtggttttttgtcgttgttttggtttttttgagactgggtttcactctgtctcgcaggctgcagtgcagtggcaccatctcggctcactgcaacctctgcctcctgggttcaagcgatttttctgcctcagcctcccgaatagcagggattactggtgcacgccaccatgcctggccaatttttgtatttttagtagagatgggtttcaccatgtgggccaggctggtctcgaactgctgacctcaggtgatcctctgtcctcggcctcccaaagtgctgggattacaggcatgagccgccgtgctcacccagctctgcatttttgaatcattgtttataaaacattgagcatcaaataatatgtttttaaatattgtataagtaatactgtgttcatagaaacgttttcttttggccgggcgcagtggctcacgcctgtaatcccagcactttgggaggccggcggatcacgaggtcaggagatcgagaccatcctggctaacacagtgatacaaaccccgtatctactaaaaatacaaaaaattagccgggcgtggttgcgggcgcctgtagtcccagctactcaggaggctgaggcaggagaatggcgtgaacccaggaggcggagcttgcagtgagccgagaccacgccactgagctccagcctgggccacagagcgagactccatctcgaaaaaaaaaaaaagaaatgttgtcttttacaaccatatatttatcatatttatcagtagtttaggcgtggtcttgaaaaggaacctccccctaccataatgcctttcgtttaggagatccccccattacacttgtggcttacattgaaagaaaaaaaaaattatccccttgtctatggtagaaaactgtgtcattcgtggctttgactgcatcacaatccattttagctttttgtcacttaacttgagaagaaatgaaatatatgtggagtgtatatccctgaagaaagtaaaggaccagctgttatcactatagagtttgtattgttgctgaaaataatctggttatgtttgtaaggattaagtagtttattcaacagatgtttggtagtaaacatgaatgagaaaaggcttgttcttatcatattcattatgaatgctgaggttgtgctttactacatgttttcaatgctcatcctaactgaaagtatgaagtggaaggatcaatttctgaatatttaaatgagatgttgattgccttgttataaacattaacaattttcctaagtgtttgctcttgagatagagcatctttaggagaactttatgatttgggctggcagatttagccaaattaacaggaatgtaccttcctaatgtgatcattcatccctaggaacaggaatctgggaacactgaggctatacttctgtatggtgagttatcaaagtgttaaacacaggcactattaatgaagcacagattctactttcagagtaaagctagtgttactatctatgaaaaaatattattatttatgttttcataataataacttctacattatatttattttcaactttttagaataaatctgagctaggaggttcttattttagttgttttccttctatcgtttttcattacgctcttgttgtttgatttggtctcacattttaaaaagcttactgtataagaaagttttatcttcaaaataatgagcactagaggttactataaatggaaatacaaaatgtggatttactaaagtgttttgacttttacctacacatttcttggagtaatttttaagttgaattttaagaattattttgctggccgggcacggtggtggctcacacctgtaatatcagcactttgggagtctgaggcaggcggatcacctgaggtcaggagttcgagaccagcctggccaacatggtgaaaccccgtctctactaaaaatacaaaatttagccaggcgtggtggtgggcatctgtaatctcagctactcgggaggctgagacaggagaatcgcttgaacccgggaggtggaggctgcagtaagccaagaacatgccactgcactccagcctgggcaaaaaagtgagattctgtctcaaaaaaaaaaaaaaataataataatattgccatatattcgaattacacaataataccagattgaggatattagaggaaaacaaatattatattttcaatatttctaaagtattttttgtcttggttatttttatggaattatattacatttatagtataacctaactcttaaccattttgaggggtaagtttaaagattaacttatcactattgacgaattattcatctacccgtggaagtgtctgcagtttatccatttcgaaacatctaatattacatgagaatttacttttctcattagattacataaacatcatgttaaaatgcaatatgtacatgtgacaactgatcttttgggaaaaaaaaagtccatgaatcactcctgtaacatttggaattaaattcattaaccaaaataatatcatgcttcatcttttatattttgcttccttagcatctggttcttagtctgtctaattacattataatggctctgtgttacaacagttgctagaagatttttttgggggggggggcaagaatgatgattttgcctcatattttggaatacctgctttgcaaatgtctttcctatatactagagccagaaggaaacaaatctaatgtttcttattcgtttgaaatttattgggagaccaacttcattcaaagatcaagaactctaaaatttttacatcaaaaactatttttttccccaattactttgttgagtactgcacttccagtcttgagatcgaaagtaatgttgaggccgggcacggtggctcatgcctgtaatcccagcactttgggcggctgaggcgtgcggatcacctgaggtcaggagtttgagaccagcctggccaacatggtgaaaccccgtctctactaaaaatacaaagaaaattagccaggcatggtggcgggcgcctgttattccagctactagggaggctgaggcaggagaatctcttgaacttgggaggcagaggtcgcagtgagccgagattgagccgctgcactccagcctgggcgacaagagcaaaattccatctcaaaaaaaaaaaaaaaagtaatgtttagccttgaaattgctaatacaatggacggtatccagcatatttcttttttgtatgcaattaatatttttactttatttattttatttatttttttgagatggagtctcactgttgcccaaactggagtgcaatggcgcagtcttggctcactgcaacctctgcctcccaggttcaagtgattctcctgtgtcagcctcccaaagtgctgggattacaggcacgagccaccgcgcctggccgatattcttactttaacagttgaataagttaatattttattggagctatgcaattagttaatttcatatagtgaatatattaatatcttatgaggaagagccacaattttagtataataatgtagataattataactcaggaggactatgatcaagatacactgtaaggatccttcaccatattttaccaaaatattattttatagttcaaagggggataggacggtacacttccaattatgctgcaaatttgttattattactgaaaaagtctattttcttcttcaagcaattaactattaatgtctttaatgtcaataaaccgcatagcgttatagactctctttgaatttctctgaattagaaataatttttgaataggaagattaacacagactcattttaattctgtaatggtagaaataattaatctccccttatctgtagggatacgtgttctaagacccctggtggatgcctgaaactgtggataataccaaaccttatgtatatattatgtttcttatatacatacacatataacaaagtttaatatatacattaggaaccataagagattaacaacaataactaatattagaacaattataacaatatactgtgataaaagttatgtgaatgtggtctctatctctcaaaatatcttattgtactgtactcatctatttttggactgcagttgatcatgggtaaccaaaaccatggataagaggcagactactgtgtattttattatatgcatgttatatataatatatgtaatatatattatttgtatccatttggcaaacaattgagatttttatttcatgtagttgctttttgtactaatatagttatatggttgttggaattatgtcattaaaacacattaagccaagcatgctggctcacgcctgtaatcccagcactttgggaggccgaggcaggtgaatcacttgaggtcaggagtttgagaccagcctggccaacatggtgaaaccccggtctctactaaaaatagaaaaaaaatcagccgggcgtggtggcaggcacctgtaatcccagttacttgggaggctgagtcaggagaatcccttgaaccccagaggcagaggttgcagtgagccaacactatgccatcgcactcgaatcgagcctgggcaacaagaatgaaacttcgtctcaaaaaagaaaaacacacacgcacattaagagaaattatgtttgtcgttttgtttattctctaatttgattaaattgaacagaataataagtcacgtatggcaataccaaatattatgctaaaaataaaacactgaaagctgaaaaattcaatcacagattattggtttatatgacatcaggcttcaggctgataggagacgtccaaatgataggcttattttgttccataagtattgggcacggttcttagtataacaaagaaataaccgtggattgagaaattgttttcctcaccttcattacttaatagtagaattcccttcaatgtgccacttaatattccttgatgtcagagccttccatttgagcagctgaaattattgacacccctctcattcttcaaggatgtgttgtagggactgctgagtttctgtagaggtttaagctttgtgggaaatgatgttgagtatgacaatgttatcagcaacattgtcaacttcatggttgcctattgacttagggaaaagtggagaaaaatatgacaattgctgagtgcttagttgcagtagctttttaattttaattttcaagcatctgtgtataagcaaaagaatatacacagtgccacgtatcatacccattgacaagtttatcagattttaattataataaatattttaattaaaatgttttttaaaattattaattttaatgaacatcaaatttctctcttgtgatgtgataagggcagtgatagaactgacatttgaacgttcaatacacaattcggccaccattcaataggcttggattgtgcccatggttctgttctgtactaaagacacaaagatgaacaaataaaaactctgcccttgaagccatacagtcaaaatacagtgtccttaatctggggtccatgaaccatgataggaaaaaaattacatctttattttcactaacctgtaactgaaaatttgcatttctttccctttatgaagataagcaacacagaacggtattagcaatatctgtgaatttattaccaatatttttatatcaaatcctagttgttttggatatcttgaaaaatcatatgttaatatataccagtggttagtatactaatcactacttttaatttgtattaattattatgcttataactaatgtattaatagcatataatagtattatattcagtattttacaattgcaatataattaatttcctttgttttttatatgcttttagttttcattttgcacatttgaaaacagtctgggaagtgttccatatgcttcaccagatgccaaagggatccatagcacaaaaatagttaaggaccccatatctagaagagacacaggcaagtacatataataccatggtacagaaaaataacagaggcttgtaccatatgctgtgaaattgggcataactctctcagtccaaaggactgaagaggaaatttttgatttggccttgaagcacacgtgattgtttctctagtggtaacatgtgagagagggcattctaaaaaagagaaaagtaggtgcaaagtcgaagtcacccggtgagagcttgcagggtcagggaacaaagagcagtgtactgtggcaatgtaaacaaacaaagaaacaaacaaaaaaaccttttttttttttaaaccattgttgggcatcctattctgttttcatttgtcaatgtgcaagattgcatttgccaagcagtttttattaatcattagtgagtagaaactattctctggctttttattttaactgactatatttcatatagacaacaggcaagaaacatcaaagaagagatcaaagctctgcattagcgttttaaatctcattatttcaaacaacatctacctgtaaggggaaaaaaaaccgtaaatctttttcacctccccacttcgtcgttgttttcagacaacgatcagtcacttgtctggcctgtgggccataattggctacctgtaaatctcaagagactgaaccatgtaactggaataattttttttttttagcactacactacacggctgttattcagttataatggtcaaggaagctttagatgctgtacttaggctttctaaatgtgtgctttatttggctttctgggagaaatgtcaatgtgaatttccagattataatgaagttcatccagaaaaacaactatgatttaaagaagcagaagaaacaaaccggactgaaaaaatacactaatagactaagatagtgttttcaaactgttctagattaagacaattttgcttgcattctttgttgagcaagaaggttcacatcttaacttttccaataatcctctttaagaccgttattattggccttgatttcaaacagaaaccagcagggacctgaatggacactactagttaaccagtctaaagccttatgttaaagctaaacagttatctctaattttcaaaacaatagcatgagtatatattaaaaagtggttgatctagggaacttaatattccaggatgaactatactaaatgaaaatatgtaacacattaaaatgtggtcaaacaagccatctatagctgatagtacaaattgcatatatatctactttattaaaattttaactggccaataaaattgatactataattctaaatataatttttatttaagattacaagttttaaaattgaacagacttaggtttaaatcacttctctctcttcttctttttttttttttttccgaaacggagtttcactcttgttgcccaggctggagtgcaacggcgcgatctcggctcactgcaacctccacctcccaggttcaagcaattctcctgcctcagcctcatgagtagttggccctccaccatgcctggataattttttgtatttgtagtagagacgaggtttcaccatgttggccaggctggtctcaaactcctgacctcaggtaatccgccctcctgggcctcacaaagggctgggattacaggggtgagccaccgcggccagccaaaatcacttcttaaatgtgttattctgggcccagcacggtggatcatgcctgtaatcccagcactttggcaggctgaggcggtccgatcacctgagatcaggagtttgagccagcctggccaacatagtgaaaccccgtctgtactaaaaatacaaaaattagccggcctggtggcacatgcctttaatcccagctactcgggggtgctgaggcaaaagaatcccttgaaaccgagaggcagaggttacagtgagccaagatcatgccactgcactacagcctaggtgacaggtgacagagggatacttcgtctcaaaaaacagaagacaaacaacagcaacagaaaatgtattattttgtattagcttagctcagcatgtttgcttgtatgtaaagtagaactgaaaaaaaaacctaataaaattaaaatagggattaaatgcactaaaatttgttatttgttctacgtatttcaaaaatggtagtcattctaattatttattttagttaatggaaacattagttttattgttagtaaaacaatatattgttgatacaatatctagcataattttgcctcttaatgaatcaatcagcttgtcctttttattcatattttccttaattataaaccaattttttaaaagtcataatctatcagtagaaatggtactttattaaattcggagaatagtatcatttaaggaaaaatattcctagataaaaaaatatacagtactatgaaattcacatgcatttaaagtcattattaatttataaagaatctggaattataacctgaactaaataattctatttttttgctgaatgaatgaataaataaatgaatctttaggaacttgactgtcctccactaaagttaatgactccttcaacatattacacattctgttgctttgttctcatttctattataaatgcaagtttgcttttttgcatatggaatcaccatctataaattcatagtcaatatggggttttaaataatcattaccatggaaattatacttaagtattagttctgttggttggagattatgaatttctaaatttaaaaaaatgctgatttaaatttattatttccagtgccctatcctatttttttttcatatctgctactgccttcctaataaacttgtttagaaatatatcttgacagcaaatggtattttattcctaccctcttggcatgtattatacacaaactttgttttttgttgttgttgctgttttttttgtgtgtgttgggggggggggggggacagagcttcgctcttgttgccgaggctggagtgcaatgatgccatctcggctcactgcaacctccgcctcctgagttaaagagattcttctgcctcagcctcccgagtagctgggattacaggcatccgccaccacagccagctaatttttgtatttttagtagagacggggtttcaccatgttggccaggctggtcttgaactcctgacctcaggtgatccgcccacctctgcctccgaaagtgctgggattacaggcgttgagtcactgcacccggccttaaacttcttttcgaaagctttctcttttatacgtattgagttaattcctgtttgcgctgtgacatctacctgactaccacaaaaccttacagccacttgcttctgtaaatggaaaactgccctagcatgacaggatgtgggctgaagacataaccatatcgaaaacagcaagctttttggaaatctgtgtttggccctcaatttcatggcctcaagtaacttgataattttctatttctaatgcctgtcagccacaacaggatctgataaccaactaaaatctctgttggaagtgaataggggaaaataggtgaaatcacatttgatgttgtaagggaagcttattgaagacagtggatgtgttcaaaacattatgaggcaaataatgaggaggaaaaaatatgaggaaatagatcaccaggaagccctgtgaatgtttatgttttggctttacatgattactagtaattaaattagtgaaaaatattttatggaatattcaatatgcccttaatgtacaatttgctgagcaataagaatataagactacaaacttcctcttattggaatatacattttattttttattttgttgtacttcaatagctttagggtttcaagtggtttttgcttacgtgtatgaattgtataatggtgaagtccgggattttattgagccgtcacccgagtagtgtacgttgtacccaatatgtagttttttatccctcattcccaccccctccacttctgagtctctgaagtcccttatatcactctgtatgcctttgcatactcataagttagttcccattataagtgagaacacacagtatttgattttccatttctgagttacttcacttagaataataacctccagttccatccaagttgctgcagaagacgttatttcattgtttatatggctgagtagtattctatggtgtgtgtgtgtgtgtgtgtgtgtgtgtggtgtgtgtatctcacattttctttatccactctaaggtggattctatatctttgcgattgtgaattgtgctgcaataaacatatgtatgcaggtgcctttttcatatagtgacttatttttattttggtagatatgcagtattaggattcgtggattgaatggtatacctacttctagttctttgagaaatctccatactgttttccagagaggtattaatttacacttccaccagcagtatataagtgttctctttttatcttgtccatgccaacgtttattgttttttgactttttaataatggccattctggctaagataaggaagtatctcattgtggttttaatttgcattcccctgatgattagtgatgttaagtattttttcatgtatttgttgatcatttgtatatcttcttttgagaaatgtatattcttgtcgtttccaagctttttaaagagattgttttcttcttgctgatttgcttgagttctttgtaggttgtagatattggtcagttgtcagatgcagtttgcaaatatttttttccattctgtcggttttctgtttacgttgatggttatttcttttgctgtgcagaagctttttagtttacttagatcccatttgtttatttttatttttgttgcatttgcttttgaggtcttggtcataaattctttacctaggccaatgtccaggagagtttttcctaggttttctttgaggagttttatggtttcaggtcttagacttaagtctttaatcctccttgagctaatttttgtatatggtaggagatagggatccagtttcattcttccacatgtggttgtcccattttcccagcaccatttattgaataggctgtcctttgcccaatttatgtttttgtatgctttgttgaaggtaaattggttttaagtatttggcttcacttctggcttctctattctattccaatggtctatgtaggaatagacgttttaaaatgttgcaattggaactatggataaacctttaagataataatttttagccactgttcattttaactgggggagaatgggaaaaaagtttaatcactttaactaaatcagttactttgtttacatatatttagctctgataattacaaggagattcacttttgagtttgaaaagtagattctaatgcctaatgagagttttcacattgtctttgagaataaacactattttaggttattactgatatttcagtttgtgaactaataattcagcttgtgaattttacccaattttataaattcacttttcttacttgggcgtctgtgtttgaattaagaatggttaaatgtttctttcatacgcgtccgtgtgaagagaccaccaaacaggctttgtgtgagccataaagctgtttatttcacctgggtgcaggtgggctgagtccgaaaagagagtcagcgaagggagataggggtggggccgttttataggatttgggtagataaaggaaaaaggggggttgttctctggcaggcaggagtgggggtcacaaggtactcagtgggggagcttttgagccaggatgagccaggagaaggaatttcacaagacaatgtcatcagttaaggcaggaacaggccattttcacttcttttgtggtggaatgtcatcagttaaggcaggaaccggcaatctggatgtgtacgtgcagatcacaggggatatgatggcttagcttgggctcagaggcctgacagtttctacatgatagtctctttattcaaaagaaacacactacattattattttaaaacgttattaacatatttttctgtgctagaaaattttaagaaacaaacatttaagtgggctaactcatttagaatttgtaaaatatgacaaaactctaggagaaagtttacctgtgaaaggagtctgttatgtaaatcaatagtgtaattatgattcaataaattatataaattcctaatgagcactatcaatttttcttttgctaaaatctactgatattctacttttaaattactctcacttttagtgttcccctgaggacttatcagtttggaacacttaaatttgagttatcgttctgttcttaggaaaaatatatttaaagaaataatgatttattatgctagatttatcattatttttatttgggattgcttttaatgtgcatgagttacaaagacataactgtgagatcccattttctataatttttttagtgattccatacatttctgagtttacattttttaaaaattatagctcaaaaaatgcaagacataagtaagtatgcttttctaatgggtcatttcagtcgcgtccgtgtgaagagaccaccaaacaggctttgtgtgagcaataaagctttttaatcacctgggtgcaggcgggctgagtccgaaaagagagtcagggaagggagataggggtggggccgttttataagctttcggtaggtaaaggaaaattacaaagaggggttgttctctggtgggcaggagtgggggtcacaaggtgctcagtgggggagctttttgagccaggatgagccaggagaaggaatttcacaaggtaatgtcatcagttaaggcaggaacaggccatttccacttcttttgtggtggaatgtcatcagttaaggcaggaacaggccattttcacttcttttgtgattcttcagttacttcaggccatctgggcgtatacatgcaggtcacaggggatatgatggcttagcttgggctcagaggcctgacaggtcagttatggaaacacatcaaagtactctagaaccaaaagttaatttttgaaagaaattaacttaatgtacagattttataggaattctggacgtatttaatatcgtgatgctagaagaatgtcttaccaattaatattactggatttcttgttgtgtatcaagttgtaacagataccttaatcacctaccagataggctcattcctgtgtccattccaatagaactctgattttgctcagatctccatcctcacaatttcacagtagtcttcagtaaagaaatgagactaccccttgtcacagaaaatgaatcatactttaattcgcttatatgcttccataccacttgccatttacgggtttaagtatgtgcatgagatgcaacctgaaccaattaaacatcaagtaagtttttcttgccaatgaaaagcgttcacttaacaactaaatgcttgagcatttatatgtagatatatatgtacatatatacgatgtaaaatgtagaatgcccactgattcatttataatttgatatgtattagtatgtatttaataagctcttataagactgaatggactctggatatgaaataatataccaagtatggtaacacatggtaacacatggacaaattgtagtggaatcaataaagcattcagagaaatacatcattattatttattctcccactttaggaagatttcaatcctagcattaaatgtaacactgtcttttttaaaataaaacctccatttctaagaagttatttgatgagaaaatatttgagaggttatctgatgagaaaatttgaagaaaaaaattttaactgtacaaccagttaattagaactttgtcaaataacattgcctttaattcccagaaatccaatacattatgctcagtgaactgtaacacctgagtttttaaagtggaatacttaaaaaaaaaaaaaaacaaaaaaaaccagccttctggggtaatatctcctctttggaagtttctttttttccaaaattatacttaaaggacgattcttttaatgaataaattttagagttatctcaaggaataaatagaggaaatattattttatttcaaagagaagaatgtctattgtggcaaacaacaaacctgaaataaataaaacgtgacagtctatgaagtccgtgagcctaaagaacaatggttattttactgtcttagaaaagtttaggaagtttggatttgaattcaaactttaatttgaacttataacgtcaacttgaaatcatttggaataaacattgaaaaccttctttgaaagttttatcaaaggagaaagaatttgaataccaagaggatggaaaggttaacttctgttatctgaaatatcttcaattgccttgagccagtttaaaaataaacaagcttactgatatagagggaaacaagtctaccttgtgaatataatttaaaaaagagaaaaaatgtcatttaccatattatttacttcctcattttagaaaagggaataaacatttattaattatgcactatcaggcactacgcattcaacacacactatcacattagttcttcccaaaagccatttgaagtagtttttctttctttttttttcttcttttcttttctttttttgagagatggagtcttgctctgttgcccaggctggagtgcagtggcacgatctctgcccgctgcaacctccgcctccctggttcaagcgattctcctgccttagcttcccaagtagctgggactacaggcatgtgccaccacgcccagctaatttctgtattttttagtagagacggggtttcactatacgttggccaggctggtctcgaactcctgacctcaggtgatccgcgtgcctcggcctcccaaagtgctgagattatgggcgtgagccaccgcacctggcctgaagtagtttctcttatgcccattcatcaatatagataatagggttcagagagatttttcagtaatttacacaagattttacagctcctaggtggcagaatctagacttaaatttagatctgatccaaaaactgtattttcctagctttagtaggacattaacaatacaagtgcctctttaatatgcttaggaatgcatttttatttatatgtaaaaccaaataaacaaataaacgctgcgattgccaacaaagtatctttaatgtaagaatttcaaatgctgtgcaaaattatcctcactaactgctcttctggtcccacacttgtcacatggctacagaatatactatatctctctttctcttccagcagcttcctagtggccacacagggaccatcctatccataggttatagttgctttttaaaatctaggcatttcctaggagctgatgagattttagaagaggtgatattaacatgaaaaaattggtaggggtagatttctgagatattctatccaaattcaggagttttacaattataatttagttaaatattgtacttgatacacatataattccattaatacactctgagttaattgattttcatttattactcatggttttcattttttgttttttgttttttgagacggagttttgctcttgtcacccaggctagagggcaactgtgcaatcttggctcactgcaatctccgcctcctgggttcaagcgattctcctgcctcagcttcccgagtatctgggatgacaggcatgcgccaccatccctgactaattttatattagtagtacagatggggtttcgccattttggtcaggctggtctcgaactcctggcctcaggtgatccacctgcctctgcctcccaaagtgctgggattacaagcgtgagccaccgtgcccggcttcatcgtttccatctttaacaaagaaatacatgatatttaaagaaattttaaaagtataattttaaaacagagggaaagccacccacagctaaaacatcctttctctaaacagtttattttttccttaataaagttagatattttttggtgtctaactttgcattgtaaaacttaatcattacttacattgctccataatattctgtcatatggttttgctgtagaactgatactgagttggtgtgccccttgtaagaatagtccagtcattttaaaccagcatctgtttggattgggccagcatctcttccagtgtccttgagtcaacaatgccttaatggtttctacatatatttttaaatattacctatagatagttcattctttatcttcttatgttgcgtgtcagagctattacgttagagctattatgtaattttggcttttttatatatcattgcaattaacactcttgtccattaatctgtttgggttttttttgttctctagttgacatcttatgacaaatcaataggtgtgtaaactatgtcgatttttcttggctgtaaaaaacagtaaagaatgcttacagtacacgttgtctttatgaaaggaagttccatttgaagaaataattaaaaaacaatctgttttgcctttaatgggcaagatgaagagttaatgccactatatactaaatatcttaatctcgacatgaaatgagaactattctagagatatgtttctagatagatatggaacaaccacaagttcatacaaaatttgttaattttaagtcatattttggacttttattaactcatatggagtgacgaacaaatccttaattaatagcagacatatcatcatctctggatgcttatctatcagagatcagcaagaaaacaaacacacggcatgctaaaatgggtaaactatgagaggcaataagaaacaatattcaaagttgtgggtagggttaagggaaactaatgaatactgtgatgcaggtggcccctggctctggggacaatagaaagacataacccaccactaggcctaaaaaaggtaaaatgtgagggagcaattactagatcctggaaatggaggagctgaggagagaccgcccaacaagagctgtgacctttgaaaaagaaatacagccacttacaacctgagctcttgcaggtgtaaaaagtagaggtttctctccaaagaaactttcctacccatctaaatgggaataaatagtaacgtctcctagaagcaaaatttattaaacgacctgtgctaacattcttaaatatctactagccgtaataaagaaatcaatgtactttatgttcttagttcccacaatttagcctaaatatttgccctggcatgcttatactggtccaagcacgcattaggtcatagcctgttcctcttccttatttgaaggtgtttttacctttctcagcaagtaacttgtggaaacaagttacttcctccttcctttgttctcctctgcctttgtctcttttgaaaagttctaagttgctagccaatcgggacaaatacagaatgtgtggtcctgttccagccaatggaaaccggacacagcagtagagtaaacatgtcaggttataaatgaccctgtctcctttgttcggtgtactctcgtggcaaaactgctggcgagtgtaccctttctgcaaaaagtaaaaatgaccttgctgagagagttaaatttatgttcgagtgctgtttctttgcagcaccagggaacaagcattctgtttctaaataaacattgtttacatataacacagggaaggagcagtaaagaggatacagcctccacacacctttgaaaagcactcaagttataagtctttagtgccgtgctacttaagagaagggcttgggtttgccctaggttatggttatgctaagctcctcacaatttttataccacatccaatgacagcagacccattcaagcagaattggtttacaccatgagaaactataattcaaagaaagttagcaacttgctcctaggcatacccatattaaccaatattattcagtatatttatatacagcgcagagaacaacaattttaatggcattgtcagtattctttgatagataagcaccagttttgtgatatttaaaaagctattataggtgttgaggcttcgttttctcttccgctaaactgggatgaatctttctgaacagaacaaatacatatattctgtcctatctgggaaagattcaattatgtgttgcagtccaaatatgctgtattatatttacaggtaaaatcatactagcagaccagagtaaataactaggtaagttcctcttagtgacaataaaaagttatattgctcagatagtgctaatagaactttctgcaatagaaatgttctgtatctatcatgaccaatatagtagccaatagccatatgtgactattgagcccttaaaatgttactggtggggctgggcatggtggctcacacctgtaatcccagcactttgggaggctgaggggatgaattacctgaggtcaggagtttgagaccagcctggccagcatgatgaaaccccgtctctactaaaaatacaaaaattagccgggcgtggtggccagtgcctgtaatctcagctgcttgggaggctgaggcaggagaattgcttgagcctgggaggcagaggttgcagtgagcccagatcacaccactgccctccaggctgggcgacagagtgagtgagactctgtctcaaaaaaaaaaaaaaaaaaaaaagagtctcatgtataaatactgttttggacacacatcgttagaagacagtaaaggtgacactgtaaaaattttaaatcattaataactaattaccaccccaatgtaaatttcactgatcactgtcagtattaattctacagtaacatctgtatcaacaaatttccatatccctttcactggtattagggaggagatatcaaaagatggtaaacccagagcataaacttgtagatgtttggtaatgaaatgggactggacctatttgagattgtttcacaattttaaatcagggattggttatatagagctttctttcttgtattttttttctgcttctatgtggaaccatctagaatgcttgtgttattgctttaaggaaagtttttaaagggattcttaaaaaatacagtattttcctagcatatctctgaggtgataaaagtctaagaatcatagtttatgtgttttattcagatccagctcattctctcaactgttaaataagattcttgagaacaggtattattttttacattctggaggatccttatagcacatagaactatactgagaccaaactcgataatttcttataattttgattctgctggtaaaacacaaacttgatattgaaaatttgaatattctggacattataatttgcttatgaatcattctgtttgatattcccagataccctttgctaaggcagctcagaagggaaatatttgttcttgcagtttgtgtggttacgtggtttgttgtaaactttccctttgacctaaagaaatattgtccctttggccaggtgcggtggctcgcgcctataatcccagcactttgggaggctgaggcgagtaaatcgcttgaggccaggagttcgagaccagcctggcccacatggtgaaaccccatctctactaaaaatacaaacgattagccaggtgtggtggtgcatgcttgtaatcccagctacttgggaggctgaggcaggagaatctttgaatctgggaggcagaggttgcagtgagccaagatggtgccattgcactccagcctgggtgacaagagcaaaactctgtctcaaaaaaataaaaaaaaaaaaagtcgtctccaaaatatagcatggcttcaaacagatcgcattatctctctgaaacattttaacttatagatttaaaaatatatcttacagaaacattatttagaaacacaactttagtttacctacctctataaaatctccagagccagagtaaagattaaaatatgcattcacaaagagctttttaaatcatctctttattttacatctcccaaaaattctggaagaaggccgggcgcggtggctcacgccagtaatcccagcactttgggaggccaaggtgggtggatcacgaggtcaggagatcgagaccatcctggctaacatggtgaaaccccgtctctactaaaaatacaaaaagttagccgggcgtggtggcaggcgcctgtagacccagctactctggaggctgaggcaggagaatggcgtgagcccaagaggcggaggttgcagtgagccgagatcgcaccactgcactccagcctgggtgacagagcgagactccatctcaaaaaaaaaaaaaaaaaaaaaaaaaaaattctggaagaagtagtgtttgatttagcactcttaagggacaccatacatttgatgttgttaaaatagcttacaggtttatattagatttctattatctatcctgtcttcatttttggatatcatgtaaatatgttagataaataaattgagattgatttctaacaatttgtatgcattttgagatggcttagaaaacattcaatgcagaagttgatactgtgactcataccaagcatgctcctttgaatataagaagacaaaacttctgaaatgaggcaaatttaaaatatgacaggtttatattctggaggtagtgctaatagcccccaaagctactgatacatgagtttgtacactacagaaaagagaattaaaaagaaagtttgcacttcattgcagttccactcttgattattaatataaatcgaatgtaaattagtgaacttcctgtaaacacaacatgagcaatgactaatattgatagtctactcttaggttcccttgaaattgttctgcttgtctgataaaaccataacaagggacataaaaagattgttttaatatgttgagtgaattgtacatgaaaaattacattcccataaaaggctgatctatgaatgctaacatttatgttgttcgctatttctgtgtacttataccacccgtgtgagtgttgcttgatttggcagaagtaatggaattttaaaaagcagttgcatgagcaaatatatctattttccatatgtacatatttgcaatttagcaagtcatttgcttttgtttaaatattcaaaacgttgtcatatgtgtgttgtacacattaagattttatgtattttaaaaattatatatgtgtattgatatatttgtatgcacacagagcaaagcttgaaatagcaaaaggtaattacatgcatattgtatatactactttgtattaaaaatgtagtttattgatctttaaaaccaaatttgtttttgtaataaagagtaataaaaaattagattatgattttttcctttcaaatatgtttagaatttaaaaatcttggctacccctttaacctaaaatctgtcttacttacctcaaaatgcccttgatcccaactacatgaaatttcttgctctttcttttttttctttttttttttttttgagatggagtcttgctctgtcgccctgcctggagtgcaatggcacaatctcagctcactgcaacttccacctcccaggttcaagcgattctccctcctcagcctcccgagtagctgggattactggtgactgccacgatgcccagctaattttttgtatttttaggagagatggggtttcatcatgttggccaggctggtcttgaactcctgacctcaggtgatccacctgccatggactcccaaagtgctgggattacaggcgtgagccaccgcgcccggccttcttgctctttcttaaatatattatgtaattttatatagcacatgcatatttctgtgtctgggacacccttcctccctgtatctactccttgctatttcttctagcctaatttagatccctctttctatgtttctctggctcttttttcttaagatttgtcaagtcatgctgaaactattgccttgtctttctcaaaagactgtaagttcattgatggcagaacttaagtgtatattagtatctcccagaactcactcagggcctggcatagagtagcataaaagtcagtgttgttgaatgaatgaagaaatgaatagaatgataactgctttctacaggtgattgtgtgtaaacaaaaagtcatatgattaatccttctatgagcaaaagttggctaagattacaattaaatctgaatgtgaagattgtactgcagaaaaaaaaaacacacattttcaatagttatgtcacaaaagcaacccatcatgatacaagtagaatctgcgaacatttcttttaaggtgcgtataaactcatggcaaatttatgttgcattagtctttttgatgttctgaactttcataaaaaatcaacatagtatttaaaatctattgtaaaatatattgaagtttcattgattttattaaaatattaattcctttattttatatctatatataatataatcaaatctgaaaactcatcaagattatggcctagttgattacgtcttagttattatttgtacttttccatagccaacatgcaataaaagtttggttctagataattttttcctgttttacaccgtttcaatcaaaacatgttacaattgagtaaaacaatctgaaccagccttttataatacatgaattccaagattgtactaatttgtcagtttttgcttactgtctttcacaatgatttggagacataataaaatgtgcaaccaaattagtgaaaataaagaagtatatatataattgactagagccaaatatgtatgcagatttaaggcctgatgttttagttcactcattcaaattttaattaaaaacagtacataaaaggtgctagttgctggagtatgatgagaaaacaaaacagtaacaagacaaaaactgaaaacatgtttcctatccttgtgaaacttactgtcaatggggaagacgtacactcagtcagagaaatgttaatatttacaacgtaaagtaatatttacattatctgtattcagaaagagaatatcaaggaagcctattctgttggagtaaagagcttatgcaaagctcctattgtgggaaggaacagaaaggccagggtaactatatctaagaagaaaattacaggctgggcacagtggctcacgcctgtaatcccaacactttgggaggccgaggcgggtggatcacctgaggtcaggagttcgagaccagcctatccaacatagtgaaacttcatctctgctttaaatacaaaaaattagccggacgtggtggcgggcacctataatcctagctacttgggaggctgaggctggagaatcgcttgaacccaggaggtggaggttgcagtgagctgagatcgtgacactgcactccagcctgggcgacagagcaagactccatctcaaaaataaataaataaaataaaataaataaataaaaaagaaaattacggtgctacaagacgaggaggaactacacagaagcctcttcattcaagaaatgaaagctcctgagttcggatatctatcttaaaagcagtagtatgctattgaagaattgtaagcaaagggtgtcttgatcacattcatctgtcaaatagctctttattggtgaggttatgagaatgtattgaaagtaatgtaatcaaagcaaaagaggtcagttgcttggattaagggtgttggctaagaagataaataattgattcgtatgttattctgggacccctagaagccaaagaaaacggaaaataagaccaattataaaattcttattttcagagacaagaaatgccttcaggaaaagggaatttttttgtataattgtctactaaaagaaaatgttcacttatgactttagtgtatatagaccaatttatttagctttaaagtgaaattaatttcaggatatttggtagtaagttttagcaaaacctaaagaaaatagtaaagcacacatttctgttattgatacataatgatcagatatatttccatgataaatgtgatattataaagcacaacttttaaaaaacatttttctagagattatgccttaatttcagcctgtggaacatttctttaggagatattcatggctgctctgtgtccaactacatttgggagtcacctcatactgaatccttttatatactgggtcacttgcaaaggcttaattgagcatttgactgtcatatgccacagaatggatcggacactataaataaaacacaaaagagagtttgtcttttctgggcttcatcttcttaaaaaaatcagctattagacaagcatatgtaagtagtcaagaattatgataaattttctaaataaaaataagtgcatgagagagcgtaagagtatttatttaattcaggtttgggatcaggaaggtctcactgtggaatatttatctaaaatgtaaagggtgaaccaagaaaacagtgatgtggaagagcattagaaaatctggaagaaacacatgtagctgaagcaaagattatgcttattttgaagaaccttttagctgcagtaaataaaagacaccaaattacctccaattctgtaaagcagccttcatgactattcttcactttgttcacaatttattatctccagcccgtactaaatagataacatcatctcctacttcactgggggcttgaagggagaaaacagtgaactaaacttttacaagacattatttgtccagctggaaataaaaagtagaaaaaacatagaactttctatgtatagaggttataaagaccttaattgctttttaatttgtttagttcatgcatcctttgtcagtctgataaaagctgtgggactcctcagaaaaatacacagtgaatatcctttacatacaaccttttacataaaaatccagcagttcaaatgctcctgcaatccattcataagccattcataatccattcctaaaccagcttttggttaagtatccctgctttcaagtatcttgataaaatagtaaaaggaccagaagatacataaatataaatagaaaagtaaatagaagtgtgtgtctgctttactagaattttgaaatatcatgtttaaactataaattttaaatttagtttatggcttaagtacagatcatatattcccataaatgtgagtatatacatttatgtgcaaaccttcgctcacaaactcatatgcttagtgtttgagatttctcagtcctggactgagagttgggaaaaagttatgttttctttaacattctctcatagaaccaaaataataggagaatcagaaaaacataggcctttacattttggcttgagatcagcttctcgccatacctctagtacctcagacaaattacttaacatgtttgtacctatattttatctactttaaaatagaaaagaatacctaacacaaattgttcttatgaggataatatatgaacattgactgaaagatttaagctttttttacttaaaattatcctgttatagatagccttttctcaagaagtacataaaaataataatagtaaagctttgtgaccacaaaaagctacctacagtatatgtatgatgtttaacatatataacttgatatatataatatgacatatgcttgatatatataattagacatatgcttgtctaatagctgatttttttaagaagatgaagcccagaaaagacaaactctcttttgtgttttatttatagtgtccgatccattctgtggcatatgatagtcaaatgctcaattaagcctttgcaagtgacccagtatataaaaggattcagtaagaggtgactcccaaatgtagttggacacagagcagccatgagtatctcctaaagaaatgtatatatataatatcgagttatatataatatatatgttataatatagaatagaatattctataataatatagtatagaatagaataatattctatactatcatttaatatgaaactcacatagactatatttgtagctgtgggtaaatacatgtatgtaattttggtatatatacgtggcttatgagggtttttatggagacatgaatatggtgttaactaaattattataagtccaatgagctttgtgagatggccagtcgaagcaaacaaattccatgtatctccgaagccatttcctctagattgactgaaaaaaaatcaatttcctttaataaacatattttacaagctttgtagctatcacttacttcgtggttaaagtttacatctatggaagattacacagtaactttgtgctcacatgattgagtatcttaggggtttttatagatacatacttaaatatgtcagggaacttcatagttgtatgattggatgtactgggaacttcttgctccttctccttaatttgtgaaatcaagagacagagttactgcaaatttaaacttgagtaagtcctttgctctacttcatttttctcccgagaggcttctttttttttaaacgtccttttgtagaggcaaaatgtaaatattctctgaactctacttctgtatcttaccgtgaagaataataattagctcattaatttcaatttttgtaatatgcttaggtcaacaagattacttctaagggctcctcatcaaatacccctgtgtactttaggttcttttacttttagcaaggctgattcaaagttttttaattcataacttttttaaaaatttttccgagagtcacattgtatctcctttatactgacgtttattatcaggctgtttttttttgagatggtgtctcactatgatgcccaggctggcctggaactcctgggctcaagttattctcccacttcagtcccccaggtagctgggattataggcgtgagacacaattcctgggtttatcattttgtaaagctggagcaatcagttaagaatggagaagcaacagggccgcacggtggctcacgcctgtaatcctaacactttgggaggccgaggctggtggatcatgaggtcaagagatcgagaccatcctggccaacatggtgaaaccccgtctctactaaaaatagaaaaattagctgggtgtggtggtgcgtgcctgtagtcccagctacttgggaggctgaggcaggagaagtgcttaaacctgggaggcagaggttgcagtgagccgagatcgtgacactgcactccagcctgggtgacagagcaagactctgtctcaaaaaaaaaaaaaaaaaaatgaattgagtagcaatagatatcatgagcctcctcatggcgccaatattcgtttgaacccgccaacttcacatttagatatatgtgtctacgttgctggatgggccaggctatttgctcatctctcagttattttactatcctgtttcatctttttccataacactgttacactcacctttttgtgtcacttttaccagagccagtcattaatgaacaagaaatgtctttatttcatttcaaaaaagcaaaatatttctttgaaaattaaacagttaatttccaagccactcattaaagttattttattataagttttaatatcagaattataaaaatatttaatatgtcatctggtaattaatatttattcttttttttgagatggagtctcgctctgtcgcccaggctggagtgcagtggcgcgatgtcggctcactgcaagctccgcctcccgggtttacaccattctcctgcctcagcctcccgagtagctcttagcagcttcttaattaaagaatccatagctctctaatgcacatacgattgtgacatatttattcgttactttaagatcctcccccagtgttgaattctaccaattgcaaggtgcttccatggctttggacaaagtacagaagaattaaataacttcacagccttcatggaattcacagtaaggcagatcccatattaactcaattaaaatatatttagtcaaagccagatgcagtggctcacacctgtgatcccagaactttgggaggcggaggcggatggatcatttgaagtcaggagttcgacaccagcttgatcaacatggtgagacccctgtctctactaaaaatagaaaaattagctgcatgcctgtaatcacaactagtctggaggctgagacaggagaattgcttgaatcctccgggaggtaaaggttgcagtgagctgagatttcaccactgcactccagcctgagtgacagagactccatctcaaaaagcaataaaaataaaataaaatatattgagttgaatactgaaataggggtaactttgggaagctatgggccgcaaagcagagaatgatgcattcagtttgggggagctaagattagtttcgtaaaggaggtgacatcttgaagacatctagaatttcaatagacatagaaaaaattcatcgtaagcagagggactagtgaatataaagaagtcataaagatccaaaaagaactcagaaataatcaagaaggtgagggtagctacatcataattataagagccaactttattgagtacttcctttgtcaccatgtgctaagttctgtattttaatatcctcattgaatgcttgaaataatttctatgaagaaagatctgttttatctttattttactgggaggctgtgaaatatgcctaaggtcacacagctatcacatggcaaaaacaagattcaaacccccacagtttctaattttaaagcctcagcataatgaacacagtattgtactgaacagaatgaatgaatgtgagtagaaaagacatttctgagaacaaagctggaaatgtatcatacaaatcaaataaacatttcttgagaaatccttggggaagagggcaatataacctctcaaacagtagccagaatcatcaacacaaatatgtattttaagttctcacaattggtctcgccatatgaactaaatgctagatatttacttgcttaatgctaccaatgaattttcaaatctttccaaggtgttaataattttattgcttttttataccaagagcaagaatcaaatgttagttgctattgatgtttacattttaaataacaactttaatttagcctacaatatttagcaattacacaggaatcctctgaaagcttttaaccagccccagaagtaaactggctttggatgctaatctcttgagctttcctgactgacaagtttcctccctagaggaggggaattggcctgtctcctaaattttgcatggcctaaagcagtgagtttagaagcacctgtgtttcctggcaacaaacataacatttgtggaaaagtctaattatttaaattcctctgcatttttctaattgaggataaagtgctgcattctaccttcgcattcttattttattccttggccctttaaataaaaaaatacataaaatgatgtggtcagctaaaatatattggacaaacaaaacccccttcctttatctccctctatcgctctctatgtatatatattatatacatatataaaatatatataaacatatatatgaaaacagatatttgtgtgtatatatacactaagagatattatagtttaaatattttttaacatacactttaaaatctaacagcttggattttaatattgggtcagtctttctaaagtgtttaatattttagtttggaagtattaattagcaattcatgaatgagtaattaaaagtgctttagggggcctttcacatcctataataaataccaaaccttttaccacatttcatactataaaatcttggaaccccattatataactatgagttattaatttctgttacctacttttaaaatgggaacatatgttattaacaggtgttgctttgaaatctatattagcaaatgttctaccttataattagtttttgacttatcacaaaaaagtattttattttttttaattacatagtcacatttcaaggttaactttaaaaaattctaaattatctgattttcatgggaaagagatttgatatttgtgccttagcattttggtatttttctctttctgtatagcaaacctttgaatgatagtctgtctgaattcacagtgaagaaaatgatcagaatattgactgtcaacagataatttagaaggttcaatcctatgataatcagggatattttccttatgtaaatgtgttgatttatcaagttcagctatgtcattgattacatctaggcttcaggccttctgtgaactgccagctctactcaattctggcttgtgaatgttatcacatattttagtcaaatcagaggttatattatacacatctgacatttttctctttgtactaataactttttttctttttttgtttttacatcatggcataagatcaacactaaattttaggagtgcatagtaagtattaccatagtgtaatgctatgccaattgttttctaacttaatatttgcaaaactgggttttatggttgtttctatgcgaattgagtgcctctacagaattttatccctgagagtatatgagtggtgagtgataagagatactgaatgtctcagaacatactagcatctgacagcctattggtaagatagtgtaagtaaagaggataaggaaaatctgacttgaaaggagaataaaatctgattggacagtctgtagccaagtttgcatattatggatttacaaaatgaggttgttttgaattcttgattaatgaaacataaactgagttgttttaatattgcgtgccatttgaaataaaatgcattttgtcacaaccctagaaatgggaggttatgtgttgtaaaatattcttgttcccatctagaagacaccatattttatagagaacagtggctgaagcttgttttactaggaacaagtatggtgtaaggaaataacaataattaatactggtggcacttagtgctatagtaaaagtaaatttctaattagaaaataattaccataaaatactgaattatatctttgtaaggcctttagaaattgaatcactaatttaatatataagtaagtcaatattatttttatgagaaaatggacaacttacgaagttgttgttatgttttcaggccatattccatttttcaccaaacaagttatttccctgatacactcacttaaatcatcagtaatacatataggtttaaaaatgttttgtacaattctgaaagcctatcttagtttaatgaaacataataccataaagcttccctttcctccaacatttgagctacaataaaacaaccttgtacaactgataacaattaactcaccacccccaccccattgcagtcattagaattcattactaaaagctcatttgtttatggtaaaataaagtataagggttttgaaaccaccactgcaaaattaggactgagacagtgaaagagatctaacttaactgactccatcttgcttctaacctccactaatttatagtttatcgtttaaacaaacatcataacagccctttcccaaagcagaccttcttgcctggggactagattgcctctgtaggactaacatcagccacagtattagaaattatggtttaggagtcatgcagctggaggcaacaagattctgacccccaccaaactgctcctaagatcagtgcttgagataatttgcagaccctgcacttgatggatcagctggcactacccatatcaataaactggctcatctgatcttgtggcctccacccaggaactgactcagcgcaagaagacagctccaactccctgtgatttcatctctgaccagtcagcactcctggctcactggcttcccccgacccaccaagttatccttaaaaactctgttccccgaatgcctggggagaccgatttgctgatttgagtaataacaaaactccagtgtcccacacagccagctctgcatgaattactctttcttcattgcaattcccctgtcttgctgagtcagctctgtctaggcagtgggcaaggtgaaccccttgggtggttacaaatttgggggctcacccaggattgcccctgtggctacctgcctgttgtttggtggccccctttcagtgatggatccagaaggcagcccaagtggctgcctaattctcttggactgggggctgactctgttactctgtctactggtggggtattccaacccaatgtgcgtggacttaattgcaatggaaaaatagtcatggggagatgtcccttaactgtagccctattacagggtatctgtagcctcatggtggggtgtctatctgtagctccgttttggggtgtctggattggtgagtatcctaggtgctgccaatgcctgcttcattctcctgactggttctgtagccctatggtggggtgtctgtagccccattgtggggtgtctgtagatccagcatggggtgtctctgtctgttactccattgtggggtgtctgttcagctcctgggaggtctcagttcgctctttctaactagtaggaagactactggtttgggagacttctcttcaatcaggaagattttgaggaggtttctcatacagaaaataggaggatagtttggaagggatactcttggacttcttggttagggatctgatttggaaggccttctgtccctcttgtctttgcatgtgtttaaatatgtgaaagggatctcagaaggggttgctgatagaagtccagcatgcctaactcagagaaccctccttatttgtctggtcacattcagtgagctctaaagaaggctcaacagtcctgtctctcagggtgactatctgctctttcccttgcccagagacctcattgtgaattaccgttcagaggtcatccgtccccacctggtgtggatcaaagacaacagggaccaagatgaaaaattttgagctttgccaggctgatattgggtgcggaaagaggtgactaatgtctgttttgttatgtgtattttgctgggttggaaaatgttaattcagttccccatgcagcccgttgggcagaatcttgcaaattaagaatcttgtttatggttccataaaatggtaaagggtgattttatcttgtaaagtggcttaaaccccacagctatagcacaagcaagcagggtcgtaagacgccactccgttcttctggaagctgcagagaaagggaacccagaaacctggcatcccagcaataagggtaagaaattcttatcagtcaagtttctggtctctctctctctctctctctttctctgcattgttaaatagtaaactatttgtctcctctgcaagggtttggttaatagaaagaaggatttgtgagactaatcttagcacatctgatgtagtttgtgctaagaatttgtctttctgtgttatgtaatggagagagggatatcacgtgatagaacgtgggttaggacacccataagtctgcttttcaagtcagcttgggaggctggtcagctacaaactttgctacaggtccctgaaaccaatactctatgaaatttctctgtcttgttttgtgtccttaagagcttaaccttgtgaccatgtggggatactttcttttggtttctaccatccagaggacaggaattttggggttcatgtcatagttactcctaagatttttcttgagcagttaaaagccttgcaagcctgaaactggcttctctaggctccttctgggaaaagcagtagaaatttctcaacgctgtatatagctcagtagctaaggctttgtcttttgacagtggtggcctgggttcaattgttggcttctggaatgattcctttctgatttgttatttgtgtagctttgccatttattaagtttcttttctgatttcctctcttgaattttcctttctctggactaccttgtggagattctaaatcttgtaaaaagaaacttcttactatgtctttgcagcacctaggaggtttcctttggtaaagttcagaagctaaaaatattgtccacttggcatggctaaaattaggtaataagagatctaaaagaatttcttttttaaagagcactatggttaaaagtcagcttaattaagagtggataaacaagctatagatatatttaaaaggcctttatgtttttctcttcttggaacttgtttttttggaaaaagttttttcttctcagccgactgaattatttttctccatttttttctcttttttaatttttttgtcttgccactcttaacgcacacgtgagtccctaagataacttctggtagcctgggactcattgggaaaaacagaggaggcaccacagaacccgttttagggaaaaaaaaaaaaaactgttttccacatgaaaccccaggaattaaaaacagatggatccctctcaaaatcaaagactctgctctgtttttcattgtgttatctgatggttttgagttttggggatatcagaaattacttcacattatgagggagctttagtgtgtaataactagataggaaatatactttaagggatggctaatggtagttatacagggatacttgactctttgcacacttggatccagagaagcatgcttttggtcacccggaagataaggaaacattcctcaccctccactgggagatcagactcccatgaaggacgggctgattacaaaatgggctgattgactttgggttgccttgcaatgaaatgcagggtatggccgggtgccgtggctcgtgcttgtaatccaagcactttgggaggctgcactttgggaggccgaggagggcggatcacttgaggtcagcagtttgagaccagcctggccaacatggtgaaaccccgtctctaagaaaaatacaaaaattagccaggcgtggtggcacatgcctgtaatcccagctacttgagaggctaaggcaggagaatcccttgaacccaggaggcggaggttgcagtgagctgagatagcaccactgcactccagcctgggtgacagagcgagactccgtcttaaaaagaaagaaagaaacaaaaataagaaaagaaatgtagggtagaagcactgtactgtcttctcccgtagtatttctctccttttgggttgcagtataaaatggtgcccttaatttgggagttctgtctttgccttcagctgtgattaagccttagaaatgcatactttcctggccctgttcctccaaaggctccaccctgaagccagtaatctgattaagaaactggcaaataaaaagtcttatcagtgccaaatcttctgtctgtatttacatgtgtttttgtgtgtgtgtgtgtgtgtgtgtgtgtgtgtgtgatgtttataaaagagctctgattaattggcttggaaaataagtgcttaaataaaaaaatattttgtcagaaaaatagaaactttgatgactttttgttcacatgactttagtaatcttttggcaataaagacaattttaaagattattgttaaagtaaaatatcttgaaaatgtagacatttggtctaaattaaggtcagctatcagatttgctaaattctttaaggtcaaactgtttccttgactttggaaaattgttcaatttatttactttggagcattatattatagatgaggcctggggacacgtggagagctatgcccctagctatgctgaaaagagtcagaccttatcttcacttctgtctgatgtcctaggctccatccctagcatataattaaaatagcttttttatcaggtttttcactaaaaatcaaagttgctaagagttaacattgtaacatgaaatcgaggttactggagaaacagttttacatacaaggtgtgtagggaatgtgtttttggtgaaagataataaggcataggaatatggcttttgttgaagagaatgtaattttgtctagttcagaggttttaaagactgtcttaaactaaaagagtaacggaacgaaactgagggtttaagcaaagtgaaaagggtttatacagggttgatcctgaaaaaaaaaattctgtgggtataaacaagttggctaagatttgaaaaaggttatttagctttttctataggttaaaatattaaagtcatactgtggggccagaatctgggcccatgtgtccaaataacagggtcttcttagaaaattgatctgctgtttaatggaaaattataaagcgttctaaaaagtttatgagaatgtcaccttgtggtcaaactaattaaaactggatagatacataaaattttatttaaaaactagctttagcattaaagatgcactaatgcgaacatgaaatttggttttctcttttgaagacgatttttttgtaacgttaaaagataatgaaagggtttggctttctcctttgggtaaatggcaggggaaaaggggagagagaagagacaaattcagttatcctcatgctgtctttattgggtcttgtttggaaagctaagtctcctctgtcagaataaaggtttttcttttaagattttggagttatcgttttggtcaaatgaatgacttatggtgacctgggattctattttgtgatatccagtgttttaaacctttgatatttggcaaactttccaaaatcaaattataaattatgtctctttctggcctaatcttttagatattaggtcctctaaagtccaaaaatgacatttggcgtattttgcataaaaatcatacaggaaacattgtcaaatatgaaatggtgtttggctttttgggggctatatttgtgtaaatatatgattgacatatgttctgagattatgtaaaactcctataattctaatatgacttagtatatgttatcagtaataattgtaattatgttaaatggctatgtgccacagaggtaacaaatttccttgtcgattgtgtctttaactctggctactctacaatgtttgtgtcgtccacaggcaattgttgtctcatttttgtcctcttaaaagatggttttataggccgggcatggtggctcatgcctgtaatcccagcacgttaggaggccgaggtgggcagatcacctgaggtcgggagttcaagaccagcctgaccaacatggagaaaccccatctctactaaaaatacaaaatcattcctgtaatcccagctactcgggagaccgaggcaggagaatcgcttgaacctaggaggcggaggttgcggtgagccaagatcatgccattgcactccagcctgggcaacaagagagaaactctgtctcaaaaaaaaatggttttaataccagctgtaaaatgtaacaggtggtcttaaatgcaggtttctgattaataactctggagattgtgacgttagaatagaaggaaaactttcaaatagaagagtgaatggtgtttggttttctttggactgtatttgtataaatatgttattagtgtgtgttccaaaaattatgggaaacttctataattctgatatgatttcactattaataattataattgttatgtaaaattgttgtgtgccacggaagtaaccaaaattcctagtcaattgtagctttaataatggctgtagacttttgtcatccacagacattttatcttgctttggtccttttcaaaaggcagtttataatcggatataatactctgagtgcaggtcttagataactttaaaaattatgctcttggaatagagggaaaaaacatctaaatgtggcaaactgatgtgttaaacattgctaatccttttgttttcagagtcaacataacttatttctttagagctatttgccacttttaccgagtgagtaaaatacactcagtgacaaattttggagcaaatttgtttctctctacctgatttctctagaatttggaaaccatttgtgagtattctcaatttatgacagtatagttaattgcatacgtgcaataagaatctgttttcttttgtaacaggacaccattggagaaattggtcattttaccaaggctttgactggaatggcatgcttcctttaaagaatcaaagttgacttatagagccatttaaagcccgttggggaatctggcctcataccttgtccacacagagtccctgtacaaggttcctgacctgtggtaagtaaagaatgtcactttctaacaggcccaggaaccccaagttatcttgggacctcaagaggagaggactttggtcaactcataggtatttgagggtacaaacccatggctgggctcggctttcaaaaagtcttatctgagattcttcatggaacagagttccatcaaagccaatttaaaaagcctaagtgaaaaataattattcttgctgcacttcatgcaaataatcaggccaagtacagtaagactaaaatgcattttataagcaaatcatttctatcatgatttgtttttaataaaaatggggactgaacagagaaatattatgcttcaaaagaaaatctatagtaaactattagctattcttgaggttaattcttcagtttagactaaattctaaattgtttgtgggttagaagttcccaaactaatgatttcaaatgtttgcttttaaaattgggaattgtacttctcatcctaggactcattataccttatagtaggctattcacataaacactgtagtaaaactatagatgagagtaataatgtttctgccacgcaagccttggaagcccaattaggcctgcatgaatccactcaaacagttgcaaagcagttccactcttctcaccttggagttcgttcccattcccgctacttcccccatcagcaggaagaagccagagcgatcgacggccttttcccatctttatagcctataccttagggttaaagtgttagaaaacccaaaggaagggattgaaaccacctttgcaaaattaggtctgagacagtgaaaacaatctaacttaactgactccatcttgcttctaacctccaagctgtcttcgttcattcctgggcataggctgaactaactttgggagaaacttagtttacagtttaaagatggtaacagccctttcccagagcaaaattccttcttgcctgggacttgcgtttgtaggactaacatcagccacagtgttagaaattatggtttaggagtcatgcagctggaggcaacaagattctgacccccaccaaactgctcctaagatcagtgcttgagatattttgcagaccctgcacttgatggatcagctggcaccacccagatcaataaactggctcatctgatcttgtggcctccacccaggaactgactcagcgcaagaagacagctccgactccctgtgatttcatctctgaccagtcagcactcctggctcactggcttccccccacccaccaagttatccttaaaaactctgctccccgaatgcttggggagactgatttgagtaataataaaacttcggtctcccgcacagctggctctgagggagttactctttctctattgcaattcccctgtcttgatgaatcggctctgtccaggcagcaggcgagttgaacctcttgggcggtcacagttttgacctagtaaagctttcattttcttgctttgccctatggcctaatttataatatacataaccaaaagccttagcttctagtaaatagtatttattaaagtgctatataaacgttacattttagggtaaccaacttttcttgttttatttttgtttgtttttgtttttcaggaatttctcagttttaaaatttaaagtcccatatcccacaaacctgcttagcccccaggcacaccagacactcgatcaccctaaagttctagtttattttgggatccttgcatcccttaaaattacatacaagatgttgggtatacatacatactgcaattgccatcaggttcaccttgcccactctctagacagagttgatttatcaagacagggaaattgcaatagagaaagagtaattcatgcagagcaggctgtatgggagactggagttttattattactcaaatcagtctccctgagcatttggggaccagggtttttaaggacaatttggtgggtggggagcagccagtggtcagaagtaatgattggttggatcagagatgaaatcatagggagtcaaagctgtcttgccctgagtcagttcctgagtggggggtcataggatgagatgagccagtttattgatctgtgtggtaccagttgatccatcgagtgcagggtctgcaaaacgtctcaagcactgatcttaggctttacaatggtgactttatgcccaggagcaatttggggagaagcagtatcttgtagtctctagctgcatgactactaaaccgtaatttctaatcttttggctattttgttagtcctacaaaggcagtctagtccccaggcaagaaggaggttggttttggggaagggttgtcattgcctttgttttaaaccataagctataaactaagttcctcccaaagttatttcagcttacccccaggaatgagcaaggacagcctggggcttagatgcaagagggagttggttacatcagatctctttcactatttcagttataattttgcaatggtggtttcaatacctgaatgcattttcgtaagacaaagcttcaatgccaaaacatctaagatatcccaatacggtattaattcatttgctcggtattaattcatttgctgttgctataaaacagaatacctgaaactaggttacttatttcaaaaaggaacttatttcttacagttatggaggctcagaatgtatctgcacaataggttcttctttcctgctgcccaggtagagctgatttatcaagacaagggaattgcaatggagagttttatacatgtacagccaccagctaagcagaagatcagagttttactattactcaaatcagtctcctcaagaagtctgaggctagggttttcaagatcggtttggggaaaggcatgtggaaagctacgcaataggtgcttgctgctgactggtagggattgcaatcataggactgtgggcaagggtcctcctgtgcactgagtctcttctgggcggggccacaggagcagttggcaggtgcaggtggagccatcagtcatcagacatgaaatatatctgaacagatatctcaaaaggccaatcttaagttctacaatagtgatgttgtctgcaagagtagttggggaagtcgcgtgtcttgtgacctctggaataatggctggcaatcctgtatgtctacaccgcagcagaatttagtttcccctatcctcctagcctggtggtctctcattagctctacaaacgcggttgagttttggggaagggctattgtcatttaaactataaatgtctcccaaagttagcttggcataagcccaggaataattaagagcagcttgaaggctaaaggcaagagaggagttggctagattagatccctttcacttccatcattttctcaccgttataatttttgcaaagaccatttcaagaagtcccaggtcaaaaggacacatctggtgagggccttcttgctggtgggaactctctacagggtcccaatggcctggggcatcacatggcaggagggctgtgtatgctaacttgctagctcaggtctctcttcttatcaagccaccagtgccattcccatgataatgcattaatccattaactcattaatccattagggcagaactttcatgatccaagtgcctcttaaaggcctcccctctcaatactgccacactgggggttaaattttggaggggataaatagtgaaaccatagcaaccactgaatcaaaggagttaaatgctatttttaaaaatgatgctaaaagacaaaaaaaaaaaatatagtgttaaaagaaaaacttgagccaaattaaagttaaaggagtttaattgagcaatgaacgatttgcgaatcaggcagccctcagaattacagcagattcagagagactccaggggtgccttgtggtcagaataaatttatagacaaaaaaaagtaaagtgacatgtagaaatcggaagtgagatgcagaaacagctggattggttacagctcgctgtttgccttatttgaacacagtttgaacaatcagcagtgtataactggctgaagaatggcggctgggattggccaagactgagtgattgtcacaggcccatactcctaagttagtttttcaatcttgtctacctattgagataggttgtagttcatccacagggactcaaatatagaagtacggagtccttctcaggccgtatttagtttgctttaacaatagactttatgggaaaatggtattttgttaaatgcaaaataataagttagagaaacactttagtgtttataatttttaatattgactgttagccttagctgtttatttatttatttatttatttatttatttatttatttatttgagacagagttttgctctcgttgtccaggatggagtgcggtgatgcgatctcggctcactgcaacctccgcctgccaggttcaagtgattctcctgcctcagcctctcgagtagctaggattacgggcacccgccaccaagcccggctaattttttgtgtttttagtagagacggggtttcaccacattggccaggctggtctcgaactcctgacctcaggtgacccacccacctcagcctcccaaagtgctgggattacaggcatgagccaccacgcccacctgccttagctgtttaatatgtaactcatggcttggtatagttcctgagatttggagaggcaaactgaggtttgaatcctgtcttcaaacttattggcagttgggcctgatcaagttgcttaacatttttgtgactcattctccttacatacaaagtggagaaattttgcctatttttaaatagaattgtacaggacagagaaaaatgtattttaagcctcttagtgctttgtgatatatagcaggcaatatttaaatggtaactattattattgataatagtaagtatgtatttatgtgcttcacagttttacaattaaacatgtccctctcagggtttcttactatattcttacctagagctgtgacatattaaaccaccttgcaccaaaactgaacaattggtatactgaggataaacattacttttttattcagtagatatcactggataattttgttataaatctctgacagtaaagtgaaagattatgtatatcagttaaaactgataaataacattaaaaagaaatttctgaattgaacatcttttgctctaaattttctggccaaatagggatacctcaaaggaaaatggccggtgaatttgtatacagataattaaatagtagttttagtcagtaaatcaggaggtccaaataataagtagaaccagggacatagcatgatggaaattatgctgcccagttttcaaaaacattgatggtaataaacagctgtgtaacataaaagctggtatgagaacttggtcaaattctttttacctgagttgagaaaaggtatcatctccccatattctactccaaactgatgaaatgctcaccgagctgctccgtagcctggctggttacctcactgaaatttcacccttggaggccttatgaccttttaacttattccacagctagattccaccattatccaaatcaatggtgcatttacaggtgattcagaagttatttagagaagattctgacatgttcaataaaaattccaaatttctcaggaattacttttagacatctctaaatgaataacagagaggttatgtgaaatccttgtgtaattatctgtgcccagatttttttgtcgttgtttgtttttggtttttgaaacagagtttcactcttatcgcccaggctggagtgcagtggtgcgatcgtggctcactgcaacctccatctcccaggttcaaatgattctcctacctcagcctcccgagtagctaggattacaggtgcctgcgaccacacctggctaatttttgtatttttagtagagaaggggtttcactatgctgaccaggctagtcttaaactcctgacctcaggtgatccgcctgccttggcctcccaaagtgctgggattacaggcgtgagccaccgcgctgggcctgtgaccagatttcttaaccatcacatgcctttggacttgccattcaatgttccatttagtagattttgatacattgaaaaatcactatgaacacattttcaagtctagctggcttcatttttgtcctctaaatggcactaaatagaatctgtgattgtgacagtgcctttgctttaatctaccagctatttttgaaagatatataacttaattgaaaaatagtacaatcttttcacttagaatctttacgaaaaatgtaaaagatgctttgccagtctgaatagttaattgagtttgactgtaccgggtaagatgcaaaagagtgtgtctatggcaactctttatctcataaaaaatttaaagggcctttatttaatgtgactccttttaaaattcatttaatggcgtaagtaaaactggatatataattagagtctaagataaaagcataataattgaaataagataatatgaagaagctcacacaacaatgattgggcttcaaatgaatatattctttaagctcagctgaactcttgtaagttgtattttttcactatgatgtaataataatggtatgtggatgacaattatactactttataaatgtaaggtgtcttatagtgtactaggatctttcctatgcattatcaaatctgaatctccaattagccctggatatttgtatatccttttttttttttttttttttaatcaggacagagtctcactctgttgcccaggctggagtgaagtggcgtgatctcagctcactgcaaccactgcctcccagatagctgggactacaggcatgtgccaccacacttggctaatttttgtatttttagtggaaacggggtttcaccatgttggccaggcttgttttgaactcctggcctcaagtcatctgccacctcggcctcccaaagtgctgggattacaggtgtgagccaccaagtccggcctgtatgtccattttttagaaaaggaaactgagcacaaagaggttgagtaacttgttcaagatcacataattagtaagtgataaagtcacactcaaacccaggtattctaacttcaagtataatgttcttttctctgtgttccttctttgtataatagagagcaatgagtatgtaggaagggcagaatagctgcacagatctttacaatatgtctcacaataatgctgtgctttcaaaagacttgatttaatcattttgtttcctcattcactggtctattcattcaggctaagggggcccttttttctagatagatttgctttcaccatttcattcccttgtcaatattcgccatcttagaataattgtgttttcattctcccgcttgaaaaaagatgcttaggtaattctttatttaagaagtaaagaaacattatcaatattgatatagatatgaacatatatatatatatatatatatatatatatatatatagagagagagagagagagagagagagagagagagatggatagatacagatatagatacctcaaatccaggaagaaggaactagattttttaattatacaaaaataaaatactcttttttaatttttttcttttaccttttgtgttctttacataagatcaaatgaataaatacatttatttaataaggaagcttattggtagttcctgtagtatttactgtctattaagcatcaacctaggaattgtaccataacttttgtttaaatacaattcttctattgatgcagtaagagctgtcagtcatagtgctgggaatgccagaggggaagtcatccctgacaacattttttattgcactattaatacgtacaagttgacgttcaagtgtgtgtatgtatgtgtgcgtgtacataggcacacagaaacatcatatatacatgtgactacgtaaaaaaatacacttaaacatatctgtttactctgtaagtgaataatcatttatttcaatgtttagatgagattttaacatattagaatggcttcatttttctttctaggcaatctgctagcaggctttttccagcaacctattcttcccccatctttttgatattataccaagatttctgcctccatttttgttgatgtaattatcccggcataattttgaaaaaagatttcctggcaatgtaaatccacaagattgttgatatggcttgagctcaaatgatgcttctatccgatttgtttacctttcagcttgagcagagttcttgtttcataagaaaaacaggaagagatactatagtagagaaggacttttatggatggttttattttaagtaaatattgcctgtaagggatccaggaattttagtgtttttcttggattccttaaccataatacttagcccagagcaaaactttctctcaaatgatggtaaaaaatctaattctattaaatcctgattattctgtgagctaccttggaatacattgcctatgagtttttctgctaagaaatggacttcgtttattgctcattttcccaaaatcaaggaatgctgttgttcttcaatttagatagatgttgacaaggtcctcttcatagcagcaggtgttaggctataattgctcattatagaattatgttttgcttgaaggaactcaggaaacaagaaaagcatgttttctgtgtatatgaattctggttgaaaaattgaaagaatgacactaggaatagtatgtaaattggcagaatttgtcatttcattgtgcaactagtattttaaaaggcaataaatcaacgtgaacatccttgggaaatcagtctccttcttaggcctaacttgcaaagtacccccttaccattgtatttttttaagatagaaattgagattagagcaacacggggagcaaaatattggcagatgaacttgttgaaggagatgaaaaacaagaagctatagaaatagattggccaatagtgctgagcaactactcaactgcaaaaatggcttgcttttccaagcaatgtgtaaagcaattagcaccaacgtttttattagtttacataaaataatattactttgtaaacacctataaacagagattacctagatagcctaagactattattaagtacaataaaacgttactggtttaaagtaataggtatagaactttgtattgtatggtgcacattcacataactagagaggaaatggaggtctacaagtcaaggttgaattacacacttgtaatccatccttaagggaaaaagcttcactgatcaagatggtactttgcacaaccttgccaattgtttcacaaagctgtaatgatgccacaaataatctttcacctcccatacctaagtaaaccatatttgagttattttctctgctccttcctatacctttcctctttggcatcacaaagtcagatttttaacctacaggttgacataagccaaaaatgttggaagattataaactgcctctctttctctcactgtatgtgttgtgtatatgtgtgtgtacacatatataagcacacacatagatagaactcacacggaaacataagcacatatctacgcactgttgttttgctaccatatccagtgataacgtttattttgaattacatgtattttttttctgaatttaagagtgaaatgaaatagagttttgttagatatacagttattacctatataaaaatgattctgtgcatacttccttggcaaagtacaatacctcctccgctgtcactgccaatgcacaggtgttctttctcctggctgttagactcactgggagaacttagaaaaatatttcagccacagctttactctagcctagatcaattaatcactaccttggccttacaatctactaggcagtccttcccaaactctagaatacagcagaatcccctagaatgcttattaaaaatgcagattctaaagccccattctaaatgatattcttctggtaggtctttacaagtcatgtattcctggggtctttctttgagaaacacaactctaaaaggtctttgttattcccattctgggttttgaattctttctcgaaattgtaacaaaatatatgtactgaaatactgttcctctaacaatctgaagaaattttcagcactagcagcacttgttggcactattgttgttattttgtttaatatttaagacaactaaaagttacagtaatttataatgagaatcagtattatggaatcaaccattaacagttcatctcactaaagaatttttatttttattatttatttatttacttacttatttttgagacagagtctggctctgtcgcccaggctggagtgcagtggtgtgatctcggctcactgcaacctccacctctcgggttcaagcgattctcttgcctcagcttcccaagtagctgggattacagctgcccgtcaccacacccggataatttttttttgtatttttagtagagatgggatttcaccatgttggccaggctagtctggaactcctgatctcaggtgatccacccgccttggcctcccaaagtgctgggattacaggcgtgagccaccgctcctggcctcgctaaagaattaacatcatatgttcactagtactgaggttagttcccaaacactgcactaaaaaaatgaatgaaacaaatgaatgaaaatgtgtttccttagccatattctaagaaaatcacctctttgattattgtaattggaaccatctcttctttctttgcctggaatctttgtaacaaggttatcttctttcatgtcccattccaattagtaatcatttatttctattaaggcttttataatcattcggagaatccacactctttgtgtctgcagtcgctgagttcactcattaaatacagaattttcaacaaccctatttccatcttcattgttattaatacttcaaatttgcttctgttcagaaccacgcacttgtaggatcgagtaggtatacgtgttatccgtacacactctgaaaaactccctgcagacacttactgaacaggaattgcttatttaactgtgttttctgtctctttcatacatgttctctctctactgaagtgattgaaggatgacaaaggtccttatgggtgtttgatggcctgtgaatagctgtcggtctacgaattccctgaaaataatttctccacttgtatgaaaataatttactccgtgacttttcatgttgtattgtcaatcttccttctggttgtatcaggcaggagtcattgttttacatttcattctttagggggcctatgcttggatttctcccattgagaaaaaacaaagcataactctgacataatcgttggtgttaatatcatgaaaacctggaaaaactaaaggcaaggcaaaaaatatgcattcttatgcatgctttatgtgcactatgcccgtacataaacctggcagaactttaggcagaattaaaggtttaaatgggcatcatctatcctctataggccttttagtgtgcttcttatgtcctgaggaccataagaagatctaggagctgagtcctacctaccccacattgctggtaccgttgggggctctatgccattctactccagccagcttcctaagattagtctattacttttgtttcctttttttcttttctttttccttccttccttcctttttttttttttttttgacagagtctcactgttttgtccaggctggagtgcagtggtgtgatctcgtctcactgcaacctctgcctcccaggttcaagcgattctcatgcctcaccctcctgagtagctgggattacaggcgcgcaccaccaggcctggctaatttttattttagtagagacgcggtttcatcacattggccaggttggttttgaactcctgacctcaagtgatctgcccgcctcggcctcccaaagtgctaggattataggcatgagccactgcacctggccttattactctcgtttcctagacattattccacccttcctaatacttagctacctacttttgcttccgtttaaccctctgtaacttgttttaaggtggttttttttttttttaaatcctttggctatgtatgttcttataaagcaaaatttagttgtgtcaattcatgaaatcatattagcattcacttagaggagagtgagaaatgtttcctgctcatctatatagcattgcccatttgcacttagttttgatatttgaggcaaatccttcggttttattgtctaaacacacagttgtaattctaaggaattttacaccaggtcgaaggaggtagcattgcccttgcatactattatgtagggcattgtaatatgacatctgtcatatagtgagatgaggatggctacctctttcacttaaaatagctctggccctttatataaccaaagaaaatataactgaaatgcttggcaagaagtaaagttatgaacaatgggcttccagcatttgctgtatgcctgctggcataggaattccaagcatataatgggtgttctttatataatgaaaagccaattgtgagaccggcttataatctttggtgccagtaggcagcatgtacatttcataatttcatcctaatgttttaagtgatacaaaaatgtcctttttatctactaaagtgcttcacatgttaataaatacatgtaaatttctgtaaagtgatattgtcccttaatgaatcaaactgataattgtttctatctcattaaaagtaatctatatttgaaagtgaagaactctacaaataaaaatatttaacatatcaaacatttgaaatttctaggtattgtaagcacaaatatttatggtcatatttggccagaatgttttccttgtaaatagacttggaatttttatatccactattgtgattggctgtaataatttttcaagtactgtatacacaaaattataattacattttatactaactatgggtgggggctgtcaagtgtaggtaaacaccaatttgcctcatcatctcttttgtaaaacctccaaccaccaaacctaatcgagcaagtttatgcctcctctactgcatgttagcactttttccatgttaatgtaatatttgtacacaaacctgtatcatccaacagagcttctgagaagtagagacctttgcttattagactttcagttcttacttcgtagaatggtggttggccattccatacattttattttattttattttattattatttttttctgagatgaagtctctctctgaccccgaggctgaagtgcagtggcgcgatcttggctcactgcaacctccgcctctgaagttcaagcaattctcccacctcagtctcccaagtagctgggactacaggcacttgccaccatgcccggctaatttttgtgtttttagtagagatggggttttgccatgttggccagactggtcttgaactcctgacttcaggtgatccacccacctcagcctcccaaagtgttgggattacaggcatgagccaccgcgtctggccatcaatgcattttaaataaatgaactaaataatgaatatcatttaagtgcaattctgtttacatttgtttacatctatacttattttaatcaagtatattcggtggtgtcaacaatctgtagcttaacaattttaattgaaagactctaattacatatcactatataatagttaaatagttttcttggatgaaacaaaagagagtgagatagagaaagaagtaacaattaaaggatttcattatgtgatagtcttcctgtgtttttttttccttttagaaagttgccgcaataatagaaaatgtttatttctttttcttactagtagaggtggcatttttgctatagagtgagtgcccttagttcttcatttattaacaaatatttcattctatgtataaaaagtataataaaatcatatagacaatgttacatgaaaaatgaacggattgttattacaccaggaaatcactactgtgccctatcaaaatgagtttgaagtatatatgtgcatatatatgtatatatgggcatgaatctaaggcaatcaattatgtctattttcaatgctctgtgaagaaagaaattggttgcctactgtcacattttatcttagtgatactctttcattaaaatgcacacacgaaaaaattaaaaatgtaaaatctgattttctaagtggacttaggaaggtacagggaacaagtgctagtgcgtgaagtggaaagtatgagagtacatgaagttgaaaatgtgtttgtgtgtgtgtgtattgtagcaggtcatctaggactgcaattttcaaccatatgcccaagccccggcatagagatagtgattcagttggtctggggtggggtatgggcttaggtaatattttatggctctctaggtggttctgatgtgtagtaggggcaaagaactgcctctatgggtgtctaggactgtactgtaactatcagcaattagtgagagggttctttgtaatgcctttgattattcttctagagacatatgttctgtacatcagccggggagcaaaaccagggaattccagaagtggttctcccttaagacttactctgacggtgttagtgttttcataactcgagccttaccctcattctaggaaaaattataattattatctatcttactttccaccctcagtacttaacattttaagggatttagtgaatttttccacttccctttttatatttgttgcaggtaagtcctgttgaatatcatcctcaaatacatgcatattttactgccatggtaacattttctactttttcttctatttttttcatatgtaaattatcattgaaaatttggcagagtctctggtaaccaaagtaatcttgtctgtttctgtgctactagttttattataatttgattcctgttccaaaaatgaagtacagtaataataattttttaaaactcaaattatttgtaggtcaatattaatgactttttattaatgtatatgtatataggtttaacaataagtgaagcagcttataacagtatatattctattaagtagaaatttacacataaagttagaagaactccatgtgcagtgtcctcttatgctcatatataactttctgtttcaaataagagtttcaaaactagagtctgtgtggcacagatggtgaattgatgccataatttccaatctgcttgttagtagagatatgtcatatgtttattgatgattgcaagtatgtttggtgcattaaagcttcatatttagtattataaaaaacttaatgtcatgtggggaaagaagttgctacctttctaaaaattgtagaatagccaggctcaatggcgcacgcctgttatcccagcactttgggaggccgaggcgggtggatcaccggaggccaggagttcaagaccagcctggccaacgtggtgaaaccccatctctactaaaaatacaaaaaccagccaggcgtagtggcgcacgcctgtgatcccagctactcgggaggctgaggcaggagaattgcttgaactcgggaggtggaggttgcagtgagccaagatcacaccactgcactccagcctgggcaacagaacgagactccatctttcaaaaataaatagataaataaataaaaacaaaaattgtagaataaactccttgaattccaggaagaaacaaatattgttgtccagttatgcaattatgcataatgagagttaaatgcacaaagtgatcttaaatgtacatattcaaaaatagaggttggatcaagaattcagattattcaatatcaattcaattccttctgttgtgccatttgaatcctattgccaaagatgattattcatcttgaaaaacagactcccaaattcagagttcctgcattttaatttgcccttatgaaaggaaggattctttccttttctggaatacaatcaacttctgctgagaagaaggaaagtctttattcaatactgaaaatgtgtattttcttaccgtctatttatatggacaataatcaaacttttaattatcttctcacaatacttacagatctatgagaagagttgctatctaaagctggatctttatggagaagagacatgctcaagtgtagcgaataatttttgttacatatcagtattaactaagctttgcaaagtgaatagggaaacttatatttaaaatgtcagggaaaaaaagagttttaagtaaaagggacacctggaactctaaagagactatagctctaaacctgtagctgaattctgccttagatttcgttgacccttaactaggggcaaatgcacaccccattctcagggtttcccacacacctctggaaggaacacaggagcgtatttacagctatcgtctaaccattatagaattcctggggacaaagttgtgtcagccacctttgatttgtagtaaacaggtacaaaaccgcatcatggaattatttctgcttatataatcctcttctgcagtgtctgaatcttggcacctcctctccttcctcctaaccactgcaaaaacaacacccagattaaggcatcggggagaactgaatatctgaatatcaagtactccatatatattgatccatcgaatatgcctacaatatcactactaacctacaagtgtaccaggagttacacctgcagtataacagattaaaacagccttctccaaagctcatcactttgaatgttaaaagattcattttccaccacttaaaatctgcatactatgatctgtgtataaaaagctaaaagatatatccaatttcaaatgtaatgtcatgcaagtgtctactgaatgtgtatatatctttgtaagtgtccctgagcaaaataactttcaacttaacattctttttctcttggatataaaagagaataacgtaacaagagcaaatttgcttttaaatttctgccttgatagcaagttaaagtatttagaaccaacatcctcttaaatgtataatttatataacggatgagtctagaacagcatttccaaatggaaattgtaaagaacattgatcccgtaagatgttgaatgaaaaacaaattgttaaaatgtgataatttcatttccttctttagcgagtcacaactcaaccctgaaatgttttgtagttaaaaaaattgtttaacttagtttaacccaatgtttctgaacctacgtcacaaaggaaatgtttttgtcaagtgatacataactttcaaagagattggatttttttttttttttttttgaaatgaagtttcactcttattgcccaggctggaatgcagtggcatgatcttggctcactgcaacctctgcctcccaggttcaagcgattctcctgcttcagcctcccggttagctgggattacaagtgcatgccaccacgcccggctaattttttttgtatttttagtagagaaaggggtttcactatgttggtcaggctggtctcgaactctagacctcaggtgatccacctgcctctgcctcctaaagtgcagcgattacaggcgtgagccaccacgcctggtcgagactggaattttttgaaacacattttcataaatgaattactggggtactctctgtttattaactatgttagtactgacaaagattatttgctcggccaaaatttattcaggcttcccaaccttctcatagcccagtctgtgcacattctcctaaaatttagttttagcaggccagatcagtttagccagaaaacactcatccttggtatttgattatcctggatatctgatcatgttcctcatcatccaccatcctccaggggatgactggactattttcagcaggagtctcccttacccatgatgcttcctcttaataattttccatccactgacccctaccctgttccttggttataaaattcccatttgcctgtgctgtattcaaattgagctcaatctctctcccctactgcaagaccctattttcacggtccctatacctattgagatggtcttgaataaagcctgccttaccgtgattcagcaagtgacattgaataattttttctttaacagtataaggatcgcacattaccatttgttttgaaagatggtataaaaagactaactgaaaactaatcttggctgggtatcactggcagaaattcttggtcttcaatctatgtagaacagatatttgcattttcttttgaaaatttaatacattgattaaattgtcattttgttataaaaatatgaaatgaagggtacatatgatttttaaaaatttctgtccaccatcaccaaccactatgtgaaaatacacctttgtaagactttttctattctataacataccttcaaaaccaagaagaagtatttgtaggaaattcattgcttttatttgtgaattgataaagggaaaataataagctagggctcgagcttcagaacagggtgatggttttatatctctctcaaaagtactgcaaggtaggttgtttcaatactattaacaaccccagggttccctgacatcttctattcccagcttccattctcaaaaattatatcgaggccatgagttggactcctcagccctagcaaaagattattcatttgctctgtaacccttcttgaaccccttttcctggtagctgtgcccaataaatccgacttatatatctttgggagttggagagagagagagagagagagaaagaaagtgagacagagagagatagagggaaattattttagctaagaaaatttacagtcacaataatatgagagtctctgaataagggataaaagaatattagacgagacatagtctctgccaatggtgattaagtaaacatagtcaaggagaatatggctgtgaccattagtgtgtaagtggttacatctggtgggcaatctccagtcataagtaaaataatctacgagtgagatacaggctaagcaaagatttcataattaggaccgaacaagcactaagtacaaagtcaaacactgataaattgagcttcattaaaactaagaattctatctattataatacactaataacagtgaaaagaaaagtcatggactgggagaaaaatattcacaagacgtatatctgattagaaaacttgtatccataatatataataaactcatacatatcaataaaaagacaacccattttttaaaagttggcaaaatatttgaacaggcacttcataaaagaggacaaagatggtaaaaaacatttgaataggtgcctaacttcattagtaatcaaagaattttgaatacccctatatatgcatccgaatggttaaaatataataagacaatatcaagtattggggagaattggtgcctcagctggagctctcaaatattgctggtttaagtgtaaattaatatttgccaatatctactaaatctaaatttatgccttccttatgagccagcaattcctctcatatgtatgtgttcaaaagaaattagtaggccaggtgtagtggatcatgcctgtaatcccagcactttgggaggccaaagtgggagggtcacttgaagccaggagttttagactatcctgggcaacatagtttgacctcatctctacaaaaaaaaaaaataaaataataataatcaaaattagcctgacatggtggcatgcacctgtagtcccagctactccagaggctgagatgagagaatggcttgagcccaggaagttgaggctgcagggagccgtgattgcaccactacactcctgcctgggacagagtcagaccctgtctcaaaaaaggggagaaattaagtccaccaaaatagcatgcacaaggtagttaatagcaacattttgcataatagcagaacctgatataacttgtgtccctcagaattagaattaaaaatgcggtatagactgggcgaggtggctcacgcctgtaatcctagcactttgggaggcccaggagggcggatcacttgagatcaggagtcagagaccagcctggtcaacatagtgaaaccctgtctctactaaaaatacaaaaaattagccgtgtgtggtggcaggcgcctgtaatcccagctactcaggaggctaaggcaggagaatcgcttgaacccaggaggcagaggttgtagtgagctgagatcatgccactgcacttcagcctgggtgacagagcgagactttgtctcaaaaacaaaaacaaaaaacaaacaaaaaacaaaaattgggtatatccgtggaatattatatagtaataaaaacctgctacttggaagaatatgaacgaacttcataaacacaatgttgactagaagatgaacatttactgtgtgattccatctatatgaagtttgagaactggccaaagttatctataatgattcaggtcagcagagcagtttcttcctgagaggctggtgggaatatagtgtgaattgggaaagagcatgaaggagacttacagggtgctgcaattgttcagaactctttttccttgatacttgcttacagaaatgtgcagaatttttatttcacctagttttctatgcatgcgtagaatctccatagaacacacattttattaagtacgcattcaacttcttctaaaatacctctagtcatagaaaatgtaactttatttctttattccttactttgcctagcccaagctcctacaaaaaaaaagattagttaccatttaattcaaattataaaacagaaccagtcttttaaacagtatcggatacacaagtatctaatctaacttccattgcctatcagtggatgtggctttaatcaagtcttttctaaacaagatggacaggcactgaagaaaaaaaaagtgagccattttatgtgttttaaaatgataatgtgattttgaattttgctattgtagaagctcctaacaatattatctggcatttgttctatctgaataaagccatggcttatattatgtatatatggaatttcccagaatactattgttagacacatcactgagctgtgaaaaaaaaaatcatctctaatttgatcaatatgtacttacacgtatatcattagttgccattgctctcagcctttagtacattttttatgagccccgtgggccatgagcttgctttttcataacagagaacgagaaagaagaaatctcatcagtataataatacccacatcagtagagggcatggttcagaggcaatcttgttgtctgtcacagactccatgatataagctagaaatgataaagagattcgttacaggatactgtaaaagggatattatggtatataaactcattaagtgttaactagatcaaagcaaatatggcagaaaagagtctctgaatactgtagcagagtttattgaatgaatgaacgaacgaatgaatgaatgaatttataaaaagcgcaggggggccggggcgcggtggctcacacctgtaatcccagcactttgggaggctgaggcagacggatcatctgaggtcaggagttagagaccagcctggcaaacatggtaaaaccccgtctctactaaaaatacaaaaaattagccgggcatggtggcgcatgcctgtagtcccagctacttgggaggctgaggcaggagaatcgcttgaaccctggagacagtggttgcagtgagccgagatcgtgccactacactccagcctgggcaaagagagcaaaactccgtctcgaaaagaaaagaaaaaagaaaagaaaaagaaaaaaaaaagagcgcaggggtcagataattgagttagaaggtagaggagtggggatgttaatgcccatgtgagaaaagaggaagaggtattgaaggaatccagcggactttgatgaggaccatgcgggactttctattttcaggaacctaagggaacatcttgctgtaggcagcctggggctgtctccatcaaagaaatgctaatatttacattcattggtttttgttatgtgactgtctatgtgctaaagctgtggttctcaaagtatgtttcagacccgcaatatcacctggaaatttgtaagaaatgtaaattctcgggctgtgcggagacctactagataatgaattctgggagaggtattataagaagttcttcaggggattttgatatagtctctaggttgagagacagtgtagtagacaatacattcattactttatttattcttctccatgattctataaaagagctattgttactgctttgtttacaaatgagaaaactgaggctttgaaagaggctcagtattttgttcaaggtcatatagctggtatccagagatactgggaatagaacccaaatttgtcagactataaaacacggtgctttcagccactcctccagagccagggggataaaaattcattaatttccatgagtatttgtaatagtagcccgcaagtcctggaatacaattataactgctacagcattacctttgaggagaaaatatctcatttccccaattgattgccaaaataaaatgcttaaaatacaaatgtctggttgaagaaaccctttaattttttttcttgcgttcaggcatttgtgtcaggtttaactaatttattttaacttgcaatacagtgttgcctgtagtaacaaataggacattctgctattagtttttaatctcctaccgacttgttattttccactcctgaagctaaacttctttaacaatttctatgctcattgtatctacttccttactcacgtagctacctcaaacaccaataatccggctgcttccacatccttcaactgaaattgattttgtcacggcccaagtcacatcaggcctcatcttaccactctgtagtattgattgttgatcggtccttcctattggaaaaactcttcttccctggcttctaagatattccactattctagttttcctgtctcagggcaactttatcattttcttggagggttgctctcctatcgtaaatctcttttaacgttgagcttcaatcttaatgctcaatcaacatatttttcttgatctcatcaaaatccatagcaataacaactcttaaccatgaccctcagatttttatatccaaccaaaatcattcttttgagctagagacctatccccctgcccatcagttatgctcatgtatgtcacatagttaattcaaaatcagtatatatgagatcaaaaactgccttctaagcaattcttcctccttctctagctcattgaaagacatcatgtgccaaacttctcaggtttgggggtatcattcttgcattctccctcgagatcactgttctaacattaccttggcatcagccatcatgttttgccaggattgttgcagttcccctaaaacagatgttcaatttcccccacccctgtgattcagttttccacatgcagccagaatgttttaaaaagcatattcgattgtgtcatcttccccctagaaaaccttctgcggtttcttcaaaataaatttaactgaataactagttgacttaattcaatgttttccttcgtcacactaattaatcagtattttcatggtcctcgatgctgagggcttaacattcaagaataaatttgtcttatgtttactttaacttataaacttcctttaaatgaaaactaattgttaaatgatttgcaaaataaccagaggcacaaagtctattgtgatcagtggatatgacagaatatattttttgttgttataccatcactttcacaaaactatggaatatatatataggcatataggtgtgtatgtatatatatgtatagatatgtgtatagagacataatttatagaaacattcgtaataaacccctgccaaacatattttgcacgtttgaaatattagttgattggatttgtggtttgtatgtaagttgaacaattaactgatgtgatcattctgtttccatggctgttaccttagtttataccaccttttcacctgagtgattacaatagcctcctgattccttgtctctttatttgccacgttcccttcttcaaacttcccaaatccactttcccaattgttatcaaaaagagttttcctaaaatgtaagtcagataatgctactcattatgccaaattctcattgccccaaaagtgaaatctgaattctataagatgctctaccaatctctccattaattggcctctgcactatctctttacattcaccccttcccacccaccgaacccacccatccctcaagaacgacattgtacgtactaatcatgtcatacaagtcactattctagcttctgttattcttctggaaatgtcatctcccacctcaactttttacccagctaactccagtttatcatttaggtgatgtctcctttttggaacatacctagaattgacgttacaggaggaatatctcttgtgtgtcatctcaacatcccacagtaactatttttttttctttttgttttctttctttcttttctttttttgagatggagtcttgctctgtcacccaggctggagtgcagtggtgtgatctcggctcactgcaacctccgcctcccgagttcaagcgattcttctgtctcagcctcccgagtagctgggactacaggtgcgtgccaccatgcccggctaatttttgtatttttttagtagagacggagtttcaccatattggccaggctggtctcgaactcctgacctcgtgatccgcccgcctcagcctcccaaagttatgggattacaggcatgagccaccgcgcccggcccacagtaactatgttttaacatacatcaaaccactttgcaatttcctgtttacatgtcattatccctcattagtaagcttctaaaaagtatgggcatttatccagttccctatcatctccctagtccccagcacaatgcctgacacttaagtaattacgtgagtaattaaatgagtaattatgacacattcaagcttgttaaactctaaaacttggaaataaggcaaaagaacaagtagatgttcttttattatcatactaaaaagtattgtctaaaagatctaccgacagatagtttaatttgttagggacatgcgtctttgtataacttagtactaacttaaaagataatttttttgtgggtacatagtaggtgcatataatttggaagcacatgagatattttgatacagacatacaatgcatagttatcacatcagaataaatggggcatctattaccttaagcatttatcctttgtgttacaaacaatccagttatactcttagttatttaaaaatgtacaagtaagttattattgactatagtcaccctatagtatttactattgattagggcttagattctgagaaattttacataaatgtacacatttttgttcagtagagagacaagtaatatctttctggcaccctcaaaatatataattttattgcactttttgatgttaatctgttttgtttctaacttagcaatcttgttctagcttctttttctttctgtgactatgtgtgttcagtcccttgaattcccctttgaatcagttttaatttgttgcctgttttgttattagttagttgaataaatgtttccatattatcaggatatgtttataagggaacagcaaatttacttccgtgtgttttaaactatatgagaaacactgagcttggcatcaatagctaattctaggggagaaaaaaagtcattctcgtatatatttggaaaaacagtttttattcctttttgagatattaacagccatttgtatgttgaagattctgagaaacttggaggtgatttaatctgttttgctttgtttaatctaaaatttcaagattattttggttctaggaaattttgctctagaaaaaacagtttggaaacattggtttacttatagctttaaagaacaatattttaaactacaattcttgtgttcgaaatgctgtaaaaatcatttctattaagatttatttcctctaagtgttttgcattcaaataaggtgaaattctgggtctccaaatatacatttcagaaaagtctttgtttagctgtagggaaggcatcctgacttctcatcattatagtcacatagatacactagatttaaaggatatttaggtcgggcgcggtgactcacacttgtaatcccagcactttgggaggccgaggcgggcagatcacctgaggtcaggagttcgagactggcctggccaacatggtaaaaccccgtctctactaaaaatacaaaaattagctgggcgtggtggcacttgcctgtagtcccaacttcttgggaggctgaggcaggagagttgcttgaacccaggaagcggaggttgcagtgagttgagatcgtgccactgaacttccagcctggggaacagagccggtctccgtctcaaaaaaaaaaaaaaaaaaatagagcgtaattatatattttccttattttaaaagggaaaaaatactttccttattttccatatagagtatatcaaaataattacaatcattaagtaaaactaacatttacctgtggtctaaaaaagtcggttgaggccaggcgcaggggctcactcctgtaatcccagcacttcgggagttagaggccagtggatcacttgaagacaggagtttgagaccagcctagccaacgtgatgaaaccccttctctactaaaaatacaacaattagccaggcgtggtggtgggtgcctctaatcccagctacttaggaggctgaggcagaagaatcgcttggacccaggaggaggaggttgcagtgagccgagattgaaacactgcactccagcctgggcgatagagggagattcagtctcaaaaaaaaaaaaaaaaagaaaagtcagttgagatagtgaagatccaaagatatctgctaaaaaagtgtgtgttatctagttttaaaaagaaatgatatgcaaataaaaacattagtgagcagttaaatatttaaagggtacgttacttacattatgggtgtaaagtgtaagtggatttctgaaaacatgagcaccatgtgaacttcagtatttaaacaagtttattgcttttggcttttggatttattgtttttttgaaaatgggtctgagaacggcctagaagaatgggtagacttgacatctaagtctatctcaattctgctcttgagaaaagaggaagaaattgctcagaatgttctatcataattttcttcttgctctttagatttctaaatggctacacaggtattgagaaacacatttttatcttgttatgaacactaaaattcattagccttatatttcctctttccttatagctgtgtcttgtttttgatggcttaacacttttccattctaatcaagctttgtcatgggctatgggctgaagtgccttgtgatggactgatttactttcagtccctgtaatctgtgcccttgaaggctagaggttgaaatcattaaggctctgctgttgcccttgatctctgctcaaagaggctagagattgattggttgacagtggttgacctggacgtctcaaaatgaagccgtgatgaaggaaaatcaagtacacacgttcagaatatttcataatgacatttattctgcgtgcattttttccagcggtatttttgcttctttttttaaaaaaaatctagtttaatcatttctagcccaccctcaccactaccacatgtttattccatttctacattctggggcacttaagaccttttaattccttgaattagtcatttataaatgttgtctgaatattctatcaaagcaaggcagcatagagaacttattattacacacttatcacatgaaaaaattatttattagcaaatatctattcagagcaaacattttgatcaaagttggcctcaattcactaattagttattatgcaaacataacaaacatccaatagaataaatattcactcttttctacagttttttttggaatggtttcagtgctggaaaaaaaaactaaaccaattcatgtaagaaaaagtaaatgtctgttaagagaaaagaccacttttaaatacacgttttaatatttctattttaatttctacttaaaaaggttaaggaggaatattctaaagacgaatatatttgcaaatactgtgggaacactttattgaaccaatttgagaactaagtcaattatattgaatttacatatttggttaaagaaaaaatgagaagtgattagattagttcaatatttaagtgaacttaacagaagtatccaagttcatgttgaccctattgcttcgtattaatattgataattacaaatatacatatatattaattttcaaaaatatagattatgagtgggtaataatagcttctaaaaattcactttggtactattccatagtggccaagtttccttttgttctctggagggaggtggcctaatttaggcaagtttagtatttagagcaaaaaaaaaggcagtctatgcagagattcaatggcatcttaaacctgccccacctatctctcattttttacattgctttttcattatcttttcctttcctttcgagagacttgaatttaatattgtctctcttttccccatgtttgccttttataaatctaagcatttctgccattaatactgtaggttaagaaagtggcagccaccatatttaaggaatagtaaaatctgtaactggggaaatatacagtcttctgagaaactgaaataaatttcaggtaaaaagtatgtgacgtcaattgagtggtgcacgtcgagggatacaaacctaaatacattccaggatgaaaatcgtgataagtttggagctccattttcagggaagtttctgtactgactttagaaacattgcaaccaaacaaatccttgggaactgtagaaaggactctttttagtgttcaggctaagtagacaatgcctacatatttaaagtttcatttggcagacttgacacagtaggcttcatggaacacaagttatgccttccttggtctgagagagagaagactagttctgctcaactgaagttaagatctgaggttcagtgagtccatatagatatcatggaagattgagtgaatacactggccctaaagcaacagaaagagcacaagttgagatacagttttaatccccaatgattggaatcaccactgccagatatcacatcctaattacacattctgcccttcaagctctggcaatacttttcttgcggtgccccctttctttagtttgccatatgaagagtgtggtaattactttccctgcagttgtttaccagttctcattcatttttcaagttttcctttctctctctctccttttttttttttttttttttttttagatggggagtctcgctctgtcagccaggctggagtgcagtagcatgatctcggctcactgcaacctccacctcccgggttcaagcgattctcctgccctcagcctcccgaatagctaggactacaggtgcatgccaccatgcccagctaatttttcttgtatttttagtagagacgggatttcaccatgttgggcacgctggtcttgaactcctgacctcaggtgatccacccgcctcggcctcccaaagtgctgggattacaagtgtgagccaccgctcccagtcgaatttttctttctctaaacaattttcagtgtaaaggtctgctgtgctataaatttgtgacacatgattgtgttgtagttacgactacgtaaggctctatggacaggtttcctttagttctgccagcacagctaaccagctaatataaatataaagaaatgcaactgttgacaccaaatgcagtttccgtttgcctgaacaatcaacaaataaacacaaaatctgaataaacattacaatgtgaatctatgtgtctgtatccataattatataaaattgaattattctaaagaattctatgtttcttaacaaaaatattatatgcatatatacagttaggtttaatagatttgtataagcatttctaattcttagcttccattgatcttcagtgtttcagaatatttatttcaaatcacttttggaagaaagtaagtttacaaattgtgaaaataatacacaaatcagagatccctatttaaaactaatccctacatcgcttcatcaaaatgcctaaaattcttttttggaatgaaattcacagagaattgcaagattcatttcctttacacttttattcactgccaataacttggggatactaagagtgcaggagaagcaggtaattctgagggcgttttggaggaaagcagttttgcattggctaagtttttaaaaaagattaaacatttaagtgccttgttttaaagatttgaatgataatgatttcaggtaattgatttttaagctatatggtaataataagacaaaaataattcatttgtttccttttggaaaatagattttttaaaagataaagatctgttttaatttttgtttttatttctaaggtactgtccaacctaaaaatatgaaagtaggtgtgcataagcttttttaaaaaaaaatcgccagtagtacaaacaaattttatagtccatcatttgcagggctggagggcttgccatatttaaatgtgtgacctgttttgagtatttgggtcaaagagaagggaggcaccagtgtttaaagtggcacaaacagagggaagaatgaaaatacaatcgaatatattcatttttattttcataaataaaagaaagtttaaaaaatctaggtacatcagtaatgttcccttagatagtattattatgtggctattgtttactctcctttgtcagcaacacgatcagtgattttcagcacctgctattgggttaataatggagttagagaagcatgagtttcaatttgtgctcatctactgcaaagtagctatatgaacttgggcagttacttaacctcgctaagctttgtttcctatccatacaatagggtcaagagaagtacctctcttacaaggtctgtgaaaatgaagtatgttcatgtgtttaaagtgtttagtaggtggcacatagtaagcactcaaattatatggactatggccattaccttgacaaactatattctctctccatttcctcatatgtaatgtggattaacacgaagattaaacttaaaaagtgcataaaaatctcagtgtctagcaatttgtagatgttcaacattattaaaattccctcctcaattttgcttactttgctgtactgaatgctatgtgagataggaaaggatatcaattatttgctatgccccttccgggcactaaataaatacatgtttttgttcattcttttactcaatctaaaagttattgagcaccaaataggcatcaggaagtatatggacaagtataggaaacaggattgatatttacaatcaggagaacaattttgagcccccagtcagtcacttgatgttatcctgggcaatcaatggatagagtccaaccactctaagcctcagttttcttatttctacatgttgatagtattaatagttgttataagatttgaaacctgttatggactatagtattttgtgcagacattagtcaaaatcataaattattttggggagcacatttacattcctcacagtgaagccttgggccctacacctttgcactaaattatacatctgtagcaggaaaaaaaaatttcagtatcacacaaatttaagtgggctaaaaatggtattttattaatttttctatagctaaattaaatttctattttggttcctcttttaatttaacaggtttcttaatataccattctcaggaaatcttaataaaattcagtgacttttcaggtctaccggtcacattcaggagttgttaggactctagcctccactctaggattggaataacacaggagtattacttagcttcatggcatcagggccaacttctgattctaggtcaaggacacacagagatgtgacatccaatgtggtctgtggggaagaagatctttgcatgcaggcattggctgaagtgaaccagtacctgcatcccgcccttagttgaactgcctattctgcctccaggatttggggtgtctgtgtcctgattaccacacccttgaaagactgccagcttgctcctcctaacttccatgaccttctcaagcaccgacacatgttagctgcttatcacaaacctgatgagatgctcagacccctgtgaggctaatctacatgcccagtccctttgctctggttgggcactatttttcagcagctccagaacctccttctcttctttaggactttggttccctaagaggacattataatgttcctcttatttgaaaaggtgtgtgtgtgtgtgtcagagggtcaggaccctccccacacccccacacggcttctagctctcacttatctgtaactctctcaacttccccctcttcttctcttggtaggcacctagagcaggtaaaaacttttaaacaggattcttctatatctgtttatgccagaatcatggttcacttacactaaaagcagttgacctctgtcagtgaaatcaagagttgattttgtaattcaagagctctgtatttataaacaaccctaaggcagtgaggaaacagtgcctaacttaccttacttgcaaaggatggaacttaagaatgtggttacaatctcacgaaatacttgtgtgtgtgtgtgtgtgtgtgtgtacgcacctgtgtgtgtgtagttctgaagatggcattgttaggtggtggaggcctataatattatgattctcaacatgtgaattgttatcacaggcaactaatcctattgcctcaggtttacaatctgtaaatgggaaataaaatgcctaatgtttgttctcagcctagttgtgaggattaaatgcaaaatacagcctcaacaaatgtgagttcccttcctcacattcccttgtaaaaaaaggactttccccaccccccttttatttagcatatcaacaattactcctttatttgggactgaacagccttttactaactatccttttgtttctcattttttatattcatgcatagtacaacttatgaaatattttaccccaaatcctcttgggtctgctttatatgcataaccaaataaggcatatttttatacaactattgtgttttatcttaaggtaaatttcaagctaaagtgaaaaatgaattccttctggtattcaggcagaattttccttacgagaagtaggtcaagaaacattgaacgcagaataaatttatctctgaatacggctcttcagctctggattgtttaaggatggcctagaatctacgctgagcattctcttgcatctcctttttcagtatggttctgaattagcactcgggcataaagcatttccttggaattgctcttatttttgtccccatattctgcactccatcgtcaggtaagaaggcaatatgtagcagtcatttaagaaaccagcacataaattatttccgaagttaaatcaatgtgcatcttactggttcagttcacagttaactagaactgctggggcttgcttttatgaattgtcccattccctccttgctttctttttgagactgactcttgctctgtcacccaggctggagtacagtggtgcgatctcagctcactgcaacctcctcctcccgggttcaagtgattctcctgcctaagcctccctagtagctgggattacaggcatgcaccaccacgcccggctaatttttgtatttttagtagagacggggtttcaccacgttggccaggctggtcttgaactcctgacctcaagtgatccacctgcctcggcttcccaaagtactgggattacaggcatgagccactgcgcctgggctctctcttttaaacaatcataaatatgaaattaaatgggctgactggaagcaaattggtctgtaggaacgcccatgaaagtgttccattctgattgttttcccatcctgcagcccctctggcctagtggaagctcctttcgttttgcagatttagattaactggggtaggtgagagagggcagggatggcaggccatttgtctctcatcaccgactgaaaagttgagcctaatatataccttttgctcctctacccaaatgaattacaaaattctaattccctcacacaccggggcctgttgtggggtggggggaggggggagggatagcattaggagatatacctaatgttaaatgacgagttaatgggtgcagcacaccaacatggcacatgtatacatatgtaataaacctgcacgttgtgcacatgtaccctaaaacctaaagtataataataaaaaaaagagttgattgtttttataatctaaaagtaaagacagtttggttttgtcaaaacttctttgttttctatttattttctctatagcttctaaatttgtgttctgcttgtgcatgcgtgtatgcttgcatgcatatgtgtgtgtgttttccttaaagagtaggcaaaaaagggcagaaaatagatcattcccttataaacctgacaagtacctgtttgtttctttcactgtggtaactggaaggctggaaatactgagcacttcagtagtcattctaaaaagattggttcatgtttaatttgtttgactgcccaaacctctaatggttcagtgaaaccttcgtgaggattttaagaaatagatcaggtgatagtttcagttgaagctactaaaaaaagcctttttgttcatattattttattagagtgggaaattgggaattctaaaatgttcccacatttgtcacccgtgttactctggcagccttttgtcatgttcacattttccctgttcgtttgttactgctgctgaatgtactttaatgattctaataggagctatagattgtgcagaagaataacaagcttcaaattaaaaaagaatatatttgcattttgtggcttctaaatattaatacaattgaattgtttttgttgaccactgtacattgacttcccagggtccggtgcatagcaaattcatagatgctccataaaataattatagaaccatgcattcgtgtgtgctgtgttgtggttctgggtactaaggatgtctgcctgagtcctgaatgagtcttaatctccatccaagttgtgtgtttcagagttgggatggtgcaaggaatttgattattaatgtaaactttagataactcatagcatgaataacaactgtacagtagaagaaaaatgcagaaagaataaaaaacacaaacaacagctaaaacaacaacacataaaaaacctcaaataattagagcaacaggctgtgaatgcatttagcaaacatatacccttcacttacttttgggaatccagtaactttctcctctgagttcaatgaaaaatcagtagcacttacgggtgtgatcattaactttgtttacttttttagctttcaatgacattcacgtttgtgttgagatttgttttttctttcctgaacattttatcccattcgccaatccagaaatgatagaataggaaaagaacaactagggctttatgcaagtacagtaaaatctattgatgcccctctacaaaaggctgcaaattggaatggctgaaatcatctgctcgtcttttgtgttgcattttaggactatcaatgaaacttgaaatgatatattaatagaaagtttgaacaggaattatatattgaaaatgtgacagaatgggtagatccaatcatcctaggctgttgagaagggaatatgcctcacagtcttgtactttttagatgaagccttccaatttacctggcagcccacctcatggctcagtgtttagtcatatagcagaggttgttacaattacaaaagttctcttttttttccatggaaaattgatcatttggagcagtagattaatttatttcaattttaaagtatgagaggcatagaggtacattaaaaagaacaaagactttgtagtcagagacatctaagagttgtgtaaacctgagcacataagtagcattttcttatctatatgatgggatggggttggggtaagaatatatatcatataggcagttacaaatataaaccacacatcacgtatggattttttttttagatgaactcatttatttgacatattaaattagacaaagaaatatatatgtaaccagataaaaacaatcacattctcatactacttgaacacaccgcagtggtcaaaaataatggattgtaaaatggaccccaggatttaatgcaaaaaccaccccatacgagaaaagtttcaggcttctaacttcactgaatccagtactaaacgtgcttctttatattcctcagcttcttccaagtctttttcactttctaatatctgttgaagatccaaatatgcggcttccaacctgcgctggcaatctgggatcatcatccgggattcttgtaggatctctgcctgctttttgatgtcataattttcaccatcttcagctctcattttttcaatcttttcttcttgttgttttgcctctttttcatacatcactttttatttgaccaaccgcttcaccacaccggtcttgatcttgatctgtctcacgcgaggatcggccatggtccctcgagccccgcgagaaggaggggcggaaagccggggtaaccgtggagggcgacgcgcagaggcggtagctatttaggcttggtcgccggcgcgcatgcgcaggctgcgcggccacttaaggagtttttataataaatcattatagtgtcataccttccatcaaaggattgagtactcaggtgtgaacattggtaaacaatttttccaatattaacatctgtagtattttaaattatgtgtcattttaaggtactgttattctctttgtaatttaacattttttataatagaaataattttgcaattgctacattaacattttgagttgattattgcttattgttagcaattccattgcatcattttacagattccatcactgtgctgaaacatcccatctgtttgtgaaagttttggatgttttctttagtatctagatgaatctattccttatcttatcagtcagagatattttaaagtccttgtctgttagttcaagcatataggttatctcttagtctggttatgttgatggctttacttcttgataatgggtgtattttgcttagttttatttattttttgcaagtctcattttctttttagtgaatgttagatgtcatgtatagaagaaaaatagagaatgaggtaaatatgtttaatcttggaaataggtatagctttttttctgtcatactgctagtatggggtttgagtcagtggtgttagtattgagctggtttggaggggcgggggttgttgttgctgtagcaaccttcagaacactacagtcttcaaagacctccactgatgggctgctgctatcccgtgcttaatgtaatagtgtctgcggtcctaaagggatttctatcttcttgttccatcctcagttttcagcaagccttatatgcctgtctctcccctagtggtaacagatcattctgtttttattggtgcagaatcctgggccaaagaggttatcatactgctcttccaaagagggtatcttgaccctctctcagtggcttctaccttccccaacccctctgaacaggcgggtcccatgggtggtagagtttagtatctttccttcagtttagtatctttccttaaatcttacgccttttagaagaggagggtctggaaaatgggtttgacttcatgtttgtgtgtcactgaggggagcttcttcctatctcttgtcctacgccttacttttttgcaagttcccaatagaagtttgtggaaaagaattccagaatgagtgcagactccttcggtctgcatttccaaggatgctgaaatgtcataccagcccacacctgacttttaagaatgccttacaattggagctattttctttttcctgctcctacgatgactacttcttcctccagttccctgccaaaggtaaacctttcatgtatccagtctctccttggaggagattgaagtactttggctcacctcgttgccttgtggccacagctatataaatggctcaaaaaataatacgtttttatagatcaccctgctttttctcattgggtggagcaacgttcttatatagcatttttacatcctaagcagaagaggaacttgattatgatggaaagcgtaagtattttaccctcttgggatatccacattcgacatgttaatcattacagttacccttactttagatggaaacaatgaataatacttatttttattagagaaaggccgtagtagataagtgatattttaaaaattgaatttaataaaaatgtattgaggacctgttatctgtgaatcacccaatgggaaaagtcatgaaaagctgaagaaaacacttcattgtatttcagagcttttaatttaaaggtgaagaaaaaaggtgactcaaaagcattttgtatattcagaatccatttgtgaaacctaatttgtgatgttgaaactgagatttggcacactgtccaaaattgcattcaaaagtgtagaacctgctgtcctggcctttttgttttgtttgtttgtttggtggggtggggtggggtgggcgtaggaaggaaaaagaaaagataaggagtgtggtattgactgatagtttattctcaagtgcagtcaccagggagttcgaactgacttctacttttgaagttgaaacatggaagcagggctccaaaattttgtatctcattgaagtaacttagaatactcacacttttatgaatgattgagatacttcctaaaaatttaaaccatgatatctccaacaacggaaaagagggaatatgaaacccccataggctacgggtgtcaatcaaaatagtcttcggagaaatgaaatgttttcttcatttactataaaattgaagaaaaaatttcatttttcttttttttcttttttgagacgaagcctcgctctgtcacccaggctggagtgcagtgacgcgatcttggctcactgcaacttctgcctcctgggttcatgcgattctcctgcctgagacttgcgagtagctgggattacaggtgcatgccaccatgcccggctaatttttgtgttttttagtagagacggggtttcgccatgttggccaagctggtctcgaactcctgacctcaagtgattcacccacctcagctcctagagtgctgggattacagatgtgagtcaccgtgcccagccaaaaggttcatttctcaagttttacaaaacttttcagtcaaaattcacatatctactgtcacataattcatactcaattacattccttcaaaaatgctctcacacaaagtttgaacacatcgaggcaggtggtttgaaacatccatcccaaagttgagctgggagtcaaggtgacaagaatggcccatgagcagtgagatgtctaccaatgccgggctccggggcaaacaactaacattaagtgcaaaggattaaacttgttaattaggagaaaataaaagcaggcatttgcttattttattattgagtttatattaatagtaatcacttccattcatattagatgcaaaggaacttttaatattctatgcactgacttaaacttatttcttaatccctttcatctccttataatgatgcatatgagattattggaggtttggaggtatgcactaatgcaaagtgatgagctgtaaccaaaaagtaaccaagaaaataaaatcacaatttcatgcatgtatttatatttgtcttctatggcaaaccatggggatattgaaatatgaaatttcaaataccctctttattatgttagatgcattatttttaacaatagaagccttaaataaaatattaagatacatttgtattttgacacttaactgcccttggcattgtgcatttaaacttttggtgtctagcaaagttaaagggagactgtctttaaatacatatatattgatagtgccattttgttagacatgtcatctttcgaatgtaatgatattgttcacacattgattttattgatgatgttaaatcaaaatggtttctgcaattagtaacttctataaaacaaacatattaaaaggaaatcatacttcctattgtagtataccaatttatttttccatttaggaatagctatgctccctctcatgttttgttttgtataccttactaaattaaatattcattttattctttaccagtttccatcacagacacaatcagtattatttaaatttcagcaagaaactaaacaagacttacaagtttttcagtgctaatgatttttttttctcattaagtctgagtctaatgaaactaaacagaaagttctggttggattccttggtcacccctatctgtgtttgtgaattcctataattggcatgaattgaaagttcttgttatcactgatagtaacccagagacaattccaatttgggtttaaatggccctatgcagacaagggtaactgaacaaaccaaaacagcttcatgtgtttatggcagataaataccaattaagtactagaaatgacatcagggttttttttttttcctgtatagtttcaagttaagagactttttctcccttgagtttgcagatatagagcatcatgaccttacaagaggaaggagagcaacttcccatctgaatgagagatggaaaaattatatgaaatagaactaattctactgttaagcagtaaactacttattacttgagtattaattaggacacttggctacaaataacttataccaaatttgaactatctttatcaaatgtggaatttattccaaaggatacgtttattctaaggattaaaatgtttctcaaggcaggttagggcaaattgcagtacacctcagaaaatgcaatcaaaaccttccaggactctctgtcacatctccttctctctaaactatcttttttattgcagattggcttccgctgttcctcatgtagcagaccatgattgccaacattcccttatatttatatctcgcagttgaaggattcagggagagcctgattctaagacccaagtctaaattctttaaatacatacgtatgtatgtgtatatgtatatgtatgtatatatatatatacacacacatgcattcatgtttagatagacatacacagacatatatgtgaattacattgaattacatatgaattacatttctatttaatgtattcaatgtaggttacaatgcaacgttatagaccttttcatccattacaggtaggaatgtggtttaatatggaatttttgagaagtaatttgaaaatatgtaccaaaacttacggagatgatttttcacctaaatccattataatttttgagactcttttctaaggtaataatcccacatttgggtggaggctttatctatattgatagtaattgcaagactattttaatagcaaaaattatgagaccatttttcaaggttccaaaaaaaagcagaacggtaatttttatgggaacaaagaagacaatgcttctagatatttaaattgtgtttgaacaacattggaaaacctgttattttaaatgaagaaagtaaggtgtctaactacttgtgcaatgcaattacaattatgcaaggaaaatgcaaaggaaatatatcaaactttaaatcctaaagcttttaatactcactttttctctagtttctaaaatttggctaataaacataaatttaatttataaattaattgaccttggcattgtataaacatcagggtaaataatgcatctgtctctctgtctctctctcgctctctttattcaactttatcctaaagcatcatactaattacaatctattggttttagtttgactcctcagctaggttactcaaacaatgaaagactacttttaatctctgaagatgtttctttatcttgaattttgatttcctaatcaatgaatacttgtctaaatttagtattaagttcacacacatcttttctcttttttggattactttgccaatcaataatgttcctcttttagcggttactggttatttctactgatctctgctgagagtttattctcagacactttcataccacgctttgaaaatactggtttccaagctgtgaattcactgtatctatgcagaaaggagtgatttgtttcttgtatggcatgatgttttttatatcctgtgaaaaccatcaattccacatttgagtggttccttcatgacatgggctgctctaactaaagaaaaatgtgcattaaaaatatgtgtccgattaaggcattaaaatatcttaagcagtcaggtagcaaacaaatctttctgagttccaattactgtattacattatgtcaatacttactgtcaaagtacattacagaaaaaggctgggctcttttcagaaagggcattgcaatataatgggtgacaagaaactgcatctgtgtatatggaagcacaagaaactaacaacaacaaaaaaatagtgcccaatcctaggtggctgaagagtaatatctaagagaatatgaagaaaacccattatttattccctaggccagataaggagccctggctttctctggcatagctgcagtgtatataattatacctctttcagtgccaattactgtgtgtatatccataaaaagaatggtacaatggtgacagagatgaagagcagatctcttaaataaacatgtaaaaaaaagcaaagtaaagaaaaataataaaaacaggtctattgctgttaatgccactgttccagaaaaaagtaaaacagagatcattaatatccataagagccagaataatgtctatatttttcatccaacatttttcaaaccatggagcccttttagaatctgctgatgactgtggactctcatatatacacactcataaaattttgcccacaattttaggggtttattccatagtcgtattgaaagcccatagatttcaggataggaataacaatgttgattactcatttggggccagacactttctatgccatataaagataatggcttatttagtcctcacaacgacactatgagatagttattattttagtacctattttacagatgagaaaactaaaggaaagaaaagttatgtaaataaattgagaaaactcagccagtaagcggcaaaactggactttaaatccaggccgtatgattccagagcatactccaacaaggactgtaaactgcatcctgcagaaacaaataaacaaacaaaaacctagaataaagaagcagatgatagagttttagaactggcggaacacatagaaattatcttttccaaattctatgttttaaagttgaggaaattgtattccacataattaaatgattaacagaagcccatagagcaagttagtgttagagccagggttcaagtgggaacattcatccaaagctcatgacaaagctacaccgatattattatcattattctacaggtgaggaaacagaggcacactgttaataagtagcagaactacctttcgaacccagataggcaggttcaaagctaaaactaccatattactgtaattcaggaaagccattccctttataattcgtttagtaggcgctcggaatgatcaaatctttaaattagaaaattcgaatgtcttcaatttacaaactttggaaattctggagattctactttacaatcattttaatgttctctaatcaaaaactaatgttttcagtgtgctacaattcatgaattttatattcatatcagaatataaaattatacacatgcatatatgaactttatatgttatatatgtatgaagcttatgtatgtatataacaatatgtatatgaacacaacctgaatacatatgtatatatagataaccattcaaacattttaaattggctatagaggaaagcaatttgccatttgacttaaagtcttttgtaatgactagaatttaaaataaagtttacaatttatgaagatgaaataaaactatacttaaaatgctgtttttcgaaacagaaaattcccttaaaacctcaaaatctattgtttgttttatataataaaaatccaaattttttctacaatgtctaaatcttttgtaattctgttatattttcctctacaagttcaactcagtgatacctaagtgcaaacaataaggctagtatgagagctttttttttttgagacggagtctcgctctgtcgcccaggctggagtgcagtggcgcgatctcggctcactgcaagctccgcctcccgggttcagccattctcctgtctcagcctcccaagtagctgagactacaggtgcccgccaccacgcccggctagtttttttttttttttgtatttttagtagagacggggtttcaccgtgtttgccaggagggtctcgatctcctgaccttgtgatccgcccacctcggcctcccaaagtgccgggattacaggcgtgagccaccgcgcctggccaaaagttacttaatttgcatgccaacctacactcacatctattaaatgattagtcaatcaagatatagacaaaactcatctattggcaatgtacactgagggacgtgttctcggtgtagtcctgtcaccgatcttagtacagaaataaataccttttttaatccagtggcataataaacctgagaaaagagaagtctttcattaagaatcttggaagaagcagtcgttaaccacttgtcatcagtattagcaactcaagctgaataaaaattgattgtgtgactctggaccttctttgctctgccacttggataatctattagcattggcacctgattaactctcaaaactgtctcctcttttgattagctcccaggatttcttttgtattctcagtaataattttccaaacccttttctaaaagactgactctaatgttcttttactgactgcaaagtttcccgtcagtgctgaaaacatgtttggccttcattcctatttataatttttggcttgatctttcataaacactggcttaagacttccgtatttggtgaacagggagtgaatgattactccgaaactttatttctgttttaagtgctttcagtatttggcacaaggtggaaatgagcaggctcagtactgaccattgctattacaataactcactgcatttccttaaaacttattttccacttaaattgttttctacattgatttctgtctgtgctaatacttggccatgtatgagaacaacctgcttgttttaatgtttaaattttgaatggtatggtaaggagaaagaccaagatttaaaagataatatattctgaaagggcaatttttggaaagcttttaatacttcatttaaaacccattcttcagcttattttaaatttaatgatggaatacaaccctctcttttttaaatgaagaggttatatacattccatcattattgaattttattctatgggccacatttactatttacctgctatattagtcagctttattataggctaatgctctgtaaaaaacaaatccaaatctcaatgacttataagaacaaacatttatttcttattcacatgtcaggttcaattttgtattgagtacaggtcagctctatgcatctctccttttaggaacagaggctacctgaggcgtgtacttcccctgacaaagggaggaaggaccaagaaaagtgaaaacactttatgattcttaagcccctagctcagaattgacacactctcatatctgactgtgttccactggtcaaggcaagtcacatgaccaaggccacatcagtgagtgggatgtgtaatccacccatggtgaaccatggcaagtggaaaggaggaagaaaaagaaaccgatgagcaaataatgtaaactaccaacttgttcaagaagttctaatgcaattaaatatatagtcaggaataataatactgatctctattggcacttactttgtactaagtctttgcttaagactactttcgatgctttacaggatacctcatcaaagtgaagctaagagtttttttaccacgattatttcctcttttcagactggaaatcttgggtttggtgtggcttatgagtcttttctttctttgttttgtttgtttgtttgtttgtttttgagatggagtcttgaactcctgtcggggctggagtgcagtggcatgatcttggctcactgcaacctcagcctcccaggttcaagtgattctcctgcgtcagcctcccaagtagctgggatttcaggtgtccgccaccacgcccggctaatctttttatttttagtagagacggggcttcactgcgttgatcaggctggtctcgaactcctgacctcatgctgcgtccacctgggcctcccaaagtgctgggattacagacatgagagactgcacccggcctatgagtcttttctaacactgcataactagtgcatgatcaagccaagaaatgtgggcccaaattccactacagagagcagacaataacgatgctcctatgggccattctggattacatatcccatgcaacaattgaggagccctacagggcatgcttagcaattgttccattgtttttttttttttttgtcctttttaatacatagacttctgtccctcgtttattgagggttgcccctgggagaactaaatctctatcacttctggactgccctgcaaatgggcttaccaagccctcctaaactgaagaaagccttaacacaaagaaacagagagatgtggatgcttgtggtgaggaatcttcagcatccacagaatccgttcactatagttataggtgaactcagggatggctcggtgaaataagggatgaggcattatcctcatctactatgccattttattaacctttactccatagtgtaagttgagtaaatacatcttgtgatttaaatatccccttataatccaggccctgtgtttgaccatttgtctgtttctaaagcatctcattaacagtatgtttggaaatggctgttgtgtgtcgtgcacatttggctgtttgctttccttttggtttgcaaagaagtattttgcaacccataaaaatagataaatatacaccacagaacaatgtatttttttaaattttcaggggagaatttgaatcttttaaaagtaatattgagtaggcagctgtatggaaacaggcatctagttagcagttctgctacaatatccaagtagttaatttcacctctaaattacactggagaccttgaccttattttgatttattctgtcataattagtctatggttattactttaacaaaaataagtcatctttctcatgaacactaccaaagcacatttcaagtctgcatactaattaatagtaacttatttttactcctaacaagtctacacccacatactcatgtttaaacaagatgagatatttgaaatcactttataaattataatgcaccacagaaatatccattatttccattattactaaaaacttacttcattcttttgagcatgaggaggtataatttatgtgaatatcatttcatattttgtttttatctttcaaatcgagaagacttgaattttttgcatatttacaaatactataaaaatcctactaattattaacatggctgccacgtagcaatcgtgtctattttatgaaataatgtcatttatacagaagacccacgggaagttgtaatatatttggaagtaaagatttataggttttgtctatttttttctctttctcagcattaatatgtcatacatgtgtcacatttagtcttcacaattcagtatctttattactattaccatgaaacaaatagaggcaatgagacacagagaggttaagtaacttactcaaggccacagagataatgagatgtgaaactggagttggaactcaggttatttgactctgaaatgagtgtatgatgtaaccccggcctgcattgtatctaacacatgcaattttaagaggataagaattaactgtttgcacaatctaccagatggcactgtttttccaactgagaccacttaacaccttttcatatactcttggagttctgatcattcttccactctaatacatttcttcaatctcattgtcattatgtcctacttcatgcaacttcgattaattcttcacaagtatatttctacaatacttgtgctatgtttccaatgtatagagcattgcaatttttatgaatatacaactatgcgattatgttaggttctcaccataactccaatttgctaatggagcataaattctgtgattaagtggcagggaatgggagagaacttttattcaatatgagctgacatggctttccaatctggtttctgagtccaacaactccctacaataaaaaagcaattgacctacctgagaaagaagtggcgtttgcagtggaggcaaaggaacagacaggtcatccatagcattttacattgtgtcagaagcatgacagtcatgaaagatgaagtaaagggcaattatatcatattacagagtgaaattcacctagagaaataaaggcagattgtttgcaagaaatattctttctcttaattttttattcattgtagtgatgaaaataagtagcaatatttcagttccaaggctaaattttggggagaagtcattgaaagttagttttatgtctaatgggtgctcaatggataatttaggaaatgaattggtgacagaaggtctataattaacagagtagtttgagcagtatgatgaagtgcagggggaaagcattggtctaggacttagtagatctgagatttaattacagtattgattagtcacttgatttattcaacaaacccttactaagtacctatttctgcttcagtataccatgtttggtgccaggagttgcaaagacataataattctcccatctaagtgtggtcacatttaggaggtaatgagtgggatttgggctgcattattggaagacaacaaactaattttctgtttgtgtgtgtgtatgtgtgtatgtgtgagtgtaagcaagatgagatatttgaaatcactttataaattataatgcacacacaattaaagtatctgtgtgtccatacacatacagttaaagtatttatgtgtgtaacacatatgcataattagaaaaaagcctacacatatgtatatatcagaaggattgattgataagttatgccagggagataagtgtgattgtgaaaaccctcacattcgacctagatcttaatagtgagtgtcctcattctagggagtgcatgaacaaaggactaaagcaagaaagcatatgatttatttatggagaaatttggcttgtgtgactaaggcagacctggtagatgtatataaggtttgggatatgggtgactgccaacaggcctaatcgataatatgtttagaggagtacactggagtcaaattgtgaaggcccttatatgccattctgaataatctagcctgtaacctcatcagagaagctctggatttttcaagttagttctcttaatatatgattgtaacagaactgtagtttctccatcagggaatttagctttatcattgattatccatgatccaactcccctaactccacatataattaataattagtacttaccaatactaccccgtaaacacatcttgaatgcacctactccttttccagccccactgccattcattaatgcaagtcatgcttacttctcacgtggattataggtataatcagctcatgtgtcttcttatttacagtttatccccaaatattctctacactgtgaaatttatttctaaaagccaagcctgacattgctatttccctacttaaaattctgctttgatttcgaactgccctctggctatattttcaggctcttcataaataggttgatgataatttcactttttctagggtcatctctgccatttttatcctcctccaccatctctaggtctgggaaaggaccatactctttctctcacatcctgacactttcacctgctcttttgattttctggagttctcttttctaccacttgtctctctgctcttaattaactttcaaaactcagctgagatgtcacttcatcaaggaagctctggatttttcaaggtagtttccttaatatatgattgtcacatgactgtagtttcttcatcaggcaacttatctgtatatttgtatcaacatacccttttgttgtgtctgcttctctcactaagctagaaggaaaaaagctagagacactgcctttctcacagttgtttttctaccacctagtaggtgtcagtacacatttgtcacttaatagccttaaatatgaaatgtaatttattagtttcctattgctgctataaaattaccacaaatttagtggcttaaaattatatacatttattctcagacagttctgcaggtcagaaatccaaactggaacttactggactcaaatcatgatgccagaagggctgtgtacttttggatgctccaggggagaatctgtctccttgccttttccattttctagagaattcccacgttatttggctcacggccttcttcgtacatcttcaaaaccagccacctcggaccaagtccttctcatagtgctttctaattctccccttatgccaacatttccccccttttaaggacccctgtgattaaatcctgcccactcagataatctgggataatctccctatcaaaagttagctaattagaaagtctaattctatctgcaataattccactttgccatgtaacataatttattcacagatgtcagggattagcacgtggccatttttgaggaggcattattctgcctaccagagtttaatagaattaatatctgcagaggagaaaaatgagaagaggactaaaaagtaaatctggtcttcgttaacttaaaacacctttattgagcactactatgtaacacattctatgctaagtgctgggattacagctctgatccagacagtcactctcttggaaatgagaaaggatgtaggtgatgttattaagaacaacttttgtaggatgatgagcagtgaagactgcattacattgactgtaaagcgaatgggaaataaagaaatatctttgacatgaacagcttttctgttcttcgtgcagaagtttaattattttagacctcctcattgtaagctgaccactaacgtcacctcaggcggtagaaaaatcccataatcaaagactattactcagatttaatagaaagcatttttcataccattttccattgcagcctcctccactctgcactgccattttgtaatattaatggcacagtaaatccactttctaaatatgtcctaaatttgtttccttcctttataatgctccaaaatatcacataaccttatctaatgtttatcattaatcttccatatttttcatttttttctcatgtttgatggaagcagagaatagactgaacttaattgctctcccatattacttcatagttctttattttcttttctttcttttttttttttttttttttttttttttttttttgagacggagtctcctctgtcccccaggccggagcgcagtggcacgatcttggctcactgcaagttgcgcctcccaggttcacgccccagtagctgggactacaggcgcccgccaccacgcccggctaattttttgtatttttagtagagacggggtttcaccgtgttagccaggatggtcttgatctcctgacctcatgatccgcccacctcggcctcccaaagtgctgggattacaggcgtgagccactgcgcccggcttcatagttctttctttaagtgaaattaactcatcccattgcatttcttcactacgtgagtttctaaactggtatcaactttaatattcccttccccttttaaagatacattttctgtgtcacattagggatgaagatcttcaattaacatattaactagcccccaaggaaatatcatttaaaaaatgtttttctaggccgaatgtggtggctcatgcctgtagtcctagcactttgggaggctgagacagaaggattgatggagtccaggagtttgagaccagcctgggcaacatggggagaccccatctttacaaaagaaaaaaaattaaaaattagacagatgtggtgatgtgtgcctagagtcctagctactgaggaggcagaggtgagagaattgcttgagcccaggggtctgaagttacagtgagctgtgatggttccaatgcactccagcctggggaacagagcgagaccttgtgtcaaaaaaattttattttcttgtacagattatggttaattgctttgtgtaatgggaataattgttagtgtttatagaactgtttttctgtttttttttttcccccagtttttaaatgctttcacttacattgtttatctgatggcagagaagaggtcttaaggaggctctccagcatctcgctcctaactctcattgcaatttcattccatgccactccctttctcacattttagagtgcaacaaaacagaattgcataatgaatgagcgtgtactttcagtttcttatcactctgtccttgtccttactgtctgctcagtgagattcatctttatcctcctcctacctttattccttctttactttctctcatccttctgaactcaacctacccattaccttctccaaaatatcttttctaacacccatgtggctacatattcctttctccatgctcctataatacgctttaaatttatatatatttttgtttatgcaaaatgtttcatatttatctatgatgtgtctattatctactaggctaagagctctcccagactgaatcttgtttatattttcagtaactagtgcaatgtccaggtcatagtaagcattctgtaaatatttattttataaattattacacgagtaaatgatctcattatatcctgtcaatagctccatgagttaaagagcaattaatattctcatttcacagttaaagacgctaaggcttggcaattttaaggccacaattctaataagtcctgcaaagccactggaagccagttccacagatttaatgttccctcagtttgcccagtatcattcttctgcagtaacttgctcttgtgaatcaagaatattgcaatttaatatatcccacatttatattcctgagggactaaggaatataaaagttaataacagggtaaaagttcattgtactaatcttaaaaaatatgaaaggccacatatactgaataaaaataactttattagaaggggttaaagattactgagaggaaatacaatttttatgtcatgttagaaagctaattttatatgggatttccccgtagagagaataaaataaaacgttggtcagtttttgcaatttatgaagtagtggttcttcacttcttgacatctccagggaacagttttcaagtaaattttcctaagagagattttcttctttgcctctcttattaatatgcacatgcatgtttttattagtaaaataaaatcagttataaacaaaccctaaaggaaatgaaatagaatatgtgctgcttgaaatgactaaacaggagcatataatcattttgtaataaaacagctatcactttattcttttctcatttgctttgttgctgattgcacattaatatgttttactatagactatgtgactacagaaatagacatcatgttaacgtatcaaaatagtttctagaacaatttatatatgtgtgatgtgtatgtatggtggctttaggttaactaagggtatacagcttaaaatagtcaacttttaagcaatatgacaaatagcaataaaaatatatcaattcaagtaaatacgtataaaattttagcatactaaaataaaaattaaaaggcatatgaccacttgggaaaatatgtccattcactgactaaaagtgagtagcttaattttgatcgttaacttggattttatggttataggagttttctgcaaggaggtcagtgaactctatgaaactatatgcaaatatgtatgtgtagacatttttctatagagaaggttcattattttcatcagataatcaaatggagcccatgacttgaaatgtttaagaattaccaatatataattatctcattccaattaattttaaaatattaaatgctcaatagataaatgagccaggatgtaaacaagtattttgacaaaaataggaacatacagaataaataaatgcatgaaacatcttctacttcattagtaatcaaattaattatgattaaagcaaacatcaaggatctccttacatctaaacaaagcagcaataccgtaaaagactaaagcaacgaaactcctatgaatgacatacctgcggctgagatgataattcccaacctcattctttctgctaccagtagaagtgggtgtgatcacttggaaagtattataaagatatttagcaaaagtcataaaggttttcataatgttgaactgataattttttcgaagacaattataaaaacaaaaaagaagtgagtgcatgagcatgtttattgtgatttagtctctaatagcaaacaaaaggaaagagcagcttatatgagatttatgataaaataagtgaaaaagaaagaatattattttggttataagaaatatgtatttatggggaatttaaaagtgtggacacaaaaattttgattgatttttggatgttaaaatgtttccataatgatatataagacgaaaattgaaataccaaatatcaattagtaaatgtaaaagcattattatttgaagtattaacaaccatatcatccagcaccattaaagaaggctcattattcagttctagatcagttcatacagacaaataagttatgcattgccaaattccaggacgctattcacataggttacaacatacatggaacctccttgagttgttcaaaatagaagctctgatttcatggttgttttgcatttgcgttaatatgttcaccttttgtgactctgattatcttatggtattctgtattgttaattatgcaattataatgtaaatgatagatatctggtcaatgtgaaaagccatggactttgattcagaaaatctgtatcaagttcatttctgtcacttaatagctttattccttctcagcttgtgtttatgtataaagtagtaaattacatacagattgagaagacataattaaaacaaacttatgaatagtaaggcactaagaattgttatgtattttataataataatacaattaattgtattaataattattatgttgaagaaaatatatgctactataccaaaataagacaataattcattgaagacatttttcttgtattaaagacgtagaggtgagagaggacaactagcaaagatgtttatatgttgaagctcacatttagtgttatttacacagtaaataagtaacactttgcacataatgtcaaggttttcgtgctgccttcgatgcttacctaaaaattactccttgtccatataattgaaaagaataaaaattttattctactacgtatttttcacttaaaagcctctagattaaatcacttcaaaagacctcatattgagcttttggcagagggttttgggtatgtttcaaagacatctgaatgtatgctttcaactgactcatttactctctgctttctgacagaaagtacgcatgcacatgtaggaaatataagtggaattgcaaataaggtcatttacttttaggaatatatgtatatactactgataaatgatgcgttgaccaatcttcctccataaagtctatgaagatggtttaattttgaccatttgaaatgttccatttctttttaaaattattttggaagggctagtattaattttatgaaagtaaagatttgaaggaggctagaataggtttgaaaactattactatctgtttttatttattcacccttgtcaacaaaggaaatacttccatattgtagctaagatttatcatataccatatgaataatgttgatattgaacatacatatagaagcttgtgtgaataacataattaaataagaaaaatgtattttgtaatgctaaataaaatttctcacctaagatgacagtttgaaatttatttattcactgttatttctcatattgactaaaggaatctacttatagattagtattgtgatttaaagataaacagatatttttggtgcatgcatatatttgttatgcgaaagtgattccttatgtttttaagagaagcaacggagatttactactgaaaaatatatgagagcaaatatgattactttgtaaagggcattttaataacggttcttttaatccaagtagataaaatataaaatttatcaattttaaatatctctcagatgcattcatttactgaacattaactaatatgattatatttacaataattaaaaaaatagtcttttgcttggagaaaaacattttaatatatcaagattgatgatttttctgtccatttgacttaatactaatttccagtttaggggcaaaaagatcatttgtagaagcatgaattcagtgaagctgttttttaataatttttctccctaatcccttagtataaatctttggggacttttttctttgagtatttatatgtaaggcatgaagagtatcatttgcatttttatttgaaatgttctgacttttagatgaaaagaggtcctagaaattttagagttgtagaatctccccttccttaaagcatgcacgtatttgtcagatgtattttctgagctcttaatttgttcagacagtgtgctaagttctgggaagcaaagataactaaaccatgctcctgctcatcaggaaacctcttccatagtgagatcaggcccatgttagagtatgtagatgctgcaaaggaaggaataatcatttctccatggttgggtggatggcatggggaaaggctccgaaatagtttttcggagtaaatgacagctgagagtttcttttaattatactggagtatctattcataactggcgaataaatactgttattcagaggagactatttttttataatcatacagtatttgaacgactatgggtttggtcatattaattgtttttcagatattacaaatctgaggcgggatcttgctctgtcgcccacgctggagtgcagtgccatgatctcggctcactgcaacctccacctcctggattcaaatgattctcctgcctcagcctcccaagtagctgggattacaggtgcatgccaccatgcctggctaatttttgtattttcagtagagatggggtttcgccatgttggcctggctggtctcaaactactggcctcaagtgatccgtcctcactggcctcccaaactgttgggatcacaggcgtgagccaccgcgcctggccatttttcagaagtaattttaatttggatgccccaaaccagcatcactcatgtttaattccatttatcaatgaatgtaatactaaatgtaaaaaaacactaacacatcataatggaaagttactttggttgtaaaatatgaattatatttaaagttgcttcctaacttttatttttttattttgcattttagatgaaagagaagatgttcaaaagaaaacattcacaaaatgggtaaatgcacaattttctaaggtaagaatggtttgttactttacttttaagatctaagttgtgaaattttcaaaatggactatgtacctgtgtatcttaaaaatccgttttatttctctcatagtgtcattttattttagctgtgcaaatctggaaatattatgttcactcttatttaaggagtaagcagcagaagatatggcaaagatacactatttaattatataaaatgtatatctttgattcttcttgacaatgtgagtttctttaatgacatgagtcctcagagtttatagctgcaatcttccatcaagtagctagaatatgtcacccagcagaagaagatatgagggaattttgttgtgaaaattatcatttttttgtccctcttggtctttaccaagttcaagaaaagcaatataattgctttgggtgtattcagccactatagtttagagcatatttcaaatgattaaagacaataagttcatcttgtttttgtgcaggcttcaatccatactcttaatatttacttaatttgcaaatacaactcaatttttaatcaatagcgtgactctagatgattataggtggacacagagcaagatattcttaccttgaaaactagtattaggaatgcaatatatggaggtttattgggatgtcaaagtttaaaagacttgcattttaattattattctcgatttgggtaaatcaatcaaatgtttggtgagtcggttttcttatgtttccatcatgaatgtttgtatatgtatatattgattgcttaattgagacatcaaatctagataatggaaaaataaagctaataaaatatggcccttaaacccaaggctttaagagtggcatagttttgatagtggatattttgtttcttattgtaatgatttaaagagtcactaaaagtgaaaatttctactaaaatgcctgaaactcttaatagctatgaattactccctctatgggtctgattttgtaaaattcatgataatggagccaaaacaatccactaggagatccaatctcaaaagttctcccttttctatgacaaacatttttagaatatcgtctattctttgtggtatttggtagtagaatgttgccatgtactctttaatttaacttactgaattttaactaataaaagttcattttatttacttgctgaataattaacaaatttctattacagacgtaaacagaaacatgtattttaaaaacgttttttaaatcctcaactttttttagctaagtgaaataaaatataacaacacaaatatagaagaataaataaaaagtaaacctaggatatttaggaaagttattcataattctccgaatatttataagatggttatatatagtttaattgctgtatatactggcatcattgacatttttaagttttggaattctgaagcagacaagagacatattttcaaacaaacatacagacaaatcagaattgtgaagaaattttctgaaatagtaaatgtaacaatactctgaatctttgaattgaactagagtaatttttaaaaggtgtgtaaacatgacaagtactgtgtatcctcattcccgcaagttgaaatagatcttcgctctgtgcattaaccttttccattatcatttatcacaactcacctgttaatatagaaatcaaagcttgatatccaatccatcctctatttatatattgttagcactgcctcagagcaattcggtatatttttttctgtccttatgaatgcccatatcttaaaactgtaaaatattcacatatatgagcacatttattgttttcttccaaaatatttgcatcctctaactcaactcacacttttcatttatattacaaatgttctccctaagtctgttataactgatcaggagagtcaccattctttcaagtacagaaattctattatcaagcatatcctaggtgtcaggaatagaaataaaagtttacaaagacagaggagaaaacttatttaaaggtaaaatgtatatatacctgtgcactaacttctaattttgagaacttgcaaagaatctttttcctcttttcttattcttttctgtcaaaacttagctaagtgactgcattcttttagacacttttgaagaagatgggaatttagaggaagctagttgattcagtttaagccacttggtgaaaccaaaagataaacataattgtgatatatatatcatttggcaatttattgcatcgctgcatgcctttcagcagaattctagccctgtaggatacacagattagttgaagtggaatctcctgaactcatggaacctacacagttatttgggagtttttggttaattgataaatggagttagaactgagtgggctcagtgtgggtggtctgagaaggcagtaatctgagctagagggaatctggtaacctttatgaagaaagctctaaaatgtgagcccatcaaaggcaggaatgtatatcttctatataatctcattgtttattactagtacactatataaatataataaatatactaggtcagtagtacaaatcattaaatctatgctaactgtagaaacagaagaaaaactgggtggaaaaattgtgttgaagaagactttaaaaagagaaaaaagagaatgaaaaattctgtctgtgtggtaaattagacacaggcacacacacattcatacaactataaaaatgcctcactaataaatctaactcatattcatttttatagtcgtattaatgtctatctgtgtctactttaccacacagacagatgataatttttcattgccttttatacacacatttatataatatttgtaaattatagagagacaacaaaatatttccttgttattttgtaaagctacggaagggatatttaaaggaaataaatgtgattaaatgtatccttgttgttgtggcgtcatttgaagccaaatgtgtctttgcagtaaatctaactgattttccactttcctggtaccattttaaaaataagccctatctctttttaaaataagtcttctattaactttgattccaaaaaattctactagaatgtgatttatcacatctattatatagagataactgaacaatatttatctccacataaacacaaaaccatttctagataagattaattcagagtaaatattctttccatgtaatttattgatatgttataatcctttaaaaagcctcgtgtatactctatgacaaatatgattcgcattataaaaatcttgctcatccatgccggcttaataaagggaagtacagttttgaaaacatgaccaaaaataattttgtcataaaatgtgcttgatgtttgtgtttgagaaaaaattttatgggaaaaaatatttactgccagctcaattgagagagataaactatctcccaatgagtgatatgatggttttgatcctatactgaatttagtaatcatctttatttccatactcactcttctgtctgatttttttccaacatagtatgcatgtttgacttaaatgaagtagaaatgcataattagttttgtctaatgtcttcacaaaagcccatgatatgatagtgttcctggaccaaactgaggattgggctgcttattcttgtggcccaataacgagatgcagatgaacgggaaaaggagagagtttttatttctgtaagtggttacagggagaagacctggaaattatccccagaccaactcaaaactataaagttttccagagcttatataccttctacgctgtatgtctacatgtaagtgtgtatccatctaaagacataaatgattaacttcttctgatctgtaactaagatctgattcctgaagacattcctctggagcctcagtaaatttactttatctaaatgggtccaggtgctgggatgattacccttatcttatctccggctaaatcatggagtttgggggagttccttcagatgcccagtaaacttgtttgtggagtcctggggagtttcttcagacccccaataaagcttttttaattctaaaagggtcctgttaagaattccttcattatcttgtcatgcttcaaggcccaggaaaggcctgggcaaaactcttggtgggcttttgttaccgtccagcctttgtttaagggcgctggctctatcagcttttaatatgtaactttaccactcagtcagtgctgaaacagttgttgtggaggcctgcattagtgagacctggcctgccacaatagttcatttacctcttcattgccgcaacatatatgtccacattaaaaatccaggactcaccctctttgggcaatatcatgtgataaaataaattgatatgacatacttcttgcaagatttctttttaatttaccttttagccagcatgataagcatgatgtagggtaaattaacactaaacttttgagtcagtaaggtagcctttctttttttaacttttattttaagttcaggggtacatgtgcaggtttgttatataggtaaacttgtgtcacgggggttggttgtacagattatttcatcacccagatattaggcctagtacccattaattatttttcctgatcctctccctcctcccaccctccaccttccgataagctccagtgtgtgttgttcccctctatgtgtccgtgtgttctcatcatttagctcccacctataagtgagaacatgcagtacttggttttctgttcctgcatcattttgctaaggataatggcctccaactccatccatgtccctgcaaaggacatgatctcattctttcttatggctacatagtattccatggtgtatatgtaccacattttcttggtccagtctatcattgacgggcatttgagttgattccacgtctttgctattgtaaatagtgctgcaatgaacatatgtatgcgtgtcttataatagaatgatttatatttctctgggtacatgcccagtaatgggattgctaggttgaatggtagttctgtttttagctctttgaggaatcactacactgacttccacaatggtttaactcatttactctcccaccaacagtgtataagtgttccattttctccgcagccccaccagcacgttattttttgataaagcaggcttcttcacactactctctaccttaggagaaaacgttatatccatactttaatttatttgaaaagaaaggtgaatataaaattgaaattctctgagtcttatttttcttatatgttcttgcctacttgtaacaaaacatataataaaagggcattataaatagtaaatcatataaacacaaaatattcccatttttgtcattatgtaatgtattttctgaattgaattgaaaaatgcatatatttatgaatttttttctactgaatctctccttcttatttacttctattcttttccatgatgttacctggtcttcttgagaacatgatattttaattgtaatcattgtgttcctaactccataatttcatgatgctattgaaatgcacatgaattttgattctataacctagtttgtaataagccatatttccttgtttctctacattggttgaatctgttcctgcagcaactagtaaccccaacaatctgactggtgagaaattcaatctccgtaacattttgcattcttctacttcttcccacttccattccaaagggccaggtagagtccagaatactgtaagtgtcctggttttcagtgcattttggtcatagctgatatgcttaatagccaagtaaacatgactacataaaggacagcttgtccacaatgccctgccttgcttgaacacggaaggttttgctgatgatgctctgtgcttggtatctggcctctacagccatttaagtaggttgtctcagcacaacatttggaaactctgtaaagggagtaggatgttggccttcacaacttcatccctttccctgtgtttgaggaagctcattaaacctctctttaatctgactgattgcaaatttccactgtccccgaatcttaactcccatatcccaatagcctgttcagttgggacaatatatcaatccttaacatgaatctagattttcagaactaaagtttttgaagggtgattttcctctggatacttgttcatttctttattgattatggttttggctaccttcttggcatcaaacagggaaaacagagcatttattcatgtgttactatcctattacactctgtatgccaattcatgtcctcaacacgtacacacaaacacacacacgcgcgtgcgcgcacacacacacacacatacatatacacacacccagtaaacatattctatatttaaaatgagcttagaagtttttaaaaaaggatgatactgggacaaagtggcaaaacattatttcagtgaaggaggtaacaatatatatgtacctttccattgtgtaagtgaattctaaatctgtatatagctaacacatttatatataactattgtgcaatgtgcctgctttaacagaagtaatcgagcagagctattgtgccatggaaggttttacatagatctaaaatggctcctgtgcccctggcttcctgtttgtttttatctgataataggaagaattaaatcattagagcagatgacgtacagtgaactatgtctctggatgctgatgagcagcctgcacaagactttggtaacaattgaattatttagtgcaattattttggagagatgaatattgatacaggaaacttacggaaatcctcgtttcagaaatagtgaggattgggaactttttgtttatgtataccatgatgttaataatcctactgaaaattatatgtatatggttagttgctccaataatcatatgatacaagtattcaagatgagtaaaatgtgaatttatgtggcttgctcacagtaaataggagagatgaagctaggacccaagaaaatggactctaaaactcatgatatttccatacctattattgttgggacaaaaattccacctacccaataatgcatttttgggacaaatcatcaaattgataagtcctatgagaagcaggcaggggggttggagacagtgaagactcaataacaggtggtattaaatgctcgcttactcacagaggatttaatctacctttgaatgtttagtaaccccaaaatgcaaccattgtttaggaagttttttagttgattctttctgaatgatttctaatacaaatgcccctcaacttgtgtggttaggtccctataaacccatcataagttgaaaatatcacaagtcaaaaatgcctttaatatacctaaccttcgaaacaacatagcttagcctaccctactttaaatgtgctggcttaacactatcctagagctgggcaaaatcatttcacacaaacctattttataataaagctagctcatgtaattgattgaatactgtactgaaagtgaaaaacagaatgcatgtatgggtactcaaaatacggtttctactaaatgagtatcaccttacactattataaggtcaaaatatcttaagtcgagaactgtttgtactttaaatgttaatattttttacatactgcgttttggtgagtgaagtaaacttagtttgcagtagagttatctaaagtgatattgtcattttcaaacattgctttttatttctactactcataaacaaattattgtgtttacatgattatttgaatattaacttaaaacagttttatacgaaattcaaaataccactttactggcatgtgaactccctaacatctacacttggtgttaagatgacttgtcgaatgatgtgtttgtgtttggaatcaagatgattatactaaatggtttaatctactgagaaccattcccttgaatgttttcctgaaacaatctttgcaaagtacctaagtaacaaaggatattactcagttagtgagacaaaaatggattgtgataggtctcactgttttcaaagaaagacaaatcacttattgttaatagtaaagaagtttcttagaaatatgttgctgtttatcaacccagtgttactgagatcttgacaattccttttagaaggtaaatgttttggtctctaggttatcatgtcctgatacaagaaaattggaattattgattacacctatattctctggagtggtctcagtgccaagcatatttagcttgcatatgtaaatatttaccaattagcatgatagttgctagcaaaaaaaccaattctttatggctgatgggcctatccattatttatctgattttattttgctttctagcaaaacaacatacatggacattagtgaagcatttttatttagaaaagaacaattgacactctggtaccatcctatcagagatatatgtttactaaaataacctttcaacatttaacaaatacttattgaatgccagctatgtgctaatcatactgtcatacagtgatgaaggcataacccaacatggttttccctctccaagagattatcatctgagaaaggaaacaattgcatcaacaaataattaaaataaaacataatctttaatgcaatagaaatgctgtgggaacatagaagacagaatgactaattgcttggagaggataatagctttttaaaatatggtgacatttagtctggtgttgtctacgcagagacaatttcaagaaagatgaaggcagaaggaattgcatgtagaaatgtgtaataatcaaagaagtatgacttgtcaggtgagtagtagcaagggagatctttaggagtgaagaagagaggttgtgagagggcatataatgccattcttgaagaattatattgttgtggggctggttgagccaacaataagataatggcttagtcatgttaatttgcaacttctgattgaagactgtgaagctctaaaacaacaggcaatgatagaagaattagactgccccaccaccactaatgcttcatgcaaaatttggtctgaagtctaccctttacatttggcaatagacatagagacctaaaatggaaaagcaagcaggctaccatttttgtagagttgtttgataccatgcacactccaaaacgatgcagcaaaacgcattggaattacctagaaaatgtgttaaaacatggattgctgaggcccatagtcagagtttctaattccataggtctagggtgggacccaggaatccggatttctaacaggtcctcaggtgatgctgatgctgacggccaaagaaccacactttgagaaccacagtgttagaatttcagtaatttaatcaggtctgtagtagagaatgttggaggaaaccccactgaggaatttattgaaccctcaaaggggaatgacctttttccagttgagaatcaatgcaagtacttgatttaaattgggatttattttgtggggactatactcaaaaactgaatgagttaaaagactcaaaatcaatcaatctgatactgattgagcattcttcgtccaaaacgtttgaaaatagaaatgtttcaaattttggattttcgtttggaatatttgcattatacttactggctgagcatctcaagtccaaaaatctgaaatccagaatgctccaatgagcatttcctttgtgtgtcatgtcagccctcaaaaggtttctgatttgggagcattttggatttgggatttttggatttgagaggctcaacctatacctattttttaaaaaatgtgtatatatatatatatggatatacatacacacatatatatgtacatatatacatatttatacacatatatgtacatatatacatatttacacacatatatgtacatatacacacatatttgtacatatatacacacatatgtacatatatacacacatatgtacatatacacacacatatgcatatatacatacacaaatatatgcatatatacatatacacacatgtatatatacacgtatatatacatatatacacacatgtgcacatatgtgcatatacatgtatatatacacatgtgcacatttgtgtatatatacacgtatatatacacatgtgtatatacacatgtacacacatatgtgtatatacacatacatacgtgtatatacacacatgtgtatacacacatatgtgtatatacacatacacacgtgtatatacacacatgtgtatacacacatatacacatatacacacatatacacatatgtgtgtatatacacatatacacacatatacacatatgtgtgtatatacacatatacacacatatacacatatgtgtgtatatacacatatacacacatatacacatatgtgtgtatatacacatatacacacatatacacatatgtgtgtatatacacatatacacacatatacacatatacgtatacacacatatgtgcatatacacatatacgtatacacatatacacgtatacacacatatgtgtatatacacatacacacatacacacatatgtgtatatacacatacacacatacacacatatgtgtatatacacatacacacatacacacatatgtgtatatacacatacacacatacacacatatgtgtatatacacatatacatatacacacatgtgtatacacatacacacatatgtgtatacacatacatacatatgtgtatacacatacatatacacacatgtgtatatacacatatacacacatatatacacgtgtatatacacatatacacatatacacacatgtgtatatacacgtgtatatacacatatacacatatacacacatgtgtatatacacatatacacacatacacatatgtgtatatatacacacatacacatatatgcacatgtgtatatatacacatatatgcacatatgtgtatatatacacatatatacatatatacgtatatatacacatatatatacatatatacgtatatatacacatatatatacatatatacgtatatatacacatatatatacatatatacgtatatatacacatatatgtatatgtgtgtatgcatatagacacatatacatatatacacacatgtgtatatatacgtgtgtatgtgtgtatatatacacacgtatatatacataagtgtatatacacatatgtatatatacgtatatatacgtgtgtatatatacatgtatatatacatatatgagtatgtgtatatatacacgtatatatacatatatgagtatgtgtatatatacacgtatacatatatgtgtatatatatacgtatacatttatgtgtatatatacgtatatatacgtatatatagttgttttaggttataagacttaaaaatacttatctgatgtatatatatatttttaacaatcctagttattttgtgtttcagggcagataggtgatgaataaagatattaatataattgtgttcaaaggttagaaaaaaacagttcgttgtggcattactattgactgtatccgcaaatttctttcactgcaatcctttcatgggctactatatatttttcttaagaataaaacatttccaattgacctacagagtctttcaatctctcttttgtgctttactttgcttcagcagaaggatttcattttagtgacactctgaaggtcttcctctgtgcttcacttaagggtgttgcatttttaaccttaccaagattcctatggattcctagaattatatttcaaattatgatcatggtagccagaacacaaagaattaagatctactctgacagtaatgtactgatataactttaactgtagaaacctttcttgtaatgcacatggagggcagacttgtatgtatcttggaacataaaaggcagagtatggtttttaaaagggctttgcttatttgtatcctaatttagctaatttcactatgccagttctatatgcagagataagtaatagtaaaaatggacaaaaagtgatcaataaacaagtgatcactttcggtcttgtccagaattgtggccaggtgatgagtgcaaactaagagaccttttcattagaaatgtgtgaagttactctttggtttagcattagctgtcttttaatgagaacaaatgagagttgcagatgaatttgctaaatgtttctttctttgatttagtttacctggcctgaagaaaaaaaaatgtcttcgatctacaaggtctacggagagtacttttcataggaactagtcctattaaaattacctgcagttattatgtcagtcagagaataaatattttgagtatcatatctgtacttgaagttcttatcctttacaaataatttatatttaaggaaacatgctttgacagaaatacacatgaagtctacattctctatctatttcatatcaggtgctctagtgttttgaatataacagttaagagatcaagtccctttaatcataaggccctgttagctagcgagctaaaccaaagagggaaacatttagcaaactatctgacgttctctatatttgtttgtcaacttgtttgttttttctctctgcaagtagaatatagaatttcagagagtgacaagtgctaagagaaaaaataaagcaggataagggtagaatagggatatttcaaagggtaggttgccattttatgtagtgggtcctggaaaagcctcacttaagaggcatacaaaaaacctgaaggaaggaaaggagggcatcttgcaggtgtcttggagaagagagttctaggcagagggaagaatatgtacactctgaggagggagtgcgtgtttgtgggataacaagggagtcaagatggctggtgcagagtgactgaggaagagcggtaggatctgcaagtggagtggtattagaaggacaaatcagatagggccttattgaccattgtaaaggtcttggcttgtacattgtgggagattaggagattttgagagttctgaacagtagccagaaataatgtaagttagaatgtaggatgtaaaggtagaagtagagagatgagttagaggataatgtagtaatgaaggctgggtgtgtgcgtgtggctaggattaggttgatgtccatggatctggggagaaatgatcgaattttggatacattttgaaagtagatgtaacaggatttgctggtggactaaaaatggagattgagagagtggagaaaaacagttttagcttgagcaaaaggaaggatgggatggttatttactgggataagaaagactattgcaagagagagtttggtggcaaagtataggtaaatttcccatggaaaatcattgaaaataattttagttttagtatgtttttatggaaggagtatttattttcaactcctaaaatttatcctcaagaacaagaataaatacatttatctctattaaaaaataaggaacaatgagagatgatacaagtgcctctagcattgtatgagtgtgtacaaccagtgaacgttaacttgtaaatccagtagcagtaacttgatctttgtctctcttctgatctgatagagtgcaaggtctatgtctacattcatttttttgcatgtagatgtccagttgtttcagcattatttgttgaaaaggctatctttgctccattctattgccattgctcgtttgtcaaagatcagtaaactgtattcatgtgggtctatttccacactattctgttctattgatgtatttgtctattattttgccaatacactgtcttgattactgtcatttcatagtaagtcttgtagtcagatagtgtcagttttccaactttgttcttctccttcaatattgtgtgggttattctgggtcttttgcctttcatataaactttagaaacggtttgtctatataaggcaaggtaacttgctgtgattttgattgggattgcgttaaatctgtagatcaacttgaggagaactgacttctttacaatattgagtctttctatccatgaacactgaatatttcaccattcatttagttcctctgataactttcatcagagttttgtagttttcttgtaaagatcttgtatattttttagatttattcctcagtattttatttttgaaaatgttagtggaaatggctttgtgttttacatttcaaattccacttgttcactgctggtgtgtaagaaacaattgaattttatatattaatcttgtgtcctgcaactttgctacaattgcttattatttccagggttatttttcgattctttcagattttctacatagatggtcatgtcatctatgaagaaatacagcttcatttctacattccaatagatatgtctattttctttgtcttattgcattagctaggacttccaatatgatgttgaaaaagagtggtaagagagacatttttgtcttgttcctgatcttcctgagaaagttttcattttctcaccactaaataggatgtcaattataggtgtttttgttcatttttttatattgtcatgaccttgttttataaaatacaattatttctctcctaactttctgtggacctcaattataattttcccataattctcttctgcttgcattgctcatgttttctgtcttcttcccatttgttcttatttgctttattttgaggaactgtttctcattattgaagtcattcctcaaattacaagtgatcttagcttttggtttatatttaagtgtgagatactaacatttgataaaattaaaatctatttcatgattaaagtacatttaatataaaacagaattgaataattttgttgacatattatatatatatatgcgtgtgtgtgtgtgtgtgtgtttgtgtgtgtgtaaagtccaaaagtttgtacattacttaaagaagaaacatctgatgcattctggataaagacaggaaaaccatatgagtactacagctacctccattaatacttaacattgtgttgaaaatattagccattgcaaccagacaagataaaccaattcgaggcaaaacaattgcaagcagtggtaatgggatcccaatttacagatagaattgtttacctcaagagatcacacaaaacaataatattaacaaacacaaatatgaacacaaacaaataccaataaaataatttagtaagttagcagactataaaatttacaggcaaaatcagtaaaattcattttataggtaatgagctagaagtttttatggatggtgcacacccatttgcaacaatagcaacaacagcaaaaacaagaaacacatttaacaagaaatttcagtacctatgtttaaaactctcctgaacaacccaaaaggaaatcaaggagaaagatgctccttgttcctgaaaagcatggcttaacattataaagtaaactattgtttttaagttaatgtgtaaattaaaggcattccaatataataagtagtatttttttctggagttggataaattgattataaactttttataaaaaaatacacaagtaaaaataaccagaaaaacactaaaaataaatatcgatgaagggatagggaaacataaaattataaattaaaacttagggaaaactatcatattaaatataaattttcaataaaaactaacaatttgttaaaatgtgttttgtaaaaatatatttctatcagctgggaaggtctggtagtaatgagtatacctagcatgcagatattcattggtaagtctcattccacactgaaagaagtcacagctcattagaagaatatatgatacttcatcctggccaaggaacatagtgggtgagcctgcagcctttgttagagccataaggcaaggaagtacttcccaaaatttgctaacatcttgagttgttcatttttcttctcctgttttctttatgcttgtagagttacacctttttaaaaggttttcttcctgtcattttattggaaaggcttcaaataatttttaaaacatatttatagatgttcatactcatatattttcctgatactgaaagagaaatttatgcatttagtaacaataaatgttggcctagattttctctgatggtctcttcaagaatctggagcgttctctatctccacaaaggatggaaatgtttcatttcaatatgccagttttcaagtaaatgtgatttagtttctctcttttaagaataaagtcatagcagaatgctttatattactgattgtagtatcataacttacttctgaaacatcgaatacaattttggaaggtcagcaatgtcctgttaatatttaagtatgcctcactatataatatgtgcatacattctggaagaagcatttaaaatgaagactgtttctaataatatattaaacgagctatgtaagtagagttttatgatagctgatattgtgattttattcagagactatttatataagacatttcagcatatctgctaaagaacaaacctatcatctaagtcagtaaaccaataatttgaattaaaaaaacggacaaaaagaaaatacgaagcaacttgaaagatcattaaatacactgcctgatagttaagattctaaacagttacattatatgaatagtttactgtatattatatattttctatttccactttgttataggtaagctaatcagatgtctcaagttataaaataatagcactaacttataaaagaagtgctacctttcttccactccccaaaatacacaagattttattcttcataaatgataacatttgttgtttgttttctgtggttgaaagggaagtacaggaatgaaataatgtattttgcaacaacttggatagaactggaggccattattctaagtaaagtaattcaggaatggaaaaccaaacaccgtatgttctcactcataagtgggagctcaactatgaggatgcaaaggcataagaatgatataatggactctagggactcagagcagggggaagggtaggagatgggtgagagataaaagcctacatattgggtacggtgtatacttctcaggtgatgggtgcaccaaaatctcggaaatcaccactaaagaacttacccaggtaaccaaaaaccacctgttcccccaaaagtattaaaataaaaaaatttaaaattttgaaaaattaggaaaaggaagtacattttcatgtgttgctctgttttagcacacctggtgcagaggtccctgaggaattttttctttttcttttttcttttttcttcttctttttttttttttttttttttttttcgagaaaaaaatatcacacatttgaggcaggagaatagggtctggaggaagggaacctaaggccatttcacgctgacttccctaggactaaactgaaggcaaaaccctaactttccacccctaagtaacataaggaccagaggctactccctttgcaaacctcccaccttttctgtgtagcagatgggaaattggctgttcccaaccaatcagactgattgcgggcccagtctttgcacagaagtgcaactttgtaacttcaccttagcctctgattggttgctttttgcaaccaatcagatgtttgcacaggagagtgtcctatgtaactctacttcagcctctgattggttgctttccacaaccaatcagaccaattgcaggccaccacttcatttacgtggggtgagcatgaagtggccaatgggaaacctgtagagggtatttggaccccagaagattttctttatctgggcacttgagccgctgctcagcccgctctcacactatggcatgtacttttcattttaaataaatcccttcattccttccttgctttgtttgtgcattttgtccaattctttgatcaagacaccaagaacctgggcaccctccactagtgacacactgataagatcttattatattgggctgataattcacctacacttttaccttctgaatagaaaaggcacttgattagagatgtatatatctaggtgctgggatcaactatgccatttgcaaagtaccttacttcttgagcaagaaggtaaccaaaaggggaatgaataggcaatataatttcttttaaaaatgaattagtaagctcttgtggttacaacaagaggactgttgttttggttctttcacaattttctatagtaaaatttgttagtattaaagtataatgttgatgcctatatttttaaaagatataaaagtagagattttaaaagagaattaaaaaggttttgagggaactgttttagattaagtaagataatgaagagaaacaatgcttaaaatattagaaaaaaagacttatgagaaaagtcagaagtactgaaactgtctagccaaagtagaaacgaaaccaaatgatacctttctcattcatattaattatttgaatgctttggttttgtttttctttattttatattctgttagacgctgtctttcttgtcttcaaccaattcttttctatgtaacattagacagtgtctaataataatacacaaaacaaaaaagttgtaaagaaaccacccacattttctcttcaaaagaaaaaattgtctgagaactctgaatgtctaaagtccttgaataataatgggaaatggaggatggttcatgagtgtttttcagtattagcaaaagactgacaaaagcatgagtttatcaacaggaagtacatatagtcagacttatagactgaaactgttcctaaagctgtgtgtccctgttttagaactatcaccacagtcactgaagccctgggcaattcacagacattgcaaaatcaccacagtccctgaaggccaaagaatgagacacaggagtcttttatcatttcataactcagtgtgcccattcttcctaataggcaggacccagcatctgtggtcctcaatacaaccatttagaaagtcacattgtagtcactccttttgcttgttctggcagggactgaagttggagcacaaaaaatcttgtaaaattcagttcctatatcagggtgtttccccctttttatcatgaagtcacatgtcccatcctgtgtcttaacagtaggtgattattagaagagtagctggcacacagtagatttataataaacaatggaataattagagtgcctagcgcacagtaaatttataataaaaaatatagaataattaatgatgaagaaatgaatggtagatgtagtagaatagaaagatatataggaatcctgagaagtttggcagcacatccaatagaaatgtattgcaaaaagtttatatagtatttacatttcttatagcctcatttaaaaactgagaagaaacaggtgaagtaattttaataatatttatttaactatatgtaaaacaaaaatattatttcttcaacaggtaatcactatatcaattagtattatttattgcattatttattgtaccacctctctaaattccgttgtgaattttacacttccagcaaatctcagcaacacgggatagccactattcaggtgctccaaagccacatgtggctagtggctaccacattacacagcatagctatagaggggtcttagaatattctgactaagtcaggaagggacttttgtcacctccaccaacatcccatgggtcagaacccagttatatggctaaacttaattgcaaaggaaactagaaaatgtaactatagaggaatctttaagaaactattggtcagacaacctaagtgtaatgtgacaggatattatctaaaatcttaatttgaaacaattacatatagttgatataaaatgcataaaatagagaaggatgtactatttttgaagccaggttcaaagtgtatataatgaacactattgaacaaagcaagatttaaaaaaaattgtgaattgaataaaatatgtatagtaaatgtacactctattatgtaaactaaagtatgtttagtataaaaacacccctatactaaaactcctttcaatactccaaagcagtaagaaaaaaaacacaaaatatacatttaccaatcttaatagtctagcttataaactgatatggaattcgttacatgatccctgtttgaacattatgtaagactagcccaggaaatgatatggaaaaaggaatgaaaggtaactttcaacgaagttacatgggagagtgatcaaaagaaaatgtgactttttttccttaactcaacacgtgtacgtgacgcttcaagtatgcaacaatggatctgtgctcaagtcaaatgcacagaccagaaacagaaattggtcagaagacatttcttgttttttcggttttttttttgttttttgtttttgtttttgtttttgtttttgagatggagtctcgctctgtcacccaggctggagtgcagtggcacactcttggctcactgcaacctccgactccctagttcaagcgattctcctgcctcagcctcctgagtagctgggactacaggcacgtgccaccacacccggctaatttttgtatttttagtagaggcggggtttcaccatgttagccaggatggctcaatctcctgacctcgtgatctgcccgcctcagcctcccaaagtgctgagattctgcgttggtcatcaatgtttaaacatgttaaacgtaacatgttacatttaagtaacaatacctacataatcatgtaagtacattcattgccaacttaaaagggagtcttcaaagcagaattgtcagaacttttagcttccctgggccacactgggagaattgtcttgggccacacattaaatacagtaacactaatgatagatgatgagctaaaaaaaataaatctaaaaaatatctcatgatgtttcaagaaagtttacaaatttgtgttgggctgcattcaaagctgtcctgggcctcatgcagcctgtaggctgcgggttggacaagcttgcttcaaagctaacattttttctccaaaattttccctactgctatcgcgatcaatttgtttcctctgaagtgactgattttaactgagatatttttgtttgtttgttttctggttctgcatgtataaatccttcgaatagtgtaaggacactgaatttccagcaacttctgtttcgaaggttcacacttcaaactataacatgttgtgtaattattggaaaagtgtcctaaagcttccattattagcctataaactatagttttggaagagactttgcccaccattttacattactagctgtgagtgcctaacatttagtaagtacccaagaaatatgaatgttagaataaagtcatacatataagaaattctttacattgttcaactactggagaatatgttatatgtagtgattatttttaaaagcattataaaaagcatttcaatttgttcaagcatctcaataagttagttaaaatacacagaaaatgaataaaacaattagaatatatatgtagcatttgtgtgtgtgtgtgtatataaacatatatatgcaaatgtgtgtgtgtgtgtatatatatatataaataggtagagaactttaaagtaattaaaatctgaatgtggttagctcaagtcaggtaaatttgagaaaatctttacaaaagccatttgctcatactactcactctcagattagttgttcatcaggtaaacaatttgctaaataaacatttaaataaaagaaacacattgcataggggaagaaaacataattttacctctaccttgattttttttttttttttttttttttttgacactgggtctcactttgtggcccaggctggagtgtggtaatgcaatcttgtctcactatagcttcaacctcccgggtttgagccatccttccacctcagcctccccggtagcttagctacaggcatgcaccaccatgccgggctaatttattattttttttactttttggagaaatgagggtcttgctatgttgccaaggctggtcttgaatgcttgagctcaagtgatccttcagtctcagcctcccaaagagctgggattacaggtgtgagccaccgcatctagcctctacctttatttcttaactgggactcctataacaaaagagatatcaacaagaaaaaaacaataaagtttactaacatacacacctcatgtatacatgaaagatatataaggaaaaatgaataaatttctctgacaaagaacaatacgttttttgagaagtaacaagacaagggaaaaggaccctgagtctctatgagtggccaatttcaggaaggcaaatatatgggaaactgatggtagataaaggctagttaagaaaatttattatgtagattcctctgatgcagtctccgggctgataaagatctaaagttgtcattggtgatcaaactttgtcctttctgatagagaggagaggatggacacctttgcaaatgtatgtactgttttcaggcaaatagtgggagggcagagaacttatatctgcttcttctgaattgcctttagctcaaaatagtcctgtgtcaaagtggcatattttcatgaacatagagaatggaataatagacattggagacttcaaaaggtgagaggggccgggtgcggtggctcacgcctataaccccagaactttgggaggctgaggcaggcagatcacgaggtcaggagttcgagaccagcctgaccaacatggttaaaccctgtctctactaaaaatacaaaaatcagtcgggcatggtggcgcgtgcctgtaatcccagctattcaggagaccgaggcaggagaattgattgaacccaggaggcggaggttgcagtgagccgagatcgcgccactgcactccagcctgggtgcacagggcgagactccatctcaaaaaaaaaaaaaatggcgggaggctctcatgtaccccagaaatttatacacctacagtgtacccacaaaaattaaaaatacaaaattttttaaaaggtgagattgtggcaggggagtgaggagtgagaaattacctattaggtacaatgtacactattggagtgatggtttcactagaagaccagacatcactactatccaacatatgcatgtaacaaaactacactgtacctcctaaatctataaaaataacaacagaaaaaggcaaatatacatatgctttcttatagattcattaatctgttttatttcagtgaatgaaaacttttgacaatggctaaccttgaaaatatgttattagaacatgtttttctttctccattgtgccctatgagcacaacttgagaaatccagcaataaaatgcaagctagtttttttttttttttgaaacagtcttgctctgtcgcccaaggtggagtgcaatggcactatctcggctcactgcaaccttcacctccagggttcaagcgattctcctgcctcggcctcccaggtagctgggactacaggtgtgtgccaccatgcctggctaattttttatttttggtagaggttttgccatgttggcccggctggtctcgaactcctgacctcaggtgacccgcccgcctctgcctcccaaagtgctgggattacaggcatgagccaccgcggccatcaagcctgctttcttgacatattttgtgacatattttgggatggcatatttcggtctcctacagttggcagggcaatctaaagtactttaatatccttcttcatgatactttcaaaaaatggaatttgatgcctcagaaaacaatactaaaactttcttaaaatattacaatgtgtactatattacttttttaagtaataggacttataaatatttatttttaaaatttgtaaatatttaccatccacctttgattgaacatttttttctcattattttatccaaaaatgtctattgagacctttaaaatttgtattttgtggcaccatctaagacgtgatttatgctccttgtcattatttaatcgtcaaaatgatactttgtctttgcttaaatcagtgtgggtacatcgaacaaggtttgagagctactctgtaggactgagtcattagcctgtaattttacagcggatcaagtactacgttttcattacttggaaagaaaatgaccttgcaattgactcttacatttaacgtttttatctcagctttaccaccattaaatataactgtttgcactgaccacataagaaaccagaaaaatcactgggtcacagtttaatctaattcaatttaaatccgagctagatagctataattggcagtttaccatatcaaaggccagagttaagttacactcaaaattgtgttgatttggaagtaatttgccttaaattttcaagcattgttctgggggtactaaaatgctctttcaagagtttactatatggtacgtaatattttccaagtgttagatgatttatgaagtctacattattatctaaaacaaccaatgttgtaactaccatacaagtctatgaatagaccttatttcacttggcctatctcagggtacaggatcccagccttcttccgtggcaatatgcaggctgttcctcagcaacgatttctagtattgtgtgaaataatcatacttacaatactaacttcttgcttcccaatgccaagaacactcatcttgtttctattgaataaggtgacaggcatgatagaagcagggcagagccaagtcctgacagtaacatttcaagtacagagaaattcatatgagaaaaatggacaatgagggcttgttgtccgtgactttttgttccatgaaaaatatgcctgttagcaaaatcacataactaggaattttagataaagtttctatgtacattatttaaaagagtgctttatacggcatttaagttaaaaagaaagaaaaaacattcacattaaacctaaaagtaactaaaaagtcatagaacagagatgtcatacagatggctagcctttattaagtgtcaagcattgttataatggatttgcatgagttctttaattgcatttatttatcttgttttggtttggtttttgagacaagatctcacttcgtcactcaggttggagtgcagtggagtcattgcggctcattgcagccttgacctccaagccatcctcctacctgaacccccaagtagctgggactacaggtgtcccccaccatgctcagctaatgttcctattttttgtagagatgggggtcccctatgttgcccaggctggtctcagactccatagctcaggtgatctacctgctttagcctctcaaagtgctggcgtgagccacggtgactgaccttatttatttatttttaatgaacaagtaacagttgagtaatttatggtgtacaatgtgatattttaatctatgaatatattacagaaacattcaatcaagctaattaacatatctatcacctcactaacttatgttttgtggtcagaatgttgtctactcttggtgggaatgtaaattagtatggtcattttggaaaataatatggagattcctcaaaaacctaaaaatggaattaccatatgatccaactttcctacttctggatatatatccaaaggtattttaattgatttgtcaaagatatatgtgcactctcagttaattcttaaagcaacgtactgagatagacattattagtatcctcattttacatatgacagaaccaaagcagagaatagttaaataacttgttcaaggctaaacggagaaagaatcaggattctttttaatattttcaagattcccaagttcaaatgattaaacaatctattttttttttttttttaaattgggggcttccaccttttttatatttgttgttagtgggatttaggacatatcatccccaaatatggcaccttggcatttcgggaaacagcggaagtgagaaagtctctgaccttctgccaccattttcctctgaagcagatcagaaaagaattatctggccttgctctgaagtaggccataagacccctcatgtgtcccatacctaaaggaaaggaatgtcacactgggacacagagaagactgaacaaacaggctttgctacattcccccccaccccaactttattaccattagattacacccttttgttctccaatcatacttctgccaggttgtccactcttcatcaaatttagcataaaaatacacaggtctcccctttttctttaggtattcatttctgaatgctcctgtgtcctggtatcatttgtaaaatttatattaaatacatttgtatgcttttctcttgttaacctttcttttgctataggggtctcagctatgaaccttgtgataggcgaggaaatcaattttttctcccctacattgttcacaatccaatttaagagaaaaagtgagcactcttgatgatccagtaccccccaaaacacacagacacatgcagaaataaaacaaaagttttataaaaggtggcatttttagtatatgtagccacactttaataattttatttcattcttttctatttgtttttttttttcctttttttgagatggagtctctgttgctcaggctggagtgcagtggcatgatatcagctcactgcaacctctgcctcctgggttcaagcaattctcctgccacagcctcccaagtagctgggactacaggcacacaccaccatgcctggctaattattgtattttagtagagacggggtttcaccgtgttgcccaggctggtcttgaactcctgaggtcaggcagtccgcccgcctcagcctcccaaagtgctaggattacaggcatgagcgaccgcaccagccttctatttgattttttacattaatggcagttatgacacataaacgggttgtacagctcacaaatgtcttgacctatagcttgaagagcatttgtctaaatgacttgctcaaactacttactcacaaatccgggttctaaagttaggttttttggtttaaaaactgtaggctttttcctcttggttttataattgtgtcagtccaaaaattcttcatttcctaacttttctccatattagctataaatcagaatagttgggaactaaatgggagctttgccaaaggggcaatccccaactacaatgcgttggtctaatattcagtaaaatacattgattttagtaaaattcactgcatattttgcattttactcaaattcaatataaaatagacagtttttttttttttttttttttgagacagagcttggcttttgttgcccaggctggagtgcaatggcgtggtcttggctcactgcaacctctgcctcctgggttcaagcgattgtccttcctcagcctcccaagtagttgggattacaggcacctgccaccatgcccagctaatttttgtattttagtagagacggggtttcaccatgttgaccaggctggtcttgaactcatgacctcaggtgatccgcccccatcggcctcccaaaatactgagattaccccacctggccaacagtctgttcttaaagaaagaaaattaaaataaatataattactagattcagtgtacattttacttttgtgagtatcattcaggaattcttacctcagaaaacctggaaaaggcaagttatttagaaatatgaagaaatcagggtgttttattcttaatgaaagcatgcatcttaatttatctttagaaatgactgggggaagttgattatacaatcaaaatgattaaaattaggcatgtagactttagtgcaagcaaatctgggccactcatttccaggtacatgaggaaatgtactagcacttcttttattactatagctttgaaggcagcgtgttgtcttacttcccattgtttggatttttaaactgataattaaattcatttgcatcactgctgcttggattacaaatacttaaaacaattagttttctgtcagatcacagatctacatcaaatagatgttactttttaaagaataagccctcaccaattagaatgattcaaaagcttttgattgttttctccaaattgttaagtatgcatttgtctttaatgtaaataaatagacttaatggcataaaaagccattctgaattttaaatgaatgacaaaatgtaaatcatgttctggcataatagttttgccaaagtttcaagaaaagaaataggagcattcacaataagcaattgcaagctgtgaaatggcatattaaaacagaggattaagttatttttctagttagtttttggggaaaaaatctccagtcttgcagaaatggctaaataattgcatttggtatggaggctacttttggtcaaaattatgttaataaatatctgagttcctcacattaaagtgaagcaagaatctgtggcatttttttaagtcataaaacatttgtatgttggcttttagatagtaacaagatggcatccatttatctgtatgcttctgcgcatacaaccttatatgacatatgtaccaataaaaaaagtatacatgtattagtaattaaattctagacttgtgctgtccaatttggtagccattagacaatggcaaaaaattattttgaatttaaattagtgaaagtaaaagaaactatgttgttcctccattttgctagctacatttgaagtgctcagtagtcacatggttttagtggccatcgtgttatgtagtgcatgtatagaacattttttgttttttatcaccaccaaaaattctaatggacaatgctggtttagctcttcagtattgcaaactttagcctttaaaagctatttgcaattatttagcgtgtattgtttatgctccaaaatactttcatctcaatgtagaaagaaaacgattgcacttttgaatataagagaaatcaaatccttgatttttttctacataaaaacgtggaatttaaactgaattatttaacaaaaatcaaagtaccttagaaataacctgaaaagaaaaacaaattttagataatatatataattttgaagtagaagaaaactaagataaaacgtactgcatttgtatacttttatagttttctaattattattataattggaaaaaatgaattttaacaaattaggtataattatcactgtggtaagcagtctccagaatggtcccaaattaaggttgtctgattacggaataccatgttcttttaagtccagtaatcccaaccttttctaggataaagcttggtatatggaatcaagatatgtattcttgttattcttctgttaccattactgctgtgggtttcaagaacaggcacatacagtttctccttgtgtgacacaaaccttgtgtgaatactttttggtacgctttcaaactggggcagcactagatgaatgccttttccctaggtatgcctttcagtaaactctccaggtgagaggggtgtagtaagtactgctttacatggatctaagtgacatgatttgatcacagttcaggtggttgtagttatgaaccatttcatgttaaattaaggtttaggggtttattttctaaaataatgctacttacagtgacagcatagcatagaatctacaagttctaaagcaactcaataacttctcttaaatggcccttattattttggattagcattttggatgacaactaactccactccctctcttgaagggaaagagatttggtagaaataattgaatgaatcctggattaatctagaatatgattttatcaatgactgatgaattacactgcactcagttgataacggtgtcttcttctcttagaaatgttgagtttgttcctattattatttcaggagacaaagctttttaaaagagttggtcaactgtagctaggcatgaaagcatggtctctaagaagacacttataattccctaagtatttgattaaaaggaaaacaagtacctcaaaaactcttaagtttatgttataggcaaagaagtccccaaacaatttagtcaacactctgaaataaactcttaagagtggtgattttcacttggcattttggagattccatgtgtggcaatgtgctcctcaatcaaggagttacatttctatgtgcagtaacattgcagttgcacaattaatacaaaaacaaacatatattaatcaatgacaggttttctcattttcatacagagttatgaaacctttaggctaaggaacagaatagtgagaaattagacaactattaataataggattaattagattctggccctacagctaagaaaatggagtgacaatcagaataacaccaaagttttgcaagttgtccaagtgacaaaatacaactaattaatactaataaactaaagtcaaattggactctatttacacaaagtactttttatatacaggcaaaaatttaagtagaaaaattatggcctcccagaactaataccaaaaatttaatggtaagaaaatgaacgtattcatttaatatataaccacatcatttgaaaatattgagctctcattgtaaagacatgacattttctctaaaattaatatattccataaaaatagtttttaaaagagaaaggctttgtcttcattcttttcgtgtgaaggtcaaatatcttagattggaatttaactgcaggaattatgcttctgttcttactttagcaacactaacgatgacattttctgaagtacatattgttaacaccatcatgatgaaagcaaatcatttttctacacttactttgatgctaatcagagcagtcatttaagttgctacatgactctgagacagaaatttcaaaatgaaattgaccaccgattcccagacaaaaccagaatagtggtgtcagatgagaagggttttgcagtgttttgtcacatttcattttgatttttacttttttctctgtttgacatatgttctgaactagagtgccataaagttttatcaccataagtttgaaatgaccacattactcatgagctacagagtcacaagtgagtttttagcttctttcaaagctgtagaaataaaactttatagtaccctaccctggtatatgttgttttatgtgacacattttgttccactttattcttttcttttatttcccttcattattttctttttgaattatagcagaatttgtattaaatttttcctaatacacaacagtttaagctacattttataatatcttatgtatttttttcatacagattatctttgacctgtaatgcccatctcttaaagaaattttagatggtcattataaacaaggttcattgtgaaatatatttctgttgaaacactgattttattacaaaaaggtaatgtttgatttccatgagaaccaaaactattggttgagatatgaaagatgaacatttgcttccctttacacaattgattaaaattcttaatgcatacatagtcacactacacaattagtgtagtacatacatatccgtataacttgagtcttccatgtatatgttatgcaatagaacttctacaaagacatcaatatctcatgctgaaactatccaaactataaaatgattttaggattagcttatcccaaagggaaattgtgagcaatgtggctggcctgacagcctgaagtgatatgctcagagtggatctgataggcagccattcatttcaagctcaggaagcaaacttattattttgtcatacacggtcgtttttccattgaagacattaagacggtaaagaaagtcctcagagtctatggaaaggatcaccagactttcattttatctccagatcttgaactggagcttttgaagattccattttagtgatttctggaaggctgctaatcttaatgaataaagtcagaaacacatgtgtgtggctgattcagattccagaaagaattttggttgctatcatgattatttttaaggcataagtgattaacgctgagatatactgcttttcctatttgtggattaaatttcttctatcggagaagttctaattgaaatgtctccattcaatgtggttgtgcacacacacaagtacacccatgaatgatattttacatatgtaaaaaaagaaaaccgatattaagtaacttctacttttcattatgagacatgctgtgtgtgattttatatatatatatacacatatatatgtatatatgattttcctgtgttttgttaatcattttttatcattttataatttttaccattttcatcattttttattgtgtggctgatatatactagatattactcactcagggaggatacaccctcatctgggcactcttttatacaagttatggcttttgttttaaataattcatctaagtttaatgaaagaaataagtgactgctttatcctagagaagcagcaaagagattttgttcacctgtgcctttagagactacatgacagcctctacaagtagcagggtagaatcaggttgattataaaagccttcatttcatgctaaatggaaaggagaaaagaaagaattttctcctttaattagaatgtggcagtttaatgacagaggcactattgttgtgggttaacatggaatgaaatcaattaaataggactatgtatacttaggtgtctgtaggaatcaccaaaaatgtaactctccaacagtttgctgaatctgcctctgttttgtctggctgctatacttggtatgtgggccatctggctcctggattccagtaaggtttgcatattcacacatcaatcagaagtggtgtagggcctattaggaagcaccagccagttaggtgacatgccaggactgcaaagcactcaagcaggaatgccaagtggggagcttctgctgaagctgacgctgacacgggcattggaggcaccttttgatccgtctagctttactgttgatgtcacagtcctgctagatcaggcatagggatgtcaggtcacgtaaggcctcatttatgtcattggttttgcctggataattcaaatggagcaaaaataaaagtgatcttgatccttaggtcccatgacttttgatagtagaaggatcattgatctgaaattgtcttgcattcctgactagtagacagaaagatatcagaagcaactttgtctattctgtttctagaactatattgtgggtactagtttttcacagtagtactagacatttcagaaacagctaccgaataatctttccaaataaagggaaaggttgtaataaaatgcattcccattccctatgtcttctcaaacagttcactgaaacttaaagggatgagcacactttacaagaaatgcaaataaccttttagttcactgaaataagataaacaacacatgtgtgtatttttaattggaagctctatcattcagttccttgaactaacagctactatacttttcttttgatgtatgcttcacagatatccattgcaagttttagattgtttgcttcaatgtagataagacaaattaactgaaaacttaaaaagcacctagaggattggttattttaatgttttttagacctctggatgctttgatcccatacagaataggatgaaattccactataatggcattgttttaaaatttgaattggccgtaatgtgttgtgtgtgcacacatttatctagctatgaacacaattaatactcactgagagagctctttaaaatgatgacataatttttttctttgaaaagttatttcttacgccctaaatttctaaagtcaccaaaaaaaggtaattttctatatgtaagacttatttatagtaactaaatttctaagtaactgatatctcctaaacagaaatgtctaataacttacttctagatcagctttaacaatggttttgatttatctaacttagtgcagtaatacaaatattagtagtaaaataatacaagtttaactaacttggtataataataggaataatataattgctcatgtttgatgtatgctaactacttggcaccattaagtacatcacatgtattatttcacttttctcattaaaatagcagtgtgatgctattatctccattttacagagagggaaagtgaggcatggagagaagtcgcaatttagaaaagtaataagtataatacttattttaattttaaattattctttgctagaggaaagatgcatgttccttggacatcttctatactttaataatattatttctatgtttctagcaacccccacaatgaaaagcaaatacacgatgcctttgggggacaaagcagttctgtagtcaggcccacacatgaagtgttttacctttataggtttcaacaattaattggaataagctattttttctgttttggcatctgtctacttggcaaggcccccaactgtggtgttggcagctgcatgacagcgactgcctctggtttttccacagcaactggctgaaactcgcctccctgggctgtcctattatgttgaaaattattttctttgactcaaatcagaagagtgtaatagaaattgtgaaaattcctgacatcttcccaaagatgtttttgaaataggttaaggttctccgggagtaaacttggattctaaatatgattttttttttctgacagatgtatgcatgtgttatggtaggtattcagaaatgaatgctctcatttgtaaaataaaataaaataatcccaaactcttaactatagcaatttgtggttttaatcgttttcccttgtaaatggaaacttggtaagttttagagtgcattgtacatgataaaatacatcttatgtctaaaatcttagaaaatattatcttgcattggggaaaacatcataatagtgcatatgtgattcattttatgtaaagtcctaaaattatctaaattaaaatatctatattctatagctgtgcatgtgtgtatgcacacacaagaatatacacatctgcattttatatagatacaagtatattgaaaggatgatacattcttatacagatgtagagcttaggatttctttatcaatataagatagaaactgcgaaagcatgaaaatgaaattaagcatacttcctttattcacttatcacccgttttcagaattagttgccctatgggtaggtaccttttaaattatattgtacatctttcaattaaatatcgggaggttgaaaattaagtgacaattctaatatttctagtggaagacctgaagctgcactattaaaaagctagtaaatggaaggggaaggatatttctttatccatggagttaattacacaagcagtacactatgtaagtgctaggagaaaaggtgatacaaacactacttaaaaggtttccagcgagaagcagctctgaacaaagtagatttaaagtgttacctccttactcctacaaattctaatgggaatcaattatgttccatgagtaataataataattaatatttatggaagtgcttactatatgcttggctctgaaataagggcttcacatattatagcacataactatcctaagtagaagatactatttttacttccctttttatagatagggaaagtaaaacacagaggtgggccgggcacggtggctcactcctacaatcccagcactttgggcggccaaagcgggtggatcacctgaggtcaagagtttgagaccagcctggccaacatgacaaaaccctgtctctactaaaaatacaaaaattagccgggtgtggtggtgggtgcctgtaatcccagctacttgggaggctgaggcaggagaatcgcttgaacctgggaggcggaagttgcagtgagccgagatggcgccattgcgctccagcctggggaacaggaaggaaactccatctcaaataagtaaataaataaatagcacagaggttaaataactctcctacactcacacactccatgtgtctctggtgatcacttggtaccacttcttttcttgcatgtctcacctctcttataaacacattaccaattttaaatgggtgttatgaactatgtgtattaattatggctgagaaccaccatttttaataacatggaattttctttagctggcagggaaggaatgcttccagtttaaaaaaaacggtaaaggacatagctttaaacagaaaagacgctttgaagataagttcatgtccataaagtccattcaaataacttagtaaattgctgataaggtcatatcatgtagcattttttaaaaataagattgctgaaagttcagcttgctctgagtaaacacagagcaagatgattctcaattatatagtgaataaaatcaataagaacatctagtgaaatccaaacagaaaataaaaaaatcaaaattgacttttaaaaaaattgacattttatggagataattgtagatacatatacagttaataagaaataatacggatatcctatgtacactttaccattttttccctaaagttaatattttgcaaaactataatataatatcacagccagaatattgacattactacaattcagcaattttattcagtttctctcggtgttcctatatgtgtgtgtgtgtgtgtgtgtgtgtgtgtgtgtgtgtgtgtgtgtgtatttagttctgtacagtttcatcacatgtgcaggtgtaggggaattggatatcacctccaatcccccttttagttcttagtaggctcttcagttggatctagaaaccaaatcgacatcaggcagaaaacaaaagaaaagaatacaaattgtattacttatacatgtacgtggagatcatcacaagaaagtgaagcctgaagaagtagtcaaagcaagatgcttttaatgatgaatgatgaatttgatgaatttggaaagcaatgacaggataaagagaatctggctagggacagtaaattttctctaggggagtcactaggagatagatagtgggtataaaactagtgaaagataagggttacttcagtaaatatatttattcaggtccattgaagcctccaattctaagtctctggtaataagggctattttctcactctggtcctgtgagggtgcccctcccagaggaatctttatggtttgctgcatgtaggaagagacaggtgagctaactctttctgaaactacaatttctccaaagtttccaactgaaaatagccaacataccaatctggcatatttggggatggaacatcctttactccttcacaggtatctgtggatgagagctgaagcaggcccaccaggaacagagagtgtttccccttactgttggcaattctctggattgcatctacccatcctgtcctagaaagtgtcaggagaacctgatgttgtctcagggaatcctcttagatgtggagagataagcctttctaggctgctttcgactgctggttgtgggtctcgaaatggtgagtctgggtcacttgcttctattaagtgaaaagatgtaagtcactcaacttctgctccagacccagtaaaccaaaactccgtcgtcttcttctgactaccttcagagttatcttgggtttattcctgcattattaccagcatttgttgctgttttagtgggaagaggaagggaaaaatgggtcgaagttatcttacccttaccagaagttcctaaatagactttttcatgagaaagaatatttttaaaaaactgtttatattataaatattcttggtagtttttttgctgttacatattttttaaaaatccatagtgcagatataataaaaactattgcaggtatttaaattaacagaactagttgaattcctacaacgtgtcatgtacagtgctaggttggttgatctgtctgtgcttctgctttacttggaatggatgagcaaaggcttatactaatttgcacttagtattataatgaggtgtgagaaaccaattttcatattcaagtgtctataaaaagtgactatttttcaacagttagctcctttaattataaaatcagtttttattaaaggcagttgatgctttgtgtgttgttgctagggtgacatatattatagaaacatacagtttatctttccagtaagagggaatacagtctctatcttaccgttaatactttaattagagaatgatcgacagaaaaatcttttttctcttcatgagatttgaaaaatgcatatcttctttatctgcatttaatcaaccctgggttcattaggatttgttgtgttggcacctgagaacatcttagaaattattaaataattcattttctgctttttttctttattttttatttccagcagaggcttgtattaaggagattctcttttgacatacccccacatacattcacactaatatatatgcactattttcaactgacatgttttagagttattgagatattaattttataggatactatcacattttatagctcttagtaaatagtatggtatttcaaaacataatttagttatagtaatagaaataatccatcatatttgttgtatttataaaatgtcttcaaaaatatcatataaatgatatctgaaattttgtcctagtcttgcaaatgctaggggattaatattaataaggttgttgtcaatataaatttctagtgagatgctcattaactggaaatccagtgctagagagacatttcagaatacctaaaccttatttagagacaaataaacatactagttaatatggctattgctatgaaccgcataaaattgaaatttgcccgaactcattcagctaagcatgctaacctcggctttggaaaagattgaatggcctatcatcagtcaatcttggtactagagttaaaagaagaggcaagtaatatggacagcacaaggaaaatgacagaaatagcggcttgtgatgataattagcaagaagtttgaataagcaaactctaaagaatattgaaaatgagacaaaaactgttaatgtatatgcaattaaatctttggaccctccttgcttgttgtttcaaatatccaattgtggagagaactacgctagggtaataatattgcccgttttccctgtccctccatgtactccaattaagaaagcagaaatgaaccatctaccctgatttttggaggaggaattgagtaggtatggcttcatgctctttaaattggggttaagcccccatgatataaattatatagggaatgcttcttcttccatttaatgcttactaatggatgtcactaggcaaattattagcaaacatacataataagaagacttaatgctatgttcgctgataacagctttatcattagtaaaggagatattttcatctctattcgtctgactcctatatgtgcggcttaattgattacgaacctaggtggggaatagatttaataattttctcaaactccatctataagtaatatgaagacatgataaatttttaagcagaaaaatgaaatgaaaaatattatgattcggaaaatttgtttccttgtactatgaaggatacttgggagcaggttggagaagagggtgaaggaaccgtttgggggacgcgtcagtaaaactggtggtagagactaggctgaaggatgatagtgggaatggaaaagtgaagacatttgaagggaagaagacattgtgtcggagttctaacgatgttcatttgtgcataaaacttgcatttgtctatcttattgtactttatatattcttcctaataccctgtactccattttactcctttttttttttttttttttttttttgagacagagtctggctctgtcgcccaagcaggagtggtgcagtggcgcgatctcggttcactgcaacctccgcctcctgggttcaagcattcctcgcgcctcagcctcccgagtagctgggattacaggcgcctgctactacaccagcctaatttttctgtttttagtagagacggagtttcaccacgttggccaggctggtctcaaactcctgacctcaagtgatctgcccgcctcggcctcccaaagtgctgggattacaggcgtgaaccacctcgcctggcccctgtaccccattttcaatatggcaaatggaataaatgtttttacaacatttatttgactgttgtttataactcttcaatagctgtccattactgtaaagtttatgccacaacctatagggctctaccttttaacagctatctctttctgattttccacttctctccaacctccctccctaaattacggtgatactgattttcttttaaaatacaggactactatcagcctcctttttcatcttttaggccacaacttaatgtttcttcctcagagaaatttctaaaggacccaaacccacaatagcttctatatgagactacttctcccattatatatcttccaggtatcctgtaatctcctttacaacagccagcagaattgaagtacactatttgtcaaccaaaggtgtgaagcttcttcttactcctggtgtttgtggttttattgactcttctttgttttctttaccagtgagatcccatctacatctttcagtattttcaccagtatcttggtcttttgcttgcttgctttcttgttttctaggttgattataattttattcctctaaacacatgaataccttccgtcattccaatggaattttggacaaaagggaaaaagttataagtgccaatttggttgccatgaaccaaaacagaaaattaaatacaattgcctagataatcaggcccaatttgtattacctagtatgaaaaacactttggtaacaacagtaggtcatgttaaactaattaatttctaggaacattgataaattaaacattggttactctccagagtaactctaagcccagaaaataagtgacttgtacatccatcatctgattcaggttcaaagagagtttctttattttggcaaagccaactttactgaaatgagatgagaagatttctgttgccaatttataatggagattaaaaataagaccccattgtcagagttggagatcatatgttggtaattgtggttttgtacaaaattaagaattgatccctaagaacttgtaaattataaagactttgtttagctcagtcacatttgcctaatctaagatttctgtctaggagaaataattttctagatggagtcaactagtacacctagtttaagtcttctttatgtgagattgtgtttaaaacagtgactcttttggccatagttacaatgagttcttcaagggttgtgtatttgcagactatcagtggaaagcacttgaatggcaatagttggaaattttgaagcaaaggaaataaaattgttacttgaaaccttgtaaaaagatcatacggccgggcgcagtgtctcatgcctgtaatcccagcactttgggaggcccagacaggtggatcatttgaggtcaggagttggagaccaacctggccaacatggtgaaacccgtctctactaaaaatataaaaattagttcagtgtaatggcgcacgcctgtaatcccagctactcaggaggctgaggtgggggaatcacttgagcctgggaggcggaggttgcatcgagccgagattgcaccactgcactccaatctgggtgagagagtgagaccctgtctcaaaaaaaaagataaatttttaaaaatccatgcaaagagcttgctattttgctattttagggagggagcatgagcttcatactcacttggaatttcctgagataaaggcagaaatagaattggaaaatatttaatataaatctgaaaagataaggcatttctcttagaagaagtttctaagcaaggcagctatatagcaaagggtgaggtatatatccctggctgcctcttagcacagggaactggcaccacggggcctacactggcccaagagttcttcaaagataattgtgttcccacaacttttctctgtgtagtaaactcttcctgccctgtagcagtccgcccagttcatgaaaaccatgggatttgacccactgaagaagacttttctcttaaagtttttcctgtttatccaggttttacccagtaaaggtcagctataactggtaatagttttgtcaatgtttccataccttgggacaaagttccttatttgctcggtatttcctctcaagttttacttggcattttgaaatttgaaaaaaattctatgtttttcctggctgtgaaaatgtattttttctttagtatttgatattcaatttataaaataagacttaaagcagctagatatttgcccatcgttatgtttagtggaatgaagaactaatcagctactactagtcttgttccaattaacattctattcctccatttccttcccacactgatatatgtacatatatagatatcagtgtgatatatatatatatcacacatacatatgctcatatatacatatatatcttatataagtctttgacctttctaagggtcaaacaccatgtttttcacaatctaggcaagctgctacaaggaaggaagagtctattatacacagaaaagctgcaggagcacaattatctttgacaatacaccttatattggtattttattttttttctgaaattactctgggttgagtcttatatttagtttctaattgtgaaggaaagccctgtaatgacctggtgatccatcttctttagaaccaagtcggccacagtcctaaaataaacatctgaaggcataggaacatttacagatgaaaatcataatttaatcaattgggtgtattatcttattttctaaatatgtatacattatttctttttttcttttttgtgagatggagtcttgctctgtcactcaggctggagtgcagtggcatgatctcggctcaatgcaacctccgcctcctgggttcaagcgattctcctgtctcaacctcctgagcagctgggactataggggtgtgccaccatgcccggttaatttttgtatttttattgtaacagtggagatggggttttgccacgttggccaggctggtctcaaactcctgacctcaagcgatccgccccaccttggactcccaatgtgttgggattacaggtgtgagccaccacgccaggctaccgtgtttcttttaaaaactttttttcttctatgtaccgtataggttttaaccctgtaagactgaacaccctcttttgtaagacatattttgtaatactcccattactatcctcaaagagaatttaccaaaaatgtaacttacatatatatataaaattctaaaacaattaccttgtaaaaaataaatcaaaggacaataatgaattaaaaataatggatatatttatcatcaataattaattattcaatatgaaaataagaaaggtacatactgctctagataaatgtagtacctgtacctaaaaccacagaagtagacagctcgaaatgctgacgtatgcaggtgagtggtatgaatgattaaaatgccatgaacagcatattttaaagtaatgggatttttctgtatgattaataacatttggtaaagttctgaataaaataagtgcacattttccctttgatttattgtgggatagtttcattcttggaaaatgcagtgcatataaagactttgtatttatatgtaaaattgagctaggttctatatattcacatacttataaacaggctgtcccctacttttcaaaagctgaataggacatgaaacaattactcattttcctggactttcctgcgtgttactggatgtctggcgtccttagagcacctttccatccgttatggggacaatcacagtgctttcacgtttcttaaatgtacccagggtatggtggtgtgcccagttgagaggaactgcaagtgagggttgtatttttttttttttgagacgagtctcgttctattaccaaagctggagtgcagaggcgcgatctcaattcactgcaacctccgcctcccagcttcaagcgattctcctgcctcagcctcccgagtagctgggattacaggcttgcgccaccacacccagctaatttttgtatttttagtagagatggggtttcaccatgttggccagactggtcacaaacttctgacctcaaatgatccacctacctcggcctcccaaagtgctaggattacaagcatgagccaccgtgccaggccagggattgcatttttgcatcgaagtagcagaaactagaaccagaggattttaactttctcatatgatggaatctgaaggaatggagtctaaagcaagaaactggccctgtgatggcatgaaaatcccaggcccctttgatcttcttgctcttttacaccttactatcattctcatgcttgtcaactcttggttgcaagatgatggtttcaacatctccagcctcaagtcttacatttcagagcagaaagatgaaaaaggaagcaagaagaaggaagaggcagcatgtacatcaggaaaacaaaactatcccagaaatccctagctgtcgtcctctcagatgccaaaaggccatgactgggtgccagagatgcttgaaatagagctctttgttcttgcttgacaccttgctacttctaaacaaaatcacgattttgttgttgagagaaaaaggactcctccctatctacttgtcctgagactgcttcagcctctcagcttcctagaccctcatgcagttgatttccaattcttccaggagctggcttactgtctactttttcagggtttcaaaaaaaaaaaaaaaaaaaaaaagcattttttaaagtttaaaaagcaaaatgtggagtgaatattttttggttactatgctttttaaatttttagaatttgtttttactgtgggttggctgttaatagtccatcaagacaactatttctttgctgggtttattggatattgggcaagcaaacaagcaaatagcagtatctgccactggatgtaatcaggaagaaattttcagaaaaaaaaaatgatgcttcaaggtctagataagcagattttccactggttcctgattattctaaataaaatgtttagtcagtggttgtgtaagtttcaaggatgttatagatggctcttgaaaacaataacacattaacctaatattttcagtactcctttttctagcttcatttatcctctcccatgcctgtaaacatgttactttgttaaccaaataaagtcattaatacatgagaccattttgccaaaagtaaacttaaaattaggaggaattggtctttcagaaggcaagaagagaccaagatgaaaggaagtcatttttgtgaaccatatgttttgacccagaagaactatttcacagcctttctcctggtagcaaacaatgagggaaacagtttcttaccatctgcacaataaaacttgttgaatcactcgggaattgggattattgctactgtttgtttgttgttaagccttaaatttaaaaaaagacaggatatataagcagggttggttctaatactgaaataaaacaaaaatgaacaaacccagagaaatctgcttccaaaaagccacagcacaacaaaaagaggtgtaaacatcagaagacctcaagggaaaaatacgtttatttagaaatgggatatcctggggattttgttacagcagctttattaagatattattcacatactgtaaaattcactctctagaagtgtacaattcagtgttttttcagtatgttcacagagctatgcaactatcatcactatctagttgcagaatactttcatcatccccaaaagaaactgtatgcccattagcagtcactccccattcctctctccctctagcctctggcaaccgctactctgtgttgtgtctctatagatctgcctattttggacatttcatataaatggaatcatactatatgtggcctctagtgtctgtaatctttcattttgcataatgtttttaaggtccattcatattgtagaatgtatcagtctttcattccttttatttgctaaataaaatttcattgtatggatataccaaattttgtttgtccatttatcaccagtttacgggtattcgtaaggcttttttttcccactttttgcttccagtagactttttgtatgtcacaaatggccatatgtttctttatcccataatcagaataaaaattatcattcttttagtggacgtgcctttttttaatcaaggcacagaaataaaaaagtgagttgtattttctcattaagaaaacattttggggtgtgcatgttttcagttgtttggaaatatgtagacatattggcagggtatcccacttacttttgctgtgtataaaatcaccctgatacttagcagtttaaaacaattactttattatgccgtggatgctgtgagtaataaattcagataggacacagcagggatgttctgtttatgctctgcaatatctatagcctcatctgtcaagacttgaaagctaagttggactcaatggctggagggtggaattctgaaggcctacatgtgaacttgctatgttgtttggcttcttcctagcatggtggctttacgatactcacacattttctatggtaactcagggttccaagcaaacgctgttctagcaaacaaggtagtagtcatatggtcttttatgaccctgccatggagggcacaaaacattactcttgccatcctctatctgttgaagtagttacaaactcacccagattgaagaggaaaggacatagaccctacctttccatttgccaatgagttttgggaccatattttaaaaccattgtgccataaagggcatgttttatgacaggtgaagctttacgtcttaaaagtatataattacaaatgattaaatttaaaatcacgagaataaaccattgcattcatctaccatcttgccactaaatcagaatcagtaaaacaaggtcaaattgactagaagccacatatagttgacatttggaagaatttgacagaaatatggctcaattggagttactgaatttaaaccaaaacgtttggcaccaagaatcatgggagcccagactaaagaggaaacatacattatatagctcttattatctaatggtgaaaatcctatcaaatctccacaaaggtggtgaactctggtcttccatggcatcctagacaaactttatttacaggcatgtatggtatataaaataggcatagataataaatataataatccagaacaatgataaaacagctactatgtcaaggtaccatcctaacctcacttataatcaggcattaaattctcataagaatcctatgaattagacaccattattatccatatttaacatatggaaagaaactaaagtacggagatgctaatgaacttacccatcgtcccactaataaatgttaaagtcaggatttgaacctagatgctcaggctccaaagcctatgctcaaaactcttgctatgtgaatactggcatattactgaataaaatagccccagttttgtttttaaataaaaaatgttgatcaatttttttcaataaaatattgtttcatcacaataagacctacttattttcctcctgagcagtttttagtgacatcaataacaatttttttaggctgggcacagtggctcatgcctgtaatcccagcactttaggaggccaaggtgggcagatcacttgagctcaggagtttgaggcaagccagggtaacatggcaaaacctcacctctataaaaaaaatacaaaaattaacagagcgtcgtggtgcatgcctgtattcccagctacttgggaggctgaggtaggaggatctcttgagcccgggaggtcaaggctgcagtgagccatcattgcaccatcgcactccagcctgggctacagagcaagaccctatcttaaaaaaaaccaaaaaaattataagcgagtcatacaagttcttcacagcttttcattatggtaaaccttgattaaaagccaaggttataaatgtaatttttgctaagtgcggatgtattgtatctgtagcaaactgtaattcaggcccctgaatgtaacatcctagctctcattccttttgctgtcagatttccctatagataacgtctacatctgctaccttatctactcgcaaatatttatgattttcttccatgaaatttacttttctcccctgaacctgtaagccaaatcaagtgaccttttgtgaatctcaaacctctgtgaattttaggtagatttaatattcttggccaccactttctattcagtcaaattcaagaattctataaagttaaatatatatggatgtgtgcacacatatatatatatgtgtgtgtctctaggtcatgaatcttttaatactatagaacatagaacatagaaaattataagagaaattaaaatatattgtcaatttaaaagcataccgaaaacatgttatatgagaatggaataatacaaattattggtatggggagaagaatcatgaatagtttcatgaggaatgtggcatgtgtaacaggcattaaatatgattaagaactaacactgagtatatacaagttagctgtatcaataaaaatgtaaatcattcagcaataaactataaagttatttttactccataagggtttttttccctgaaattttcggcccaaagtgactgttttttcttcacatgccacttatatagtgtgaccaagtatttagttaaaaaaattattctccagtcaaatcatttgttgtacacttcttggagctgtggcttgcttgtgtttttattgattaaaaaatacagcacaatcttgcacctaataaaaacctaacaaactggctgagtgcggtggctcacgcttgtaatcccagcactttgggaggccaaggcaagcggatgactggaagtcaagagttcaagaccagcctggccaacatggtgaaaccccatctctactaaaaatacaaaaattagcctgacctggtggcaggcatctgtaatcccagctactcaggaggctgaggcaggagaatcacttgaacccgggaggcagaggttgccatgagccgaaattgcgccactgcactccagcctgggcaacaagagtgaacctctgtctcaaaaaggaaaaaacaacaacaataacagaagaaacccagtaaataataggaaaaaagtgaatatagaaaagtaatagaaaatggttgcctttgtgaggttagatgtaaccaaaatattttagcaattgtttagaacaaatagattaaatgaaaaatatttccattaatattttaaactgttaaattctgtctaatttcacatggtagatacacattcattaagacttttcagtgttaagactaaataaagaaaaagaaaattcttcttattgtgccttattcagaatccactgaatttcgttattatttttattatcattatcattatcattatcagtattatttgagatggagtctcgctctgtcacccaggctggagtgcagtggcgccatcttggctcactgcaacctccgcctcccgggttcaagcgattctcctgcctcagcctcctggggagctaggattacaggtgtgcgccaccatgtccagctaatttttgtatttttagtatcttatttttgtgggtacacaatagatatatatatttatggggtacatgagatgttttgatacagacatgcaatgtgaaataatcacatcatggagaatgggatatacacccctcaagcatttatccttcatgttacaagcaatccaattacactcttttagttatttttaaatttacaattaagttattattgactatacttaccctgttgtgctatcaaataggtcttattctttagcaaagcatatttgtaaagagtttggagtttctctttgctttacacactgtaaaaaaaaatgtcaaacaaggttatccaaagagtagtaggagaatgagcattgagatcataagtgtctcatctgatcaaagttattcaagaatgaatgcattttggaggcaagagttgaggaccatcgccatcattgactatggagtaacacaagcccagactcttgagattaatttggcattatctttcaaaattaaaagtataattacatatttacatagcaattctacttcaaggagtttgcccttcatttatgttttcacatgagtaagggtttagatggacatgggttttctttgtagctaggtaatagtaaaataggtaatctaaatggacatagcttggtggtagtccatgcctgtgccctttatactacagttttaaacaagagatgaatttatataaacagatgttgaaatgtgatcgttatgtagtattaattgcacaaaagtagaacatatatatgtgcatatgtatgcatacatacatgtacatacatatgtgcatatgtgttctagtttattatatatatgtcaaattgttctatttgtatgaaaacactataaatacatacataataaataaacaaatatgcgtttgtgccaaaaagcacagaacatttctgtttagtctcataccactcattttatagctttatagataggaagaaggtagactttgatggtacttgaatttttatctatgtatctgggcaagtattttatctatgtatgtggtagcatattttatctatgtatgtggtacatacatgttttatgtatatgtatgtatacatgcatatatgtatgtataaaatacatacatattttatctatgtatgtggtagcacgtgagagaatttttgttaatttatatgttatttcacttcaaaaattgataaactgtgtgtgtgtacatatatgggtggtggctatatacatatagatattatatttctgggtggtttataaagagcagaaatgtgttgctcctagttctagaggctggtgagtccaaaagtcaccagcatgttaggtgtcttgtgagcccgcttcctcagtgacgttcatcttgttgatgattcctcacatggtggaggggaaagggagcgttctaggttctttttttttttttttttttttttttttttgagacagaatctcattctgtctcccaggctggagggcagtggcacgatcttggctcactgcaacctctgcctccgggtttcaagcaattctctgcctcagcctcccaagtagctgggattataggcacccaccaccacgcctggctaattttttgtatttttagtagaggtggggtttcaccattttggccaggctggtcttgaactcctgacctcgtgatccacccaccctggcctcccaaagtgctgggattacaggtgtgagccaccgcgcctggcctgtaggttctcttttacgaggcaactaattccaataatgagagctccatcctcgtgacctaatcacctcccaaaaagccccaaacccatctcctaatactatcactttgggagttaggatttcaacatatgaattttgggtggacacaaacattcattcaataacagtgactatactatcctatgttaacattttactattttcaaagcttttgttcactttgtatatatgcatttatttatctttgtagcaaatgaaggataaaaatatcttttggagtattatcttgacatactctccagctgctagggatgacctgtcagtattgaccccttgggctgaagcaattcgatcctctcaaaactcaaattgaagtgagaactatctcttctcctttatttcctttcaccagaaatagctatttcatgttttaaaacaactggaaggtaactgaaaactttcagtggtgttaaatcactgtcagaaaaaaaaaaaaaatctgtttgaaagttggaaacagctcaagtaaagccatttaatctgaccagcataagcagattctgaagaaaatggtgaagaatatcattagcagcaatgcacacagtcatttattcattcaacagatgaacatttgatgaacacttactggttcttggggactatactccatgcctaaaatacaaagatgaacgaagacccaattcttgctctcaagaaaatgatagtctgttaagaagaatttactggaagatagataagtataatactgaaaagtgtgaagaatgaaacaataagatgtgcaaagtacagtgctgtcacaaaagagagagaaataaaagctaactggacaggtcagaagaggcttcacatggcactgtcttgaagaatgcatagaaatattctacaaccagcaacttccaattcagttgaactatctccatgcttcctgttcaaccgagattacattttcaatcttgtttctaaaggaaggaaaaaaagatgagtcatttggtacaaaaaagcaagaacagctatagtctacactataagataaatgtagggtactctttaaatctagtggacgctgtccgtaccctttcagcgctcccattttgtctcatcatctaattgcgtgcacctgaagactttctctgatgggtttgccactgcggggaaggctagaagtgctggaatattgaagacccaagcagcattcttcaggttaataatagatgagaattggatgataaaaactctaaactttttacactcaaataggatgcatgaggcatgtctatttcatttgctagaagtctccagtggcattaagtcccagtcatccatagtcataacttgctcattaatgtactctgtgtgttcctttcttctctatctcacttctctacttcctgttgatgctttctgtgatctccatcacagatcttcctgtttctcacttcctgttgatgctttctgtgatctccatcataatcagctacatggactcaaatttgtcatttaagtctgatcttggggaatccaattttagacattgagcaatggactggctgggagggatgaaagaggagacaaaggggctcctatgttcctggttcaggaaacggatgaataacatcaccagttagtgaataggcactgcctttcagtacctacgggagtgctttgttcagtacatatcctgcccagccaagcactgaagaattcatgaattttattgtaacctaaactgcctgtggcattatgaacctgtgtaatcatgggtagtgttggctttataccaggattttgctagcttgttagcatctccatgtgcatttgcaagaccttggccactcttcagtgttttctactccaatttgcatcattgtccctgcaggatgtttatcactcagacattctgaaatttggactgatgcttgacttagctctgtgattggatgcttctcccagaacctttctcacctctatcagctacgctaatgataatctagacagaggtttccctccacgggtgctgcagctcaaactgtgccctagaccactgtcagtcaacctcttcaatgccactgtttggtgctttgcttggttctttcagtctgcatgaagtcgcagctactcaacttacatccatgaagcagcaaggggaaacttcccattctcagtgttttaatctgttctctgttataaaggaggcatagtagagttgctggaccccaaagagtgacttgtaataaaataattctttaaaatgtatacatagatcttgtatcccagggcacacatttgacatgaaaatggctgttttggttgtaagtgcaggtaacagccatcaaggtgtacttgggactcctcctccactccaaatcttaggcctcattattatttagtttatcctgtctgtatctgcaagatgatttttacgtgagaacactagacttaccccttgacactgtgctttttgcagctcctcatatttgatgggcatgaaagctaatatgttgtctaattatggagagttttaagttattaattttatttttatcaggagatccttaaccccctatacaaattagatctaaatagatactaaaagatgaagttaatatttaactcctttacccaccagatgtagctgaatctttgcattggacaagtgagaatcctacttactctgaatcttagatactttgctttgagtatgattcaatgtcactgttgctacagaagtataaatgatggttatttatgcttgcatgttttccagaaagttaaagactattttattatattggctttctgattacttgactgaagttcataaactaacaaataaaaatctaaaaacactctctggggacctagacaaactataatgattaaagcatatagttactttgaagccaagatgaggtaaaggggataacttaagacatatttattcttaggctgacatatcttgtcattattatgttacaggtgcacatggaccatttattttttctcttatgaagaatttcaaacatatacaaaataaaaaagtaacataatgcataccatacactgctcattagctctaaccattattatcattaccatctggtttcctctctacctacccacttcctattctctgttttgaggcaaatccccgaaagtatatcacttctactctaaacatttcagactgtattcccaagtaacccccccaccccacttcttttttttttttttttgagacagagtctcgctctgtcacccaggctggagtgcagtggcacgatcttggctcactgcaacctccgcctcccaggttcaaatgattctcctgcctcagcctcccgagtagctgctactacaggcatgcgccaccacacccggataatttttttgtatttttagtacagatgggatttcaccatgttggtcaggctggtcttgaactcctgacctcaaatgatccgcccaccttggcccctcaaagtgctgagattacaggcgtgagccaccgcacccagccccggaaaatatttgcttaatatcatcaaatacattttatatttcccaaattatcctataggactcctctcttctctctgttgtctctgtttcctccacaccctacatcctcctcctccctcatcctcgttctcactctcccttttcatttttgaagaaacaggaccttttgtctaggtttgttgattacatccacatgatattgtttaatgtgtttcaccagctcctgtggtgctgacaaattagcagctaagtctagagagctacttgtagtcagtttgattttgttctttttttactcaagatgattgtatagaaagtgttgtgtactttcaacaaaaggtatataacgtttgatattggcagccattgatgatcattgttttgattgattatttcattatgagttgcaaaacaatgatatactgtttttacttcttcatttgttaggaggagcagttctataaagagaactttttgttttgttttgattttttgtttttgagacagagtcttgctctgtcacccaggctggagtgcagtggcataatctcggctcactgcaacctctgcctcccaggttcaagcaattctcctgcctcagcctccctagtagctgggattacaggcgcacgccaccacgcccggctaatttttgtatttttagtagagatgggattctgccatgttggccaggctggtctcaaactcctgacctcaggtgatccacccacctttgctttccaaagtgctgggattacaggtgtgagtcactgagcccggcttataaagagaactctgcatttctatttggttgcctcatagtataattgatacaaagcaaagcagagtaaatgcttcagtttttcccccaaaagaacaattttcaaaataatgaattgcttctctagtctcttccaaaagttgccagtgaattttttttttttttttttttgagatggagtcttgctctgtcaccaggctggagtgcagcagcgtgatcttggctcacttgcaacctccacctctcaggttcaagggattctcctgcctcatcctcccgaatagctgggactacagacgcgcaccaccacgcccagctaatttttgtatttttagtagagacggggtttcaccatgatgttggccaggacggtctcgatctcttgacctcgtgatctgcccacctcagcctcccaaagtgctgggattacaggcgtgagccaccgcacccgaccaccagtgaatattttatttatttattatcatccagttgtttgttttggcatcactgcgaatgcatgaatttaaatatatttaaatgtaactgaggctctccaccttctgtattatgatctttattgtcctcatatttttcatctttatgcgatggaagcctcctttacattgacctcctgagtcctttctgtatgacctttatacactttggttgaccccaacttctcttgtagatcaccagtgggcattcctgaggtgtgggtataacatttatctctggattatttattcattcagaaactttacttagtaattaacatttactaggcgttaacaaggaagcagtaaagcagcaaacatgctcatttcaatatttggattaatacaatcaatcaaaacagtagttattgacaacttacttattgtgtggttagcacactcaaaatttatgcagagaaaaaagatgagagattagacctcctccttactgtaacacattttcaatctgaccagagattttgcttctgcaaatttggatgcctagcattggcatcatcaagactttcatagctatggaaccatcagatataaaatacaccttagtatgcaacctcaacgtgttcttcctcttgcaattgaggttatattaatttattaagttcattttgggataaagaagacagaatcatagttctttcagcctgttattataacactttattatcctttacctccttccaatttttgtgtctaataattcgtgtgcatgtgaactgtcttcacttttgagttttattatgaaactcaaactacaatacacatgtatgcataaatttctgtatatgtggcatgcgtgtatatgtgtgtatgtatgtgaatatataaatttcgttgaatagagtggtatgattgtctttggcctccttaattatatatattagcatatgttctagggctcctgacgcttcttgcaggcagaaggcatttccagaggttgtgtagatccatgaaggacagttatcgggtcacatctcacatcatcactgtttctttcttgcccctgtcttacactagtacccttcagggtattgtatgaaagcttcattggttcaaattcattttgtcctctagtgctactttctatgctgacaaaagcatagtgaaactgatgccctggcttgtactgcagtaatattgcctccaagcatatcaagtacaggaagttaaatcctatatattattaagccagatcagtaacatgtacccaacaatgtggtgagacatattttgttttaataaaacgatgatgttacaaattcttcaaccttcccatatgtgtggaggtgtgtgtgaatgtctgtattaatctaccccatgtctcctggatagagtttttctacaaagaaccaagctcagcttcccctagtgttaagacattttgcttcatgcttggtatagtgtagtgctactcaaacctgagtaataaacaggccagtttaaagaaataaaaagccctatgctcaaccaatgctgattaaaattatttttattaaaatttacctatagaagcacgaatataaaacaaagggcacactctttatggtgaaagggcatatagatctacaacaacaaatcatattttcaaatcaaataaaacagaagtacagaaaagcaatagaactcaaaagcataaccttaatgtgtctgccaatgttgtcttggatacattaaatggccttttataatgtgaatatagtactagctgcaatggtgcaagttattgtatttttagcatttttcaatatatgttgtgaagactattttactgcttttctctattcagatctttgcaaaaaaactcatgtatacactataatcatgttttttgccattttgtagtcctatgcttttgtgtcatcagccttccccagctagaaaagtataatattctattattgtatgctgttgtcattttcccacaatcaaaagtacaaattattaaggaaactgaagtttcggtctaaaatgtgttgttcagatgaaattatccataagaaattaaagttgtgttcttataactggaaaaagaacttaacgcaagtataatatgtgcaaaactgggatgacttagttcttgctatcattaagaggggacaaatggcaacgagacgagctttaacagctgagaaaatcttatgcctagatgtacataggcctggaaattacatagcagtaaaactgtaccttcaaatagctcaaaagcagctcataataactgcttgagattatctcagtgataaagtcagtataacatagtgttttttattttaaaaaggaaaaatgattactttctttacagtatgctaattaaaatatacaggtgattgaaaaaactattaataaaaatcagtaattttgttgagtgggattatgaatattaattatttaattaaaatttccttcaatagttaacaaagatttattgagtttctgagtcaagcattcttctaaaggctctgccttattagaatttttaaatgtatttgcaatgagtgtatattaaatgtaaaatgtatgattcaggtttaaaaaaaaatagcagtgagagtaattgaatgctgaggttaaatagaatgggtgaatcaaccataccataaaaaacttctaagtggatattatattccaggcactctttcctacttcagctgttgataaaatcaaatatttccttagagacccttgactaatgcaggaaataaatgaatacttgcctatatagacaaaataataacaacaaaagccagaaaccaagccataccaaaacgaaacaaaaacagaaaaactgtgatgacataacttatctttcaataggattttctcagaatgggaggcaatatatattttatgcttccatggtctgtagattccaacatttgtataattaacatatacaattttacaagggaaaaatactattcaacaaatacgtaaatacgttcaatgtaatcatgcagtacttcgtttaaattgaccttttttttttttttttttttttacaaatggtgcaataaaataatcatgtttaccttcttcacatgttcattgatgttggcgtgcacggttttatctatatgatgtgaccttttgagaccacatgacattcacaaactgaaactaaaccaactaaataaccagttatccaaagataagcaaaagtggacgtcagtttaattagtaaggggagattttaatcagtaatacactattataatagagaagagttcagcatgaactgaactgaactttgatttgtgtagaggtgactgggagttttaaagggagaatgagagaatgagtttgagtggtggctcattaaagtcagggaagtaacaaattacaaaaagtggaaaggtgggattgttccctgggaaacctctacgtttgctaaatggcacttaaggttaggctcctgccttctcactgtcttcgggttttgactggaacaaagggtaaattattttggcagctttgagttttctcagaaatgcaccttaagtggggctagagttatcctagagaggtggctttgacctgttagaagctatgttagtgttttttgttcaggtctgtgcaggccaaggttatggcctagctgagaagagggctcagaggagcctagctaaagtttggtcaaggggagcgtcttggtggagcctcactcctgttcaagtaaagaagacacattattcatccttctgaacagtgtaagtccatttgtcattcgattgccttttgtttactaaggactagctaaatcatcggttgagacttgctagtagagcatagttgctggatgatgcacgtgatcaggcatttaatgagaggcacctctatggaaacaaacataaaaacaaaaacttgttggagaagaatataaatcctatttgttgagtctagagggcaggcagttaagaagttttctagacattgaattctaagcatcttcagatggtagagtggtaatctgatggattttctggtttatggtttgaatgtggtgatggcataaacattaatttcacagtcatagttatttcctggaacagaacacggatgatgctggagttccagtggactttctgaatggctcttgtagcaggagctccaggcatgaaggttgcctatacgtgatttgttgtggtggtaagtcttttgaagtttatatcaagttcttgggcttcagtgtgcaaggctttttcaaatcctgggggagaaagacagctacaagacaaccttgtaggttgtcccagtagaatcagtaggttgtaggagtcccagtaaggatttgggcagtcagattttaattctcagtgatgtcaagtcaagagggaaggcaaaaaattataaacatcaatttggagagatgtagcccgatattgaaggaaaactaaacaattgagtatttagtaagagtggcaaaatgggtgagatggcagaattcagtttagtttacaggtaaatgataaaatcctcaagacaatgaacaaaattggaatctgataacccacagtggtgtgttttacataaaacacaacaaaaccggaattggatgagaagagtccctggatctagggtcatcagaatgtagctattaagagttggattctgaagccaaattcaaattaggtgccttgtactttgcgcactgaatgctctcaggcaaattatttaccttctttgtgcctcagtctattcatttacaaaaggaatcttaagagtatatatctcataggattgttttgaaaattaatgagtacgttacattcaactgtgtctgccacattgctgtgaagttattaccttcctaatatacttacaaacttcataattaagaaaaaataaaaattcataaaatgaacatatttgtaataacttattataaatattgtatagttcattaaatgtattacctttagacatattaaaaataacacacccctcatccccccccaaaaaattcctgtatgcctgttttaaagcagttctgcatgttaaagctgcatttatgatatctaagaagtgttttttctcctaaatagcaggttggtaataatgtatattgcaatcgtaataatgtaagttctggttacaatagtttatctgggtaacatgtagaagttaagtgaatgaggtaataaattaaccaataagattacctttctggtagggaggaaaaacacttctgggttgaattaatattttgtacacatatgaaaggaagaagaaaaataagaaataccatttgcaaagctgactttaataaattttaattgaatggataaacattttagttaaaggtagtaatcttaacttgagattacttgagataaaaatatatattttcttaagagacatgattgttagataacttagagatataataagtggaagggttttccattaaggtaactgatagtccttaggtaaattaaataatgggaggaacttgtgttaggaaatcaacatccgagttacagttaaattggtgggagtctttccagtgcctgaagatacagagattttcaatagaaataaggtttttctgagaaattaagtgaaataaaatgtgcaatagtgattgataagcactgtttattgaagaaacgatttatctttattcttgccctttgctttttaaaacttttattgcattttcttctatttttaatacactttgttattgaagcataacataaccatataccataaacacagatagctaccactcagatcaccacttggatcaagaattaggaacgaacatatttgattttaactgcagtctcttctctcttacgctgaaaatctatgtttctaatgacattagtataattgcttatatggtaattaccttactatatacatataatggttccaaaataacagttcttgaattatttttataaaacaaaattaacacaaagatttatagtgatttctgcatttattttattattatatgtttacagacattggctaatgcttctgatgatcaggcttctctcgattaactgaagatagccttactctgcagctgtgtatttcttattccatctggagcctatgccatcagacattatgtctgccatattttttcttctgtggaaaatcagttttctttctgaagtgcttatttttacctttggctgctgatgtagatctttcatttgttcttcatcttaggctgtgccctggctctaaaaagtgttctcactgtctctttgctttcatttttttcctttcctatccctacgcccttaaatcacaatatctgtcagagttccagaagaaagaataaatactcaaaggagtcatgactattataatagttgatagtgtttactttggcctagttgtttctagatttgtctcaagaagcaaacaaaccaaggattatatatataccatcttgaccacaaaccaagcctcagattcctctatacatatgtcttaagttaccaatacatgttaactgttataatatttctttgactatatgtatacaccatgtagatgtagactatgtatactttgcatcctgctgtttatcacatgcctggcacatattaggcactgaaatagttgcttaatacatcaaaataaaattgaatagggaaaatataatttcttaagttagcattcccctctctccacccaaaagtattaaataaaaaaacaagagtttacgatgactttaacattatgatagagatacaagaaaaacaaataagtatagtaattgaaatggtgcccagaacaccctctttgttgacactaaaagtaagttcatcagaccaaatctgtactgttcagctctggggaacataatttaaatgagacactgaaaaactggagcctgtctagaaagcaacttataattttagggacgtattagctgttttcaaatattcagctaatcagtggaaatgcaatgaagcatattcttattatgatgagaagaaaggaaagagagccctttgtccactaaatatttaaacaaacaaactttgtaacagtgagagatggccaaaaatataaaaagcttaatctggaagtagtgagttgtttttcactggggtgtgggcaggggcttcatgtctatttaaggaatgctgtgttcccatggaaaaccagcacaagacaaggatgccctctcttaccattcctatttaacatagtattagaagtcctgaccagggaaatcaggcaagagaaagaaataaagcgcctccaactaggaagagaggaagtcaaactatctctgtttgcagacaacatgatgctatatctagaaaaccccatggtctcagcccaaaagcttcttgtgctgataaacaacttcagcaaagtctcaggatacaaaaccaatgtgccaaaatcactagcattcctatacaccaacaacagagagaaatctgttccattgcatctgttgcatgcagtgcaacagggagaaatcagtaatgcaatcacattcacaactgccatagaaagaataaaatacctaggaatacagctaactagaggggtgaaagatctctacgtggagaactaccaaacactcctcaaagaaatcagagatgacagaaacaaatggaaaaacattccatgttcatggataggaagaatcaatatcattaaaatggccacactgctcaacgcaatttattagattcaatgctattcctattaaactaccattgagattcttcagagaactagaagaaactattttaaagttcatatggaaccaataaaagagcccaagtagccaaggcaatcctaagcaatttattagagtcaatgctattcctattaaactaccattgagattcttcagagaactagaagaaactatttcaaagttcacatggaaccaaaaaaaagagcccaagtagccaaggcaatactaagcaaaaagagaaaagctggatgcatcacattacctgacttcaaactatactacagggctacagtggccaaaacagcatgatactggtacaagaacagacacatggatcaatggaacaaaacagagaaccaagaaataagactgcacacctagcaaccatctgatcttcaacaaagctgacaaaaacaagcaatggggaaaggactacctattcaataagtggtgctgggataactggctagccacatgcagaagatagaaactggaccccttccttacaccatgtacaaagattaactcaagatagattaaagacttaaatataaaacctcaaactataaaaaccctggaagacaacccgggcaataccatttaggacataggaacagacaaaggtttcatgacaaagatgccaaaagcaattgcaacaaaagcaaaaattgaaaaatggcatctaattaaactaaatagtttctgcacagcaaaggaaactatcaacagagtgagcagacaaactacagaatggaagaaaatgtttgcaaactatgcatccgacaaaggtctaaaatccagcatttataaggaacttaaacaaatctatgagaaaaaaaaaccctactaaaaaagtgggcaaagggcatgaacagacacttctcaaaagaagacatacatgcggccaacaagcatatgaaaaaagctcaacatcactaatcattagagaaatgcaaatcaaaaccacaatgaaataccatctcacaccagtcaggacggctattaataaaaagtcaaaaaatagtagatgctagcacggttgtggggaaaaaggagcacgtatacattgttggtgggactgtacattagttcaaccattgtggaagacagtgtggcaattcctcaaagacctacagacagaaataccatcaacccagcaatatcattactgcatttatacccaaaggaatataaatcgttctattacaaaggcacatgcacacgtatgttcattgcagcactattcacaatagcaaagacgtggaatcaacctaaatgcccaccaatgatagactggataaagcaaatgtggtacatatacaccatggtatactgcgtagccataagaaagaatgagaccatgtactttgcaggaacatggatggagttggaggccattatccttagcaaactaatacagtaacagaaaatcaaatactgtgtcttctcacttgcaggtgggagctaaatgatgaaaacacatggacacttagaggggaataacatacattgggacctgttggagggtggagggtgggaggagggagaggattaaaaaaaaataactgatggttagtaggcttatatctggatgacaaaataatctgtacaacaaatccccatgacataagtttacctatataacacacatgcacatgtacccctgaacttaaaagttaaaaacaaagaaaagctgtggataggtttggtggacaaactaggaactggagaatatatgggaattttacaatagtctcactggagccttagtgggttttagtagtgtttcaagggccatgtgtagggtgagaagacagtggatgcccaccaccaccactaccaccatcagcattcctttagctgaatagctcactcttcatctgtttcatattgggcttctgggtcacattctatttaaagaaagagtttccactcgactctgaggtccttgaatccaaagtatctctcataggtccttggagcaatcgtattggaatttttaaaatgttgattgaatggcttgaggtgaaaggaacctgttgcacagaactagttctctgttatgagtccacaaaggtcttaaattcgataaacattgtttttactagtaagtgtcttagtatcttaaaattatagtaagcttgattcttttctatcatgttggcacagttcagttagcaaataataaaatgaaacaatgatgatatgtaggtagacatattaacatgcctttgtatggagcaaacaataagaagcagatgggacagtctgaggaacgcattaacaagagtttctgaagccaactgctgctgcacctgttaacctggaaggagattaatgcagtagaacagctactgtctttccatatttcttaccacaaaaagatgttttattacattcattgtaacctcttggtaacacattcagaatacaagcttcttcctagtttccgcacatgtctttctcatgatagcatactgtctttgaaaattccatctgctttgatgatttgggctattctatcaaggcaatataaaattgtttttcttaaactttattacaggtcattgagtttcatgatctatagtgaatatttctgtattgatttgttggtatttttattttctcttctcaagctccttgtaagtggggactagcaatgtattttttaattttccgaactatttaaaatctttgatgccaatgattcaacttaaattctggttatatacaccaatgataatattttgtatctagccgatatttaatatttatcatttttttaaagaatcattcactttcatcactatcatagagatgggacaaaaaatataaagactattttacgtatgtatgacttgcttggtaattatttgctgaatgaatgaaaaatacaaaaattgatagttttgctcttacccatcttgtatatctcttccagtgctcattttgcattatgtattagttcatctttgcctttattaagagtagaaaacgccatttcatcttttacatataaaaatgagtctggtctgatacagttactcacatcttcgcttaaatttcttttcttcttcttttttttttttttttttggtggagtcttgctctgtcacccaggctggagtgcagtgacgcgatctctgctcactacaacctccatctcctgggttcaagtgattctcctgcctcagcctcccgagtagctgggattacaggcatgcaccaagccacccaactattttttgtatttttagtagagacggggcttcaccatgttggccaggctggtcttgaactcctgacctcaagtgatctgcccgtcttggccttccaaaatgctgtgattacaggtgtgagccaccgcacccagcccagtgaaatttcaatttgaatttggaagctctactaaggtagtaatgtgaactttcaatattattagaaagctcatcaatctgaaatttaacataaggtaaagaaataaaaagcattaagaccttacttcatatgagagctagaatccatgacctgaaaaataaagtagataaattcacttataaaactataatttaaactcttaacttgtaaatttggggaaattagtggtgaatgggtttctaatatatggaacatgaagcagtaggaaatatgttatgagttgtgacagatattccacctcccacgagactgtgatttttagaatcgacgtgttataaaattgatctgaactttgtccctgatgctggaaaagtggcaacctgtgactgctctaaagtaagctaaaggagctgaacaaggctgggcacagtggctcaggcctgtaatcccagcactttgggaagcagaggcgggcggatcatgaggtcaggagttcaagaccagcctgaccaacgcggtgaaatcccatctgtactaaaaatacaaaaattagccgggtgcagtggtacatgcttgtaatcccagctactcggggagctgaggcgggagaatcgcttgaacccaggaggcagaggttgcagtgaaccgcgattgtgccactgcactccagcctgggcgacagagtgagactgagtctcaaaaaaaaaaaacaaacaaaaaaagaagctgaacaaatgctggcattcatacatggtttgagaaatagccctttttcatttaagggaaagacttactgagatccagattgagaaaacaccccatcaacaataaagtggctcaggaaaatgttttatactagcacatcttcaagtttctacttaaggctattctacatgaatatttaaaaagaggagatgtcaaatataaaagcacaagaggccccgagggcttagtatctttatttgcgttaaggtttctcataaataattctatttggggatataggctctggtatatatgtaataaatgtgagtctttttaatatcagagttacccttaggatagtaagtgtatttatttcaaagaaatataaaaataaaatgaataaaatatttcaggtacctcagatcattgcaaattagtcctcaagtctctttcagtttttcttggattatatgaataatgctttgggatagaggaaactcaccaaagtatatttctgaggactgggggtgggaaaggtttcagaaaggagaaacccatgggaagaatttttctactgactgtcaagtaattcatctcaacagaagaaaagctgattttcgatcagtttaaggtaatagaatatgtcagaattcctggggttttctttgttcaatagcccacttaacctgctgcagaacaccctaggaataacaaatgaatcataaggtagagggacattccagcacacttgttttcttcaaatattgatattttccccttaaaattatatgtctagaaaagcttttgctcggacagagtctgtagggccagaaatataaataactgtcaaatataaagctgaatcgcctccacaagattttaggaacttctgggctggggaaatgtggcctgaaggaaggctgctggtttggccactctctgtattccatcagaaaaaatggtggggtataatcagaagttgaaatgctcacagtagttttaccccatggcttgtcagctgaatattgcgacaatataggaattcttcatcgcagaaggaatgagcctccctggactgatgattttctcagtttatggtgtgtgtgacgtttttgtaaagtggcaaatagttgggggcatgagctagaaggtaactttaggaggttcaaccaaccaagtaccacctgcgaattggacaaaattcaatggacaaaagaaaacttaattgtcagcttactcccgccttttactcccgggacctagcttatagcacatggttcataaaagactctataaatgattactgaatgaatgaataagtgaaagtgcacaaatgaatgtatctctgagattttaagacacttttgtgttcatgcgtcttgcctacctgtctccggtccttctgaattcataaaaagaagaaagttcattttttctggaatgactgatcttaggaaataggaataagtaattctgatgggtagaaagtgcagtgtatgaagattcagaagggtaaggccaattaatttaaacactctgagtctatgttctaacctgtaaagaaggctgataatatttgccttctctgctatggtgttcccgaattgtgctttccaagaaatataccatcacacaatatatggccgtggtgaatacagtctccaatgtccttctccccctgcaatgtgccaacagagtgatctccctaagcatacagggtggtgcagtgtaaaggcacactggtttctgtttgaattccagctttgctacttactacctccataatgtgtagcaagatacttcatcactcacctgtaaaatgatgataaaatgatacttatttctatgagaattaaatagctgatacaagtaaagagcttaaaacagtatttggcctgttttaagtgctcaatagatcctagatgttgtcattgctgttactactgctgctgctgctactactactactactacatatttgtttttggaccctacttaatcccataggttgccacaactactgtctacataatgaaatctaacccccaagtataggatactggtttctaaaaatctagttcatggctatagttctagcttcattcaccaccgttctactagcaataccagtccatctgtatttcctccaatagaccactctatttttttttttttttttgcctctgcacctttacactggatgtttattttgcctttagtcacatatccacaaagagatgttctgggctccatatgatggagttgcatacagtgctgagcttttctttcagggacatattcagaaaggatgagtttttgattgttgtcaaatttgctgttatgctgattttttttagaactgtttgggcgactaatacaaattcatccaaagcttgttaagaatacattgtaatcatcagtatttttaaaaagcgattcttcattctttaccattgtgtttcccatcccaaggatttcttcagattaaaatattaaatgggacaggcaacactttgaatgtaaaggagaaatgggaaacactaacacaatggtggcatgataggggatgaaacacagaaagttggaaccaaaggggagcaccatcgttcatatttatgtgtaaggaaaagaacagaatgtccttgggtagtttactatttcttaataattctcctcacttttaggcaagcttgccagtttttttcagtggggatcacaaatgcctatctgtctgtctgtctgtctgtctgtctatctatctatctatctatctatctatctatctatctatctatctatctacctacctacctacctatctaatctatctatcatctaatatattatgtgtgcgtgtgtgtgtgtgtgtgtgtgtgtgtgtgtgtgtgtgtgtatgtaacgatttaattgaagcaatggtaagacattacaacttcaaaaatactgttttacttcacatacactttacctctaggtttcatagcaagacaatagatgggtgtagttttagtattatttacttttatttgttaattcaaggcactatagaaatacttaatctgtttaaaccccaaacatctctttaaaatattttatgtgacgagcaaacagaacatcatgatctaataaaaatgaaaatgtttttgatgttaaatgttgaggtaaaacttttgttcagttattataaaataatgacattttgagaacctcttatttttaattttatcgtctctaaaattgagacaatcacatcttggtatcgataatttttgatgcatgatgtaatatttaaaggactttaaaaatgtaaaatgctgcataaatattattgctctgcttaacagtgtttcaaatacatttttggaaaaatagcaaagtaagagataacatgtatctaaagttctcatcccttatcaactaaatattatgaaaaccttagcttctcttgcttctccagaatgacagattagcttcagcctaccttagactaggcatatggaattggcaaacgctctccttagcaactgcaaagttcaccgcagatgcatttaacagaaatagcacagatacaattaagcaggtagaaagaaagaatgagcatgtaaaacacctacaatattccagatttcctgctcacttaattggatgattcagatacctctctttcataatgtccaggtgaaagaaatgccggttcctcttatttctctacatcaaactaaagctccacttaccagagcaaacacaagtacaatctgttatgttttggactgtctaatccattctctgtagtttcacaagaatctggtgagcttacatggcatccagagaacagggtgatgagtaaagcccttaactctacattgtctaaagaacctgatttattcaaagaggaggcagctctctcacttcttattaacagagggtagagagtttctttcccaaggccaagaggggttttagctattaatacactttctctccctccgtccctggtgtgtgtgtgtgtgtgtgtgtgtgtgtgtgtgtgtctgtttctctcactgtcaattttgagtggggtttcaaggtttaaataaggtgacaagtctagtagaaaaatctctgaaagagctatttgtagaacattaactgactagttgtgtgactttgtacaaccagcttaaggattcagttttataacagataagtttagggaaataaattgcactgcacattgccttcggtctgttgtacctcaaatagcttaggaatctgttttctcctaaaacatcttcctggaagctgggtttccgctccaccccacctcccatgtgtttatgcattcctctgctcctccccttaactgagaatcctcattagaggcctgggtaaaatgtttcattgttagagttataatatatcaataatttacattaccttaattttgtaatttcccagggcattttgaaatgttatgataacatgaaaaatgtatgactttcctcaatgaaaagttaattaacaattgcttttattcttcaatgaacagctttatggctaaattattactagttttgtttttaattagatgactaaataatgcaaaattagaccatctttgtcctgacactgaattagaccattctttggcaactcgtgtacaaactattttcatttttaaaaaaatgtatgattctgagaacaagtaaatgcaattagaattgtctttcagagggaaagtggccccaaatgatgtcaagaagccagttttatgataaagatgtctatttttatgaaataaaagtaaggagaaaaaaagaattaatacaacttcactttgagattttatttttttaattcttgagttaggctgaaggccagatttgtaattgctcgtgtatgtgctttctaaaacttgcttaaggaaaactggatggattttctaaaaggcaattaaagatttgcagttgaaaaatcatcctccctcataagtattggtgtatacagtggtttccctgcatggaggatatgctggacaatatattgagaactgcagctccaggcaaaattaaactagtgttttttagagatactaggattagcttgtttactaatttgttaaagcagctgcgtttacgaaatacataagccttaagttttaatcttagaaacaccctttcccaaatattctaacaagctcaatggtcctctgcctttgctgatatttagaacatcacgagagtctttaaaacttacagatgcctaggtcccacctgggaagtttctaatttaattggtttaggtggcaacctagtcactgggctgtttaaaagctccccaggtgactataatgcacaggaaaggttgcaagccattgaacttgtaaacaatatagcagctcccatacaaaagcccgtaaattcaaagaaaatccagccatatgaacaagaaaaaaaatgtcaacgaagcagggacttcataaacatatgtttgcaacaacacatcattgaatatgattaatttgatatatctgttttgttataaaatgtctagaaaaaaatgtaatgtaacaaaaccagcaagcaatttaaaacaaataggaaaagatgattagtagatcatatgatataatttttagataatacaggaatcggacattgaatttacgttagatttttatagacagatatacagaaaaacactcagagtagacaacaggatgttagcagtggtgctgcttaatgaaaaaatgagttatctgtacttttcttaatagttattgttgtatctttttatggtaaacatacattgtttttgtaacaggagagaaaaagtagtgttctttccttgaaccaaaaaaaaagtaggccatttaaaaattaatgaataaggaaaatacacatgaaaacttctggaataagaacaaagctgtaatcaaagaaaattaatagccttaatttttttatatttgagattaaagggaaaataagagaactaaacatttgattctgtaagaaacctttaaaaagcagtacaagaaataacttcaaaaatactatattgagaaatgctttcaaacaactaagtatgaattatctgtttacaaaattccaaaccatgaaaatagtatttaaacctctatgttcatgttctaaagcccttataatcttgattatgagacttcaaaaaaatagcatacacattgaaaactatcaaccaatctcaggaatacagacgttcaaatcttataaaacatagcagatttagccaataagagaagaagttatcatgccaaattggatttatttcaggaaaacatatatgcctactataagagaatctatttacatccttcattgtaggtaaagatcagaaggaaaaaatatacaatactttttagttatgaaaaagtattgataaatgaaaagaatctgtccctaatttaggagtagaaacaaaacttttagcaatgtaagaatagatgatagtttataagcatgaaaaatattgtctatctcaaaacaagagccaactctgtgatcaatgttgaaatattgaaggtatcctcattaaaattagaaatataactagaatgactaccaaaactgctctttttaaatgctattttgcatattctagtcagtgaaagaagccaagtaaaagaaacaggaagtataagtattggggaaaaaagtcaaattattcatattaatagatgatattgtcaacttggtactaagtaaatcaacaatgacaactattataactaatgggaaaaattagtcccaaagctcattaagaaaagaaaaaacctagaaataattaaatattaattaaatgtaatttttctaaatgctaatttctcttttaacaacctattgaaaatcaaagctatcattttccacagaagttcaaaatgtgaaattactgtgaatttatttagcatgaaatttggtgatatacaagcctttactggaaaaataacagaatatttgcatccatggacagatataattttatatttcttggtgggaatattaatattttagacatataatttactacaaattaagctaaaatctgatagaaacacataaaatttaaattggggtggcaggaagacattggatgtgacaagaattactctaaagtttatctggcagcaatatagatgaggattaatagaaaatgttgaaaaccttaaatgaaaggtcatttgcccatgtagctattagagtgtttaataaaacttctactggctgggtgcggtgtctcacgcctgtaatcccagcactttgcgaggccgaggcgggtggatcacctgaggtcaggagttcgagaccagcctaaccaacatcgtgaaacccagcctctacttaaaaatacaaaaattagccgggcatgatggcaggcgcctgtaatcccagctactcgggaggctgcggcaggagaatcgcttgatccagggaggcagaggttgcagtgagctgagatttcgccactgcactccagcctgggcaacagagcaagactctgtataaaaaaaaaaaaaaaatctactaaaagtctatacaaacagattagtgaaacaaaagagaaaatcccaaaatatgctcaagtgtatataataaaaatggaatttcaaatcagtggatagagatggactatgaaagaaatggttttgataatcatgttaaaaggcaaaaccctgctttacacaatgcagtgaattaaatttcaccttgaacaaatattcaatcataattaagcttaagaagcccaaagaacaggaagaacgataggtgaatatttctacaatgaggcgatggtagagaactatgtagaaatgattttaaaaacccaaaatttaaaatggaaaacacatagataatttttaaaatctgtacattaaaaaccagtaaactgaaattgaatcttacaaatcaattcagaaaaataaatgcattgcctaattttaagcatacaggaagaaagtgttagacctggaggtcattattttaagtgaaatgaaccagacacagaaagtcaaatattgcatgttcacccataattgtgtgctaaaaaatgtgtacacatgtacacagagagtggaatgatagacaatggaaacttagtagggtgagggggttggagtggagtggataatgagaaattaatgtgtatgatatatttgggtgagggacgctctaaaagccctaacttgaccactacacaatctatgcatgtaacaaaattacacatgtaccccatatatttggacaaaaagaaaataaaacacatccaaaggtatatgaaaaaatgttcgatctcatttgtaaccaaataatgaaaataaaaataacttttccttgtatactttgtatgcttctgacagaagactgaatcaatttatttcatgagagcagtttgcaataccaatcaagagaaagcgtgcttacacttgactaagcaattgcatttccagggaaattatcgaagaaatgcttacatctatgtgcaaagactgagttgtacctatatttattgtttaattgttattacagtgaaaaatggaaacaacaccagtattcatcagtaggaggctactaaaaaatgatatatctctaaagaagggaaatttaaaataaaattttacaggtgattgcattgatattaaaggtaatccaaatacatacatgaaaaaataaagcagactgtaatacacagtatgtatacatataatgctgtattatgatcccgcttatatatgcatatatattaaaatataaatttttaacctctgggaaatgcattcctacctaattttaagtctctcattttttcttattggaattttaaaaagtgtacaatgcttattaatgaatataaatttgtttgaatcaatgttttcaatttttaatcaaattatctgtacatgattcaagtaatttttacttcataagttcttttatttaaatatgctgcattcctctctcatttctcactcctcagaggcagatatttgagtcattctctttttctaatgcgtgacaaatctgtaataacatgtttatatctctaattcttgattttctcattttttcatggtctacagtctctcttatgagagatgaaaaattatctcatttatatctaccccatgtatttgttctattaactaatttttcttttacatgaagaccttaaatgttaatttttttcttcaaaacagtgtcaaaagtatgtcttaacccttcacatgataaaatggggattttagtggtcctccatgtttcttcacttctcctactgaatttcttctcccaaattctgtaaagtctacttttaattttatgttgagttgcattccttctgtgttctctaactatgattaggtctcgtgttttgtcaaagatttattctaaaaattgaaaacatataaacagtatgtacactattattatagcaccataaatatatttcattgcagagtctattaccgtgttgggcttatatttcctttcctatgatttccatggcaatttacctctgctactttacagaaaatttcaagattcaagttaaaatggattctctttttttttctttttttgttttttgagacagagtctcactctgtcacccaggctggagtgcagtggtgccatctcggctcactgcagcctctgcctcctggattgaagcgattcttctgcctcagcctcccaactagctgggattataggcacacaccgccacacctggctaatttttgtatttttagtagagatggggtttcaccatgttggccaggctggtctcaaactcctgacctcaggtgatccacccgcctcggcctcccaaattgctgggattacaggcatgagccactgctccagccaaaatggattatcttttcttacactcagtaatctctcaaattcaaataacgacataggaaattcctaagtctattgagtctttatctaccaaatctccctctctttcactttctctgtctctcttatgtacacgtagacacgcacacactcccttctcaaaaggtaagagaataggatggtttgtaaaggggaaacgtctctggaaacacccacactttaataatgtcttaactaatcacattgcttgggtgtttttgttattttgtagtttgcggttttgtttgttttattttctgataacctgcagagtaggaaagaagagagtccagaaacttgttgtaaagctggacttcaagttggaagaaatattggaaggaccttttaaaaagagagttgtatgatatcgaagcagcctatttccctgaccccttcccgggactcgtgacagggttgcctcatttacctagaccagttttcaactccttatgggagggagcatgcaagtgaattccaggggtttggggtacgaatgatcctgtcacccaggtactgagtatagtacccaatagtcagtttttcaacccttatccccctccctccttccccttctagtaatccctagtgtctatcgttttcacctttatgtccatgagtacccaatatatagctcccacttacaagtgagaacatgtggtatttggcgttccgttgctgcatgaattcgcctaggataatggcctccatcacagctgcatctgtgttgctacgaaggacatgatttcattctgttttatggctgcatagtattccatggggtatatttagattttctttatccagtccaccaatgatgtgtatctaggttaattccatgtctttgctattgtgaatagtgctgtgatgaacacgtgaatgcatgtgtctttatgttaaaacaattttatttattttggatatatattcagtaatgggattgctggattgaatggtagttctgtcttaaattctttgggaaatctccaaactgccttccacagtggctgaactaatttacattcccaccaacagtgtataagcattcccttttctctgcggcttcaccagcatttgttgttttttgagtttttaataatggcctttctgactggtgtgcgatggtatctcattgtggttttgatttgcatttctctgacaattaatgttattcagcattttttcatatgcttgtaggctacttgtatgtcttcttttgagaggtgtctgttcatgccctttgcctgttttttgatggcgttgtattttgcttgttcagttttttaagttccttgtaaattctagatattgaacctttgtgtgatatgtagtttgtaatgattttctcctgttccgtaggttgtctgttactctgttgatagtttcttttgctgtgcagaagctttttagtttaattaggtctcgcttgtcaattttttggttttgctccaattgcttttgaggatttagtcataaatgctttcctaaccccaatgtccagaatgatgtttcttaggttttcttctacaattcttctagtttgaggtcttacatttaaatctttaatcatcttgggttaatttttatacatgtcgaaaattagggatccagtttcattcttccacatatggctagccagtccatttattgaacagggagtcctttcccattgcttatttttgtcaactttgttgaaaatcatatggctgcaggtgtgtggctttatttctgggttctctactttgttccattggtttatgtgtctgtttttgtgccagtaccatgctgtttttgtttttgtttttgctcttatttaaatgttataaaaattgcctatatttaagatgtataatgggatgttttgatgtgcatatacgcagtgaactgattactacagttaagctaattaacatatccatctcttcacatagttattttgtgtctgtggtaagaaaacttacaatttactctcagcaaatttcaagtatacaatacagtattactgactatagtccctatgctgtgcattagatctccagaacttattcattgtatgtaactgaaacgttataccatgctgattcggttgctgtagccttatagtatagtttgaagttgggtaatgtgctgcctctggctttgttctttttccttaggattacttttgggctcctttttggttctatatgaattttagtatagcttttttccagttctgtgaaaaatgatgttagtggtttgataggaataacatttaattcgtagattgctttgggtagtatggccattttaatgatattgattcttctaatccatgagtatggaaagtttttctatttgtttgtgtcatctgtgatttattttagtagtgttctgtaagtcttctcatagagatcattcacctcttttattttttatggctattataaatgggattgcatacttgatttggtgcttagcttgaaaattactggtatgtagaaatgttactgatttttgtatattgattttgtttcctgaaactttactgaagtcagtgctatttttagatggatatatgagaatatttaacttatatggagagtcatagaaattacacaatttgtatttcatacatcatccacacacatgctttctttacttaccagaatagtggaaatgctgcataaaatgaacttaatggtttttatttcctttcttcataaatgtacagtttatcaagaagatgccctttggcttactgacgtgtaaggagggactaaaaggaaaggaaaaagaataggtagctctaacttttcctttctgtctacatcatcattttttattgcaaggtggttggccaatataaggaaggaacaccactaagaaaagatattatgtggttttttggtcattagtgtttcttagaatgtcactcacttcttcctgcatatatatatctcaaatatatatatacacgtatatacacatatatatacatatatatctcaaatatatatacatatatatctcaaatatatatatatacacatatatatttagaagattatttggtgaatacactattagaacaaaaagaaagaagtattagcgaagtgacagggtatttcccaactcagatatatgatacctgctaatggactgttcgtgattataaatgtagtatatgctcattgtagacattatgaaaaacgtaaaatcccctataattagacctctatttgtgctaggcacatgatgacttttcttgctctgcaacaactattttttttctcttaaagtttataatgttgtcagtattgtcggatatcctcagggattccatcatcttttcttaattgtggttaattacttaaccaattattacaaattattttcctataatttattgctcttagtatcaaacaattaaacaccctaggaaatgtcttattacttgatctatgaactggtgagaatctatattctacataggggcttgttttctggttttaaatctaatacagtcgtttggcaaataaagacaaaaaataaatgttgtctacctacttttcaattatccaagtagtttaaaataaaaacatccttactgattttttaaactcttatataattgcctaattctacagtaactggggttggtagtaactaaaacctgttgtattcctagtgatgcccaatgagccttgggaaatgaataggtgggtatagtccagttgctagaaaatacttgcttgttactgacttatctgagaggaaataaacactttcatttatcagggacagagtataaagtgttcctcactgaagcatttctaaaagctctacagtcctttgaatactgataaggactctgaaatgcaagggaaaatatgcaagtaatctggactatcacaggttattttatgaactgctcatatttttactcctttgataagtattatttcccccaaccccaaacccgataaattcgataacccttttcatatataatattatcagcaaggcatcttagagtttcctttaaaaaatgtaaattaccaagagaaccagaatgattttggggctcataatggtagatcttaaagagagtggaaagatcagtagttttcgcattttgctacacattggtggagtgtttacaaacagtgatatctgcgttctatttccacagagtctgacttaagtggtctgtaatccgagcatctcagtttgaaaagtttcctagataattttaatgtgtatccaacgttgaaagccagagtaaaatgaaggaagttctggggcctcagataagcaacttcactacttttttcaggttctttgaataattgacatcatccccaaattcaaatcgttgatagtcatgatgagtacctgttttactccagaaatctatataatattggttacctcagtgcttgctcttaacttccataatcaaaggaggaagagagactcatcgtgttcagatacaggttgtgtaacgtgtgtctgtaaaatactaatgtgattgacttcatccatccattcacctatccatccatgcatccatccatgtatacctcgtgtacctccattcgtctactcatccaatgtctctgtctaggctccaggactgctgccttaaggttgtttaccaactcagtaggtagtatgttatcctcaggctttggaaacaggggggtttagttaaagagcaaaccaactcaacatactagattaacttgaaagggaaaagttatgcttagtgcataaattctttccctcttgtcctttcaaatccatttttcattctttaccactgtgctttgtgtcctggggactgccctttaggaatggcatcagagttcctttgccctacagtttccagttgagacaggctgcagcaggaggagtacagtggataagaaaagggtggagtatttattttcatgtggccccatgggatttccacaggttagctctgaacagctaacattagaccagagcttctgctggacagttctctcttgcatttctattgggtctggctctctagttcaggaaacgtccttcctcttaacccttgaggtctacagttaactctccgtcatcccttcttgaatttcctaacactgagcatatctctgttgataacccctttagcaaactggcctcacataccccgagattgagaaatcaatcctccagtttctaccgggactctgattgagttaatgtgggataatttgcttacactaccctcttataaagtgactatgtacattagcatattaactcctttgaggattttcatttacttttgttattaaagcattacacgttttttgataatgtgtaggagactcaatcatagccagaagtgtctcagacgcaagcacctgtaatgattcccttatatacagttttatcccaccagaaattgggactaggcacaagtgttctaggtaacatttcaggatcctactgtcataaagattattatggcacaaaaactatttggctagaagtatccccagactcctctgtgccacattatcttcctttatccagttatctgaggatgtgcttgcagtggcagactagcttttggggaaattttatttcaagaaaaaaagcagggaggaagaaaagggtaagaaatgaggaagggaagaggcccatgggctaggagtgggctgtcctgtttctgggaaactttgtgaaggtttcaggagtagtagtaactcatggtgaatgaaaatgagagggaattgttggcttttaaagtaataggatatgcccctttatgatgggattaagagatacaagtaagctgggcgcggtggctcacgcctgtaaatcccaacactttgggaggccgaggcaggcagatcacctgaggtcaggagttcgagaccagcctgaccaaagtggaaaaagcccatctctactaaaaatacaaaattagccaggcgtggtggtgcatgcctgtaaccccagctactccggagtctgaggcaggagaatctcttgaacccaggaggcggaggttgtggtgagctgagatggcgccattgcactccagcctgggcaacaagagcaaaactccgtctccagaaaaaaaaaaaagagatacaagtaaagttatgaaatcacctgtggtttctagacagttttttttgtgtgtgtgaaatattaagaacagaatacatgtgctaaaacattttaaaagcttaataaggtcttttaaatcttgcctcttccttttgctcgtctaatattacctcctatgtccacccccacggattatttacatttaatgctttctagtgaaatcattaaaatgagatttatggattattcataataggcaggatgaaaaaggaaggtgaggcgacagtgatccttccttagctgttaatggataaggagtttcacagcaagaggaaaaaggcataacattagtattaccggttgtctaagggggagagatagaattgtttttttttccttgcattttctgtactctactcttatttccaaatattctttaatgtttgtgtgactttgtgacttctatattcagcgcaaaaaggattaaagaattaatttaggaaatcaatttacactgagtgtctccagtgccagagagggagggaaggacattcgtagctacagtgttcataatagcaaataattgtattatggtcataccatggaatattatatagcagtataaataattaactatgatcacatgtaagaatatgagaaaatcataaaaacataatgtagaggtccacaaacattttcttaaagggccagatagtacatatttcaggcttctaggtcatattgcaaatacctaactatgttgttgtggcatcaaagcagccatagttattatatgagtgaataggtgtgagtgagtctaataaaacttcatttttaaaaactgtcagggaggccgggcgcggtggctcacgcctgtaatcccagcactttgggaggccgagatgggcggatcatgaggtcagcagatcgagaccatcctggctaacacggtgaaaccccgtctctactaaaaatacaagaaattagcggggcgtggtggcgggcgcctgtagtcccagctactcgggaggctgaggcaggagaatggcgtgaacccgggaggcggagcttgcagtgagccgagatcgcgccactgcgctccagcctggggaagtgcactcactccagagccggggagcccatgggcggtagtgtgctgacccttgtattagacaacactccagaaagctcaagcataggaacacctaatgaaaatattgttttggcatacatgcatgtgtgataaatcgaaaaaaccaacacaaaacaaatgagcaaacaaaagaaatcaaaggcaatgatatgacaatccccagattctggatggtagttaatcctgggtaaatggagggaggggtacaaaagagtgaagaactagtgtaggagcacataggttcaggtgtgagttgttgctaatatttcagttattgggatggacatatgtttgttttattattgagctttgtaatttacatatccattacatatattcttttatgcatcaaatatcacattacacaaagggaaatcataaaaattggggaaaaattggaggcaagcatagatcttggggcccagtgtagcatgcttttttctatttttaaatttaaaattgtttttagagatgcggtatttctctgtcacccaggcttgaacccctaggttcaagcaatcctcctgaatagctgggattacaggtgggtgccacttcacctggctaactaaaacaaaattcttttaaagatatggtctctctttgttgcccaggctgatctctaactcctggcctcaggtaaccctcccacctcagcctcccagggggattataggcacaagtcagtgtgcctcacttccttcaacattcttaaatacatcttggaagcacagtgtttattaccttgtttctaaaagagatgcatctattgtaatcatatttataatgttcttatatatggttttcattagttttactgaaactctcaacctattgttttttgatgatgactaccaatattcattgattcactgataatctttgtaatgtccttaactcttagggattagatgacattaaatctttatcaagaagtggattttgttacttaagtattttagtagcaacaaaattggtcacaacgacattccactgaagcagaatagtcagaaagcaatccaagccgcagaaataaattaggttgagcaagactacacctaatggcattgagataaagaccctactcctgactcactgccccgtgttctagtggtgtgcctgctctgcaattctccttaagttgatgtgcatctatctctttaggaccagggggtatttagtctgtaatggcttttccggcaacgtgtctcatttcagctgcttcagttgtcgagataacactctcgtcactgcctctctgatggtttcccattcaacagcagtcatttcatcttgggacacttttcctcacagtcaacagtttttcctttgtgtaattaagtctcatttttttctggatagatccatttgtgccagaactcttctgctgccttgaagcctgcaccattcagttatttttagtgttatctctttcctttcattagcacagagctaaattgtgcatattttgttctttcagctttatacagattaagatcttctagctccttagtcattcattttagctgttgcattgaatttcctacagttcatttaaatcacccagttcagtttaatatgcccagaataaataaagcatcattttttttcacatctaatcacctaccccgaccaatggcaagtgtaaggattataaacctttgtgactttgcctgtttactcccttagtaggtgagctctgagccaaaatataaattcattaaagtttttcttaatatctctagtctctacttctggctcccttccctcagggtattatcccctttacaaatatttttttgtgtctttaggtttccatttgttttttaaaaatacattcttatcaaaacgggaaaatattttcccatttctttcataaaccatgttttctcaatagttatctctaatcaaatacaagaaacagggaaataggtagtgccttacaaaggaattttagccatatacgtttggataaggtgaattttccatatcctggagatggttttgagtactcaggaggctacatctgaaaaaaaatatatagttattctctatctgggagtcaacttaattcttttgatggaaaaatagaggctgtgaatccccagctccagctggcagagatcactttgctcagaagttttgcacgtaaaaagaaacttcttttctgggatcactgatttatttcagctgtaccctgaaactggtagtcagatacaccctgtaaccagcagatctgatattctccagccttttcgggcttgtacatcaatcgtttaaactacactataatggggatcatttgccaaagctcattgccattctcttctagtcataccaatttataattacttttctctcaatatgtacccacgactctcctttcttcacccttatgatatttattcaaatattaaatgttgccctttttttctacctttattccaaatgccttagaggtctggcgtaaactatatggctataacctattgcatttttaccccatagatggaaaatgtattggtgaattgtttataaggttggaagttcccctgaaaataaaatccacccaccccactaggggagtacggaaactatatataatatgacacacatcgctattacttttattacatatgcttattatttattgttcaaattttcaaatatggtcctgcacacaggcaattttcacaaaagagcagtatcagtgttaatcagtttgaaacaggaaaggatttgtgaccccaccttacaaaatacaattccttatggttacaaaatctcattcaaatggattctattgtagccatatcaataaggaaactgatctatcagccaaaatcggaaatagccctgataaagtagactgagcttacattcatgcacagatgtttgctcattatttttacttgataaggacagatacgtttgtgtttagcataatgcgtgtgtgtatatttgaatagattttctagaccctcattttagttctagtaacaattgtctggttctgaatagggactttccactttacagaagcaggcaaaatttaatttgtcatagctaccactgaacccatttcctttatatactcaatctgctttgacacagtagatattggagtttcaaaccttaaaatgaaatacagctttatgatgaaatataagttgatatgaatactttcaatatacctatattctatgttacactcagttagctggcatttggtcttcactcatggacattttaaaaactcatacattctttagtgtttgataatgtgacaaatcaaccccctataaaattaactttaaatcaattgatacgttagcatgtgagtatatgtgtgtgactatgaatacatacttatataagcacacttatatgcttatacgtttgtttgaatctctcactgaccttagccataaaaacacttttattctgttgatttatacctcagcctacatgtgaacaaaagattcagcaaatcagaataacacagttactctattttctaatttatttgtaataaatatgcattacctgcataacgtttacatcaatatgggcatacattacttatgcaatgtaatgatctaaataacgcaactatcgacagtaaccacgcactctccccctagcaattacagaatacagtttctctgttgcacaacatgcctgactatcgtaaatttagggttatctccttattaggattccatttacactcttaatgaatcatatttattttatagcagcttattagtaaagttgactgccaagatataggcaatacatacaatttcctcaaaaactggggctttcactgttaatttaacaaacctatatgaatccatataatatatgaatcatatgaatatatataatatgtaataagataaaatgcataatttaacatatatgaaatatatatagtattaattgttaatatgtattaatatagtataaaataatatatataataaatgtataatatataatatatgaatcatataatagaaaaatatatgcatagacttgagttaggtgtaaagaatggaaaaattaaaaaatagtgcacttgatgagttcacaacctagtatagtgtgtcatagagaatgtagcattttgtgtatgcaatagtaaatatatataatgcaaaagaaatgaatggttttgcttagggtaggaggaatggggtaatatttgagataaatctcaaagcatgtaaagatttatcaaatgaagaattggggttatggaggagtaggggttgcattccaggagggagggaccaacatgtacaaaagcttaaaggaatgtaatttcatagtatctgggaaggacaatgggtagctatatgtttctgaaatcttgaatgcttgggtgaaataccaaaaatagggctagaaaagcaggttatgattagattgtgaaggcatttaaaagcgtcttgattagttgggaaataatttctacaacgttttagttgtataaataacaaaagcttcttttaatccagatacttagtggaagttcctctttctctaagtagaatactagacctaataataataataataataccgtatcatatatttttattacttttttggttttctgactactttcaagtacagagatggtccccgacatacagtagttcaacttaacaatttttcgactttaggatggtgcgaaagtgatactcatgctgtggaaaccatactttgaggacctatacaactattctggttttgactttcagtatagtatttaataaattacatgaaatattcaacattttattataaaataggctttgtgttttatgatttttttcccaactgtaggctaacgtaagtgttctaagcatgtttaagataggctaggctaacctatgatgtacagtctgttaggtgtatcaaatgcattttcaagtttcaaaatttccaaactatgatgggtatatcagcatgtaacttcattgtaagttgaaatgcccatcaaagatagactggataaagaaaatgtggcacatatacaccatggaatactgtgcagccataaaaaattatgagtttatgtcctttgcagggacatggatgaagctggaaaccatcattctcagcaaactaaaacaggaacagaaaaccaaataccacatgttctgtcttataagtgggagttgaacaacaagaacacatggacacagggaagggaacatcacacacctgggcctgtcagggggtggggggcaaagggagggatagcattaggagaaatacctaatgtagatgacgggttgatgggtgcagcagtccaccatagcacgtgcatacctatgtaacaaacctgcacgttctgcacatgtatcccagaacttaaaatataataataatataaaagaaaagtatctgtgcttgatgggttttgatatcctcagtaactatggccaattagttgaacatggcacagtattatccatttgcagtagaggaaacaaaggagaaaccagaggaacagtgagagagagagagagagagaaagctgctggtcatgtcctctttccagcatgtcaccctccatattcttcttcaaatcaaaaaacgtagaacggaagggagcttagtagcattcagctctgctacactgcacaccagctatacacacaggcaatcaatatggtttggacacagctgatataatttggtggagctctaattgaatttttccccttcttaatataattacacctacagaacgtctccaattaagtgtccccccatcagtctcaaaattaaatataccaaatggaactcattatctactcccacataaaccagctcttcatgactctttcccctttctattaagcaccactgcttccaggctcctatatctgaaatccctgaagtcgcttatttttgtattcctttctccatcccgaaatccattcagtcactgaatgctattgactaatgtttgaaattatatctatgcataccttcctttacgttatgggtaaatgtttttggaatgtgtttaaacagaacaaggaattggtgaacaaaagaataaagccatgcataaacaaatgtttattcaccgttttcattatatttgtttgtagtactgcaacctaaagtttgtaatgtctgagaatatctgattgtaagcaattaccccaaccccatgtaagttaacagtgttataactggtacgtctccttataggtgaatttgttcaaagttgcttaattatattttaaaaatctcttattttagaaagaactctcaattgctttactctgaataagataatactgtttagaagacaaatcattgcaagttttacatctgtaagtaggttacctgatgaaacggattgaaaaactgaaggcaaatattgaatgttagattattcccaggtatctgacttcatcttcttacttgctaggtgtcattgttaatgataatttaaaaaatcacacatacctacgtatccacatatacaaaacagtaagcagtcatgctattgaattcacaaatatacaccaaaagacaaggggaaaaatataaacaacagctttcttactagcaagcagagtgtggcgtgaggtcaaatttttatgacgaagagcatacatattcacaaagtaatttatctcaacttatgtagctggaaatggagttgatgggttctgaaaaaagcttctagatgacattaaaaaaaggggttcttatgacaaagaaaaaaattacctcaaagtagctttcaaagagatcgaataaagtcatttcatgaaatgcgagactaaaaaacatgccagcatttctaatatttctaatgttttatatgatataaatatgaaatataaaaatatttaatatttttatcatagaaaattaatggcatcaatttcttatcaaaatcatgcatacaattgattatatatatttgctaaagtcctaaaattttgtgtatacatgttggcctaaaatatttttgagggctcacaggcatattttcttttgggaaaatggaaactgcctaatacatgagatgatttatatacatgctgcattttacaagcggttagggaaacacatgtctattttttttctaaatcaaataatccgtgtgtgcaccatgctaccttgaatatcagattatcagatttaccatccctattagggatataaatgttccagaagaacataagagcaaatttttagaaagattaatacagaatctaaagattgaagggataagatgatttacattaaatctgtttccaggatatcctagttgggaaatcaacctaaatacccgaaaacttaaataatccaagacagtatgcatttgcttaacagactttttctccatcatttgtctgtgtttagtaagataaaagaaagacttgcggccgggcgtccgaggcagcgggtcacctgaggccgggagttcaagaccagcctgaccaacatggagaaacatcatctccactaaaaggcggaggttgtggtgagctgagatctggccatcatactccagcctgggcaacaagagtgaaattccatcaaaaaaaaaaaaaaaaaaaaaaaagaaagaaagaaggaaacttgctacccctcagtaaacaagttatatttccttcataactttcttcctataaggcaataaacaaatatttattaagaacctatcatgtgccaagtaaataagtactctgtcaaaacaagttagattcagagtgggctggaatgatttggacagaagggaatgtgagaaaggctagataagatggaaacttttctgccacaggcataccttcccagtagacgaagtagagatacaaataatgtagcgaagggtactatggaataaaaaagtcaataaatttatttatttagtgattacagctacgatttgctaagcaattaatatatgtcagacattaagccaagacctctgcagatgatgccatgtttagatcttataacaacctagtaaatgtgttaggatgatcaaatccattttattttatttaaattaaatagttaattttaatggatagaaaaaattgtttatctttatttcattcaacatgttgttttgaatatatatatatgaatggctcagtcaagctaattaacatatttattacctcacatgcttatttttttgtaggaagaacactttttttttttttttttggagatggagtcttgctccgtctcccaggcaggagtgcagtggcttgatctcggttcactgcaacttctgcctcacaggttcaagcgattctcctgcctcagcctcctgagtagctgggactacagcctcacgccgccacatcctgctaattttttgtgtgttttagtagagacggggtttcactatgttgcccaggctggtcaggaactcctgagctcaggcaatccgcccgcttccgcctcccaaagtactgggattacaggcgtgagccactgcacccagccaagtgaaaaacacttaaaatctactctcttagcaattttcaagagtataatacattgttatgaaccacctgtagaatcaacatgtacaatagatctctcgaacttatttctcctgtctaaatgaaattttgtattctttgatcaatatctctgcaagcctcacaccctcctcccagtctctggtaaccactattctactctctacttctatgagcccaactttttagataccacctataataagcgagatcatatgttatttggctttctgtgcctggcttattgcacttagcaaaacttcctccaggattatccatgttgtcacaaatggtagattttcttctttcatgtctgaattatattccattgtgtgtgtgtgtgaccacattttcattatccattcatttgttgatggacatttaggttgaatccataccttggctattgtgaacaatgctgcaatgaacacgggagtgcacatatcttttcaatataatgatttcatttctttgggatacatactcagtaatgggattgctggatccatactcaatttaaagatatagaaaacaagccataaatatttatgtcccccaatatccaaaagttaatcaatggccaaatcagcttaatttgtctgttttgtttttactatcaaacttaatacattcaccaatgctctttttcatagttgtagccttttcttgaagattataacgtttagtagtttagattgttatgtagacatgtggtgattaaagtaactcctgcaattaatttaactaattttagttatcatgtactacacttttacatactatttccctcaaaaatgttaaaaagcctttcttaaagcctttttagcagtgccttttatatttattcgtgttactgtttcatcaattgctttagtttggtgacagtttcatgtagttcatttactggattcaagttacagtccagttacttgaggggcccaaaagttaaggacttctgaaagtgcgtgaattgcttctactcactgatgcatcccaaacattcagatcttgttacctgaatcaggggttctattctttaaagttccttggaggatactatcagaatgaaaagactcaaaatagaagtcttccggaatacaatgttgtggttttaaacttaaaagtattgccagtacaacgttagtatctactgaggtggtcacactcattccagcaggtcacatactgagaactgcataggctttgtatggtaggccaaaataactttcagattgagtccatcaattatttttctaaaaaaaaaaaaaaaaaaaaaaaaaaaaacccagagtttttgaaaaacctacttagtcatttggaaaaatactatgacattgaaaatcatattcctggaatccctaaacattattaccaaaaccatcggccacagagctgtcttctactttttccccaaccccactaattccgagtgtatctgttcttaatattcaggttatacttaatattccatcttaatattttattttaaacacgttttatgctaaaaatttacacatatatttataatgttctttctttggggatatgaggattctactgctgacctactgctgaagtactaaaaaatagtacttcagtgtgtacagtaatagggttgagcaatttattcatgtcccagccaatttccaagtatccacacacatttcattggcaaagtattcatatccactcatcagagtttgtaatgtaaactgtttctaaagaatattttctcactctttcagaggagaaaatcagtgtattttaaaacataaagctaataaattccatcacacagaaattaacttcaatagggctgtggtttgaaatatgttgtaatccactgaaggaactcaggtaaaactagtaggttagctaatatttattttttatttttatctttaagggacaagatctctctctggcacccaggctgaagtgcagtggcatgatcatagctcactctaaccttgaattcctgggctcagatgattctcccacctgcacctcctgagtagctgggacaagtgcacaccacgccctgctaattttctttttatttttcgtggagacagggtcttgctatgtttcccaagctggtctagaactcctggcctcaagcaatcctcccgcctcagcctcccaaagtgctgggattacaagtgtgatccatcatgcctggtctagctaacatttttcttttttcttatttcataaaattgagactcactttgcatccatagacttatggaaacattttgaatccagatgccgtagccatttttttgtttgttttggtttgtttttcaatatcaatagaatcttttgtaagcaaaagaaagcaaggacttctttaataatttctgatttttatcgtggcatttcctcactctcctcatgccagcatagtccaaagttgctatttgctcaacattattcaggtacttaaatgtttaaacttgatagtttttaatgcatctataaatttaaacataattctggaaagcttcattttctataattaaaagtgataatctatcttattttaaatgtatttctgtcttgggtatcttttcctaattaaaatttaaactcttattttacaatgagacgttacctcatttatttttcattaaacaaataaaaccagacaatccctgaaaaacctatgaagaattatctttttaaaaatataacaaatccatgtgatgaaaactatctttttacatcaccactacacagaaagtttttcatttttttatgtaatcactattaataaaatcatccatgtaggacaataggcaattatcgttaacacctatagcaaagcatagataaagttgattttttgtttttgtttttgttttttttttaagatctcacttctgttgcccaggctggagtgaagtggtgcgatcttggctcactgcaacctctggctcccggggttaagcgattctcccacctcagcctaccgagtagctgggattacaggggtgtgccaccacacccatctaatttttgtatttttagtagagatggggtttcgctataatggccaggctggtctcgaactcctggcctcaagtgatccccctgccttggcctcccaaagtattgagattacaggtgtgagccactgcgccccaccctgacaaagatgattttactttatcttaacctcatcctcataatggggtttgataattacatttcatattttgatcacttaaaattatttttgttagtagcattagtattttgtacatgaggaaaaggtgctatgtaaccatcaaagtacagttctctttctaacggtaaaagtggttgtgcaaaatgtagcagttaatgtctataaataggagacatagaattctatgtttctctcaagaagaatttctgttaaaatataggaaaaatatatcaattcatatttggtatttatgtagattatgttatagtactcctattttacttttgtaatttaataagggaaaactttttaaaatattcattcagtgagtaactttattgagactctacaatacagtgtaagatttatataccaatactacaaccattttactgacagaaaaataaaaatctagaacagtttcagaaatgctgcctttttatgctgttctccccaaagcaggggtccccaaagcaggggtccccaaaccctgggccccagaccaatcggtccgtgacctgttagaaaccagggggaacagcaggaagtgagccccgggcaagcctgagctctgcctcctgtcagataagcagcagcattacattctcataggagcgagaaccctattgtgacctgcgcatgcgagggatctaggttgtgtgctccttatgagaatttaatgataaatgttgtaatgtgcttgaatcattcccaaaccatctccccagcccaagtctgtgaaaaaattgtcttccacgaaaccagtccctggtgctaaaaaggttggggaccacttccctaaagcttagggggtaggtctaaatattttctcaagactcctctaagtaaacacataaaagcataattttaatgaaagcacttgtatattactgcaaatgtgatacctgaacttttgtttgcttgctttcttgtttgttagcttttgagaatacaattgtttttattacttagagagtatacattgaaggaaattataagaattttcatacttgaaagggacaaaagaatatgcaataggaaacagtaaaaaaaaaaaaaaatcatgtcagggctttcaaacctatctgcagaattcctttcaagtttcagtcctttgggggagccttttagctctctgcaccctctccttctgcttatgtgtaagccttggtgatgcatttaccaaacccttcatatctgtaatcatgaggtagcttttctccttcattgtaaatttagggatagtagaaactgccttatttaacattgtatctcttatataaccttacatgtaccatacatacatagagtctatgggataaataaacgtttatacaaattaaacatgagatggatgaagagataaacggatggatggatgaatggatggatgggtgcatggataaataaataaatggttggatgaatatgcttataattatttctatgtaaaatatttttagtgttaatgacccccaaagtgctcttaaagctccaattacctagttaattgcacatagtacaaaattcatagaggtaaacaaaaaagaacgcataaagaaaattgtttctcctattatgttagctagcctcctagttatcctccttctctcttactgggggtgctggcattgcggttttctgtgtattctttcagatatctgctgtacatacatgcgcatagtcatacacatggccacgtatatcagttcaaatctgtcaggaaggtatgagaacatcaatttcctcataccataaaaaacgcagtatactaccaaacttttgatctttgccaatatgattggtgaaaaactatgaaactatgtcttttagtttgcacttatctactcaggaatgaggatgaacatattttcaaatatttaagagcaatttttgttactttttctctgaattctgttcgttttctttgcaagttataatattccttccaaaattgttttataaccagttgacagatgggaaccagtctctaggtggtatcagaaacagtgttatccagcatattcaaacctaccaacttattcgatttatcactatagctaattgtttgagtagttcatacatttatttacactatcaagaaaaacagtttcaacattcttgaccatatttaaaaatgccttttaggctacaaaggtagattgaagagagaagttccaaacagtaatgaaggcctctattccatcccagggaatttgcaaaggctctttcctggacaaacttgtgctattattttgcatgatggaataattttcatccttcaaatctgtttaattgcacatccaaaaaaacaccttctttgactatgaaatccagactagttctctctccttccctggactctctattttaggtactttctatctgaacatcttgtttatttcttcaataacacttattatattgggtgattatgttattttgtcatttatttgctattccctacaatagattggaagttccatgagagtagtttccttgcatgtcttgtttactgttttatcttcactgcttgatccatagtgtggcatgaagtaaacattcaacaaatatgtgcggaaggaataaatgaacatacacatctaatttctggtgtgtttatcaaaaattcaattgtatacttctggtagactgaatttaattcaattgagtttttcccatgtgtgataagaaggatagggaaagggacagatggaggatgagagggtaggagagaagaagagagaaagagatgggagggaggagaatgtagactctccaaggagcctaggctttttactgcatttatttattcacaatttactgcaaatgaatttcacagacacagaaactgcaagcttagacaccatcattgctctgagacaaatgcatccagagtgtatttgaagttcagatataattgatagataaatgtaaagctgggagaaatttattaaaaatgattggtaactcataactttcaaggaagtgaattgtttaaaaaatgtacataatacttgggttagatactgtgtttcttagttaaaatataataatatatgtatttcaatagatcatatatgccaggagacacctgggcgtattgactattacataatagtgattatctttatccatctagtgtttgattgaggacggaggttgatgtatcaaattaaattaattgagatctaagaatgacatcaataaacaaaatgttaagtttcaatcttcctttttgcatatgtactgctttaatctttcggctattgatcaccagttatgtttgcaaagatcacatttaggctttcctttacagagagatttaacttaccctttaaaccatgagtcagtgcttttagttttggggatttagtttccttaaagccctctgagggaaagaagggtatatatagttatatatctccagagaaattgaatatcaaagtctatataacatgtaatttatcaatgattattaactcctgcacttgcctgtgactgcctgtatttggtgatgaagaaaatatagaaaagtagatgattagaatagggaacctaggaaataggaattggaatgtagataatctacagaacaaatggtatcttcttttatttcaattgtcatttgaaaaactttctttgaagagtaaataaaatataacaaatcgggactgaattcagtagaatagactgaatactactaaaacataaaaaataaaagagctaaaaggtaactttaaggtgtagctttatgttcttacatttatggcatgagtgcaaggaaaggctcaacagttacatgcatccatttactttatagttgaatagtaaaaaataatgcagtgaaaagtaatacttcctagggatgttcttagacatgcaacctgatcaaaaaagtataaaacaggttggatagtatctctggaatctcccattaataccaacaatgccttttcatcaaccaacactatttgccatagtcttctcaattctatctggacttcctgattttgatcttttcaagccaatccttttacacactgctctcagacttagtcatctaaagggtctttgatgatctccattgtcttaagttagaagtcctaagcctggcctacaaggttctctattttttgtcattttcctattttgacttatttcctccactctttgactgtcctacttaaactttaaggcagtctccttagacctggaatgctgtttcccactttctcaacctaccaagcttttgaacgtcctttgggacccagacaaaatctgatctttgccgtgatacatttcattaattctctgaggtggaattagtctccctttcctttgattcttctgtagcacctgtaagaacctgtacaatagcaggtatcatattgcatggtaattattttccaaatgtccttctcctcattccaattatgtgtacttcaagggccaggacattgaatcattgtgtgtatcctatgctggaaatatattaagcttccatagagttctcatgtaaattattgtgaaacatttttaatgctatgaagaaagcattttaaatctgtttaagaatacatgttgaccgggtgcagtggctcatgcctgtaatgccagcactttgggaggccaaggcaggcagatcgcttgagcccaggagttcgagaccagcctggacaacatggtgaaacctcatctctgcaaaacccacaaaaattagctgtgtgtggtggtgggcacctgtaattccagctacttgggaggctgaggtgggaggtttcacttgaggcgggaggcagaggttgcagtgaactgagatcacaccactgcaccatctgggcgacagagtgcgaccttgtcacacacacgaaaaaataatacatgttgaaactttgggaaggttttgaagcaagttttgattaaataggacttagatttcaggagtcagttttatcttcaatgcactcaaatttttcagataataaaattatttaatatacagtcatactaataatatagacccttgcaatagataagttggtgtgtatgcgtatgtccaacagaggattcctacagtcacatatattttagccataaaataggaaatctaaataagcacctttgtcttagacttcagcacaataggtcgaaccttcatttgaatgtgactagggactgccaagtccctactgcctatctctaccaaaggctgatctggaagtgaacccttttctttctttttttttttttttctagcagatgaatgttattgagtttatctgtggtctagtgatgatacctgcagagcagcttcatttttcagagtcattcagaaagctatcataagcttcttccttcttgtcaggcagagcaaatcctggcatgacaggatgtactgggagtctccgatagtgggaactgacaaagatgtgccttcagcactcccacaaagccatattgtctttctggaaatgaggaggatttattcagcaaatctaagtgtaaactaggagacccatcagataaaatccatacaacaaagatcaccaaccattttttcttcttctgaatagagccagaagatgcaatttaccttcttctctttttttccccagaagtgacaatatagagttagagagaaattatagagcggagattttgaaattcagtttcctccccaactaccagttgaaaaagcatagccttaggaaatgttctcatttgatttcctatgttttataacatgttatgtttgtgaatttgtgtgtgatgtgtggtggtggtggttccaaaatatctaagatatatagtaaatgagcaaacaaaaatagtttgtagcttttgatatatcatagttgtacatattttcgtgttacatgttgtattagttcatttttacacagctataaagaactacctgagactgggtgatttataaagaaaagaggtttaattgactcaaagttccacatgactggggaggcctcaggacgctgacaatcttggcagaaggtgaaggggaggcaaggcacatcttacatggtggcaggagctgggggatgtgggggggggggaagtgccacacttttaaaccatcagatctcgtgagaactcactcactatcacaagaaaagtctgagggaaatctgctcccatgatccagtcatctcccaccaggtccctcccctgacacaaggagattactatttggcattagatttgggtggggacacagagccaaagtatatcacatgtaatattttaatcatgtatatactgtataaatgatcaaatcagagtaattgggatatccatcatctcaatccttcctttctttgtgatgggatcattataattattctcttctagctattttgaaatatacaatgaattattgtttattatactaccatatactagaaaaaatgctctttaaacctcatcagaacacttgctaaattgtctttctatatgcttatgacaacagtaaaaaacaaagatcacatgtccaatattactgggctgtgcttggaaaaaaatattttactcttttttaaactttagccaattatatcttcaatagatatcaacactaatatcacatctttaaaaagtttctatgggttttagtaaggtatataaaaccatcaaatatattatccagagagacaatatattgacatttaaaatatgttcttactcatttatggtatcacctactgtcagaggtaaagtaaatttaatgatgtctaaagggattacagttgcttaaattggctagagttttatatgatttatattttcattcttttctggacattggaatcaagtagtaaattttgaaattttatattatatttttacttatcctgtttacagtatcacacctgactcaatttagagtagaaaatatttctagttacccttcgtcagaatataaacatcttttcaaattcatttcagcattttaattgtgttaatagaaatagttcaaaaatatagcataaacctcagcatgttctattttggagagaaggaggacaatgattgttgactctgatggatagtttcccaatgtgaaaagagtaaatttttcttcataataatattttatttcatttcatatggtactctaaaataggcaaaatatacctttacctctcttctgaatactagaagtagaagtaaatgattttattattgacattattaattatactatatttatgttgatatgatgccttacagttcatcaatcattttcatatattttaattcatttggccctaatagctgtgaccacctcccagaatagcccagtcaaaagaggttgaaaagaaaaatcatacaaaatacccatgaagtttaagaatttatggcacttgaaatatttgcccttagacaatgttcttagtatttctgagcctcagtttttaatacatgaataagaatactttaagtattattcttccacataatgggaataagaatacttactccatgaaatgagaataagaagacttactttatgtagctactgagggagtcaagtgaggaacaattactaatgccatgacacagtgtagatgctcaatactcatcattcagtttccccttttgaacttaaggccagaaagaagtgacttcagtggtggtactaaggagagagggggtgatttagccttcgcttaacattcatcagacctcacaccaagccacaggaagcaaatatacaatctctgaaaatagggaaacctacattcaagacaaatcctgtgtgtacctcctccccttcctctcccagaaaagatggctatgtctgaatcacaaaatgtaagcggtcgcctaaaaattcagaaatcaggataaattatattttacctcattttaacaattaaaatcaatgcaaaataattcatatgagcaaaatattaaaattttaagagaatacaagatgtaatcttgcattcgtgccactcatgttctctggcctcatccttatctccacttaaccaccaactgaaggactagaaagttggcaatgacataaagcacagcttcctcatgccatcttcccatgtccccccaactttgggatagtaaacattgcctgaatttataatcctgtaatatttttaaatgttttatcagatacatatgtttcaacaatatttgttccagtttagtgtagcaggtaagactgtgggtttcagagcatttccacctggatttgaattctgtctacactaattactggatatctgaccttgggaatgttactgaagttctctgagcctcagttttctcatccaaaaaaaaaatggggacaataatagtaaatatgtcatagggctattgtgaacatatgtgagaacattaaaaatatttactgtatgacacaaaatgttttagtttgtttttatatttaaatgttattaaaaagatatttgggactcatattttcctcatgcatcatcccatccctagaatttatcttgattgttttgtgtagcagtcgtttctttgactactatgtaatcaggttaactgtccattttcctgccagagggcatttgggctgctcgaagatttttcgtttattgtgttattttgggcagtgctgctaggaacattctcctcatgtttccttttgcaaatgcctctctgtttttgatgttgcagatggattttaccttgccatggcatgaaatccaaaggctgtacccacagattccgatatttatctcttgcttgtccacacctagtaataaactttagccaaagcaaactgttgcttgttactatgagcctaaagtcgctgtgctggtccctcctgaatccttttctatgagtcgcttagtactcttgctctcaagctctggtctgtaccgagctgacagctttttttatttctaggactttattgctgttttaaagtctttccactctgaatctgtacctattcaccccagagttagttgcatttctctgtgtctctaacctgagggtcatgagtctgactttgctcagtgaaggcaaatattttcttcctctgcagtctgtgttcattttgataatgatgcttgatggggggactaagcatccccctgagaggaaagaatctcgtttggattgtaatttgtcacagtttgtcttagtttggatttctttaaaagctaagcctgaggcgaggactagagagcaactagctcatttggtagctgatcacagggagcacaagtgggaggcaggggaagtaaggaaaaacgggggaaaacaatagtgagtgtattattcagctggctactgcagtgggaaactgttgttcaatcctgtgaagacccctctgaggaatgctgtagaatgtactcataattgtccctctgaagaataagaggctggggaatatgtctctggttcctgtgcctcattaattatttctcagggacatcaggtcccctcctgtgtgttggatgagtgagtttctataactttggacaaagtcgtgaggctgaaacacagagaagcagtgggtgcttgacctggtgggctgttagcatgcccgagactctccattacagggctgatcaagccagaggtaaaccaacagagtgggcagtgtctgctacacagttccaactggatttcccaattacctagtgctatggtcttctttgacaacgtgtctcaagaaggtaacctgtagctctagcccactgctactgaatgtttcatacctggtatcatgtggattataactgtagtatttcatttttcaggtattgtagtatcgaaaagccctatagcctgttttccttagtataaattttgattaaattatgcaagtccactttaaattcacagtttgatgttatgtacttaggaggcactcaataaatagttcttaaagcaataatttttaaatgactttttgtattatgtagacacatattaactataatagagcccttcggcaggaaaactgtttcttcaaagttgcaaagtgactgacaacgatatatataactagaagcttcaagaaaaatgttaccaggggccacttttaaactagggggaaaatcgtttttcacaataagctatcccatctcctccctactgaagcctctgatctgctatgattattaaaccctcatcttttagtgcaagaaacccagcaagctgaaagggaaatgcttttcagatttaaaaaacaaaaacaaaaacaaaaataaacttaatttcttttaggttgatgttgttatactaacttgccaatcagttaaacatgtatctgtcttttaaaaatatcttattacataagaacaaaagattttaagacatacagtttcaatcataaccaaatgtgtttattacttcgaattttccacagtaacttgaagccatctatgtacccatctccaattccatcgcttccccactaccaccagagataacggtggtcgtgaaatttgctttgttttatagtcttgctacatatatatgtattactaaaagagaaatagtcttgctctgcatgcttttgaacttcgtatagttggaatcatattgcatttattcttctgtgactgtttctttcaatcagcattatgttgctaagattcatccatgtctgtgactgcagcattatgtcatattccgtcatagaaataacccacaatttatttatgcatactactgttgatggatactagggtcgtttccagttttaattcttttcctattacaaacaaggttccttgtatacatgtaggagtgggattgctgggtcacagggcccatgtatgtgccctctggtatactctttggctcctttacactgctctactgtgtaccactgggagactgacctttgtagactgtgtgtgccaggcttccatttccaggtgacttccagctctctttggctgatggtgaaggattggaaactcagggaagacacaagagtgcttctcttcctctctttgtgtttcaggcagtatctttggcaacagctgcatatgctttgatgtcccccctccaaccagataggcccactatagctgcagcttccaatgaatgatctcataacctcattcactgaattcatgcaccctgccttcttctttcctcctcctccccattccttctcctcttcctcctccccatcctcctccttctctctctctctctctctctctctctccccttctctcccactcttcttctctcctctcccttcctctccctgtactttaagggtaatagtggcttcctgtggttgctaaactctgagtcactttgtcctccacagcttgtcaactctgttcttctctcatttgtttcaattctataatttaagctttctgatttaaatatcaaatgactttttgtgtctgcttagattctgactgacatgatgtatttctaagtttccaagattatgccaaattatttttaaaattggttacaccaatttaaattctcacgaacttaaaaattctgcttgctcccaaattctaacacttgacaatgtcaaacttaacttttggctactctgttgagtataaaattgtttctagctgtggatttactttgaattgcattaatgaaaaatgagtttgggcattttttcatggttccattggcaagttttaaatgcagacaattgtttagaatacattatttttatttaataaaactcattattaaatgtatattcctttaaggctgtactttgatttagtgtaagtagtacacaatttacctcagttttccgttttatgtattcactcatttaatttagcagatatgaattaagttctacaatatactatacagagtttaatgtgaaagtaagaaatcagaacatgttatggctaggataacttgggagcacagccttttgaaactggtttagtgttaggatacacatttttgtgtttacctctctttcccaccgccagtttcaccatcattcataagatcaatgactgtggtacattacaaatataatgtgaaattgtttacaagatttagtattgttcaatcattttgcaggcactatcatggaccttcagtgtcaataaaggattcagaggttccagaaaattctaggctatatcatgccttgagaagtcctatctaataaatatatagaccacttttagagtgtaaaggaattcgtaaaatgtgtcagcttaaaatattgaaatagcgagggtgacttttcctttccaaactgttgatgaagactgcagacagggataaacattagctctgtgtggacaggatagtgtctgttgtctgagattctggtcatactggtttaatacccataattgaaagagctctaagacatggctttgtggagaaagaaagatactacttgagagaaagcaagttcatatttccttttactaataagtgttcagattcctaaaatactgtaacagtaaaaagatattttgaaactttctaagaaagtgtgttctagggcggggcgcggtggctcactcctgtaatcccagcactttggggggccgaggcaggcggatcacgaggtcaggatttcgagaccagcctggccaacatagtgaaaccccgtctctactaaaaatgcacacacagaaaaattagccaggcatggcggcgggcacctggaatcccagctactcaggaggctgaggcaggagaatcgcttggcaggagaattgggaggcggaggttgcagtgagcccagatcacaccattgcactccagcccgggtgacagtgtgagactctatctaaaaaaaataaaagaaaaagaaattgcattctaggggtgaacatccacatgtacctgggatcaatccttccacagtcatatcttcacatcataattctaaccctaaatcatcaagaaaatattatgttagacataccatacataagaagggaaagagagctgtcctacataatcattttcatgtaaacctttcatccagaagttgaggtgttctgtcatccaaaggagtagctctcagctgtctggaaaacctttttgttcagaaggacatttgttgtgctttggtttaccttgggttttattgtgccgcgtgtgtgtgtgtgcaattctcattctattaaattattgtgtgattttgatacatttatgtcagggattagaaattttagaaatagattatttctggttttctgatcaatgtgtcctgtctatgtattttgtctttgtgcaaaggaataagactaaaacacaagttatatgcctgagtctacaactgagtgttgtaaaccaaaattccaaatgaaagaaagatatggggtggatggcaggattagagaattgaaagagtgaagaacaaaaggcttgcagacatcagtaaaatatgctttcttagttaaaaatagtaagaatgttttggaatattttacattaatttcgtttcccactttttctttacttttgcacaattaatgatttagtttttgagtttcaaatatttggccaagcttatctactgattgaattcaatttcttactggatgtgtgtactgcttttttgttgcattcatggcataaattttgtggacgcatttctacaaaaaccgtggattcagcatgttgcagagtactatggcaagaaaactgagtaacagactaagctgagacttggtagaaaatatctgttctcctacaaggcttgactctctactgttacttcaagaaaatattatgttaactatatgtgttatacttaagaaggcagaaggatactcactcctctgacgtggcgagatactcctcattacccccacggaaatactatctagattgtgaactcatccatagaatgactacatatgattcattttgtgatttccctaatatgtattgagtttaaactacattgaattccctggagtttgactagaaggttgattatccagtagagtttcttgtaagaaattcttatagcagtgaactattctttatggcagataaatcctacctgtgtatactgattttctttcttagtaccatagttatactcaggttactttttttttttttttttttttttgctcatatagacaagactacataatcctttttagaaagggccaatatcctatttggaataaaaacaaaacagttagatggtaccagggtcaccttaaattaacttatcagactatcaaccaaatcgaaatatgatttcagatgtaattaacccatttgcctagtgagatgcaaaggtgtgaggatttcttgaacacatctttctcttatgtagcaaatatcaacctcctgataccttttgtagtcagttcacataccatgacaatacatcctaaattttcaggtgtgatctaaccagcataggttcacataattggcatgacacggaatttttaaaatatcaactacctcaggaactttattcatgtgaatctggaagatcctttttggtatttgagccctttcatagattcagatgtcaaagtatttttagaatgggtctgtaaggcatcattattttgtaattataatcttattgattgacagcaaatgctgtgttccatgaaaatgttgcattgaagtgatcccggttagtgctaaagacagactgcttagatctaaagtctcatgagaagaaagaaagaacttaaaatcattttaaattcaccaatatgacgatacaggatctctcataaaatgctgaaaggttgtttttgctgccagacttttagcacttccgttttacgttcaaatgttgtaaaggttgattactcataagttaaaatgtttggtgcaaaatgtactttaaaaatattttcagtgttttttggaaattgtagacatttgattttgaaaagtaggccagaaatttggaagactacaagccatatgatggctgatatttcccatggaaaatataatatgcagctgtgctctgctgcatggtagaacaggagattaaaatatgagaaattataataccgtttgatgatgatattaatgtcactgaatcaaataaagtatgtgatatatcataagttaatagaacaacacttaattattgattagagcctacatcacattttaaattatcggcatgtttggtcttgcaaagggtcaagggtgactcgtagcaacagaactattctcctttcaaaaagttagcagaaagttaatatcaaattctatgaggtagagagggatttgggctgaggtaggtcaggaggaacgtaaagagatgtgtcatgtgtagatttgtgagctgtgggcacctgattttgtgtttaacagtatttacgaccaagataagtgaatgaagagctatgttcttatgaaccttaagtttattttgctaaaataagtaagaaaattcaaattcaaattaagctatatagtcttgcaaatttcaggtctctgaggggtgtgcattaataagtattcaaaagtattttgtcatttaattactattatatgaatttttatgtaattgaattattcttgaatgttgagaaactgtctttactaggctaaaaattcccttagtgatctcgttacccaattcctttgtgttccactctcagtgtctgaattgtcaccaatatgtggagtccaaattatgaaatacaaagctttaccagaattctgatgattttgaaggaagaaaattacagcaaattttgatcaattctctcctattagtgattaattcaatgaaccgcttgaatttcttatttcctcgtagaactgtatgtacatgaaggatagatacaatatttagtacaatctatagtgagatatgaagggaaggagattatgagaaaagaataaaactttattataaaaatgcttgttcataaagatttgacacaaaatcaatatgataagttttcagaaaatcaaacaatgaatttcgtatgaaacctcacattggcaaagcagttatgtgaataccaatattttttaaatctaaaacaaagcattttgaagtagtttcatgaataatgtactgaacctgtttcacgcaatgaaatgaacatcacagtgagaaaattattccacaattgtaaagttaagtgaagcttgcattataaggccaataatactcaatagggtattttctcatgaatttacactatagaatgtttttattctggaatttggatgatatcatagtcattcaacaaatacagagactaagtgatttttaaaatctttcaggaaattagttctttaatttcatctacatgtatgtaaaataaccaaacctatgtcttatgcatataatgtcattctaatatattgttcatgatcataatatttatatagaatccattttgcttggccgattgatttggcttggcctacaaattagtacagtccctctcaactttgacacttctgtgtaccatcagctccttcctggagtactgaaatagcatcctaactgctctctctcatgtagtcttgaccccatctataaatcctaatttcagcatttggagcaaccttttagaaagatcaattaaatcatctcacctcttcattaaaacgcctctcattctaccaagagtaaattccaaaccttttaaccttgacctacataactggaccatgcctccctcgcccatttcaattcagctttgctcttgtagctccaggcaagctagctctgtcttagttcttgcatgtaataagctttcaagtccctcggtgtctacttatttactgttccctctgtattagtccattctggcattgctgtaaagaaatacctgacactggataatttataaagaaaagacgtttagttggttcacggttctgcaggctgttcaggaagcatagcagcttctgcttctggggcggcctcaggaagcttctaatcatggcagaaggcagacggggagcgaggtgactcagacggtgggagcaagggcaagagagacagcaagtggggaggtgctgcacacttttaaacaaccagatctcgtgagagcccactatcgcgagaacagcatcaaggggatggtgctacaccattaatgagaaacaccgtgatccaatcacctgccaccaggccccacctctaacattagggattacaattcaacatgagatttcgtggggacatgaatttaaaccatatcactatctgactggaatgtgctttgctcctgcttctacttccgttttctgagcaatcagacagttattcattaactcattcattcattcactcactcatttgttcatttatgtattaaattattcagtgattctcaactctgggtggttttgccgtccaggggttatttcaccatgtccggagagattcctagtggcataactaaaagaagagatgtttgctactggtgtctagtgggtagagaccagggatgttgctaaacatgtaataatgttcaggtcaacccaccataataaagaatcatcttgtgcaaaatctcagtagcaccaagattgagaatctctgcaatacgtcaacaacccttctaggtgccaggaatatgacagtgaaccaaatgaatatggtctaaactttcacaaactaatccattaaggagaagatagtcaataagctggctaacaaacaattaaatgtatactttcaaattatgttgggtgctctcatggacaaggggacaagagagtggccagtgaaacctaatttagagcaggtggtgttgggggaggtggtgtttatgctaagacccaaagaatgaaagaaagactcagccccaacttatatatatagtaaacatttattgaatatcaatagcaaaaagttgcatttttctcaaccatgtctttttatggtaactggaaattgttcaaattattttttagaatcttttaatcatagattctttgctaaggggattagtctagcatttttctcttgtgagcaattaagttctcaccaagttagtgaatcctatgtcttatgtacttcctacttattactatgaaattatctaaaaaatgctcatagggttcctaatgtagttgaaaagcaaactgttgctgcatctctaatcagtaacaaaacttgtatttctgtcgcaaaataatgtaaaattttatagtactttttacatatttatttaaaacaattttaagtaagattgtttctttgtggaaggtcatatggtcccaatatagggatgtgtacagaaatacatatatacatacaacaacacaatgttaaacctagcaaaagagtggagtctctttcttttatttttcttactttttgagcaacgagacaagcaacatattatgcctagtcacttgaatcatacaccattaaaacattatgggctgagtgcagtggctcatgcctgtaatcccagcactttggaaggccaaggcaggtggattacctgaggtcaggagttcaagaccagcctggccaacatggtgaaaccctgtctctaccaaaaatacaaaaattagccgggcgtgtggtggtggatgcctgtaatcccagctacttgggaggctgaggcaggagaattgcttgagcccgggaggcggaggttgcagtgagcagagatccgccattgcactccagcctgggtgacagagcgagactccatctccaaaaaaagaaaagaaaatatgaaaagaaccatttttaatgtcaactactgctttgatgctaatgtctgtcagttcagtgtctatgacttaccctttattctgctcaaaaccttcttgaattttccatttgaatatcccacaggctcttgaccccacttatccaaaattaaacctatcttcctctctactacacctcttcttataatctttctcttgctatttctaaacatttagtgggccaaataaataccctaggagacatgacttgaaaggggtatgaagtttagataatgttcggcttcttgatctgatactggttaaatgggtgcattacatttgtgaaaacttattgagtcacttatgacttacagattttctctatatattttatattttaagaaaaaagattacatataaattctagaagccaagctacacctttccctcttattcatccagcacatttactgagacagctagattttcataatgactgtccattgttgaatatttgctatatctttgatattgttatccattattaacttccttacctggtttgacagttgaaaatttctgtggtgcagctattattatttccatttcacatatgagcaaaaagagacttagagtggttaagtaacttgtctaagttcacacaacaacaaagtggcaggagtagagtttgaattcgagtcaatatttataatcactatgatatcttgcttctcgtgttccagtcgcattaaaactatgaatgccactcccactccttatccatccttactacctggcttcactttagatcttcaggtcttctttcctatattataatgataatatcataagaaatccagtgcagtttagtctattccaaaatcagtctaaatactgccaggattagtgttcattccacaatataaatctgattgtgtagtttacttaaaatccattaacacagccgttagcaaccttagctacatgtgaaaatcaccaggctccacccaagataaattaaatcagaatctctgggtatgagggactgggagtgagcattttaagaaagctccctgggtaactgtaatgctcagctaggcttggaaaccaatgctttaacgtttccctacagcttttattataaaaataaacccctcagcattgcacaaaatgccctttgtaatttggtttttgccttcctctacctcgcctcctctgctgtaattcccttcttctcccactttttccccaccctacctacatacatttcattgcaattattcaaaagtctttgtttcttctgaagagttatgatttttataccatacccttacacataccagtcttcccctctaaatgcttagttacattatctttgtacttaatccttttagttgctgataataaatgaaaatttctttttagtttctttttttttttttttttttttgagactgagtctcactctgtcgcccaggctgggctgcaacctgggctgcaacctccgcctcccgggttcaagggattctcttgcctcagcctcctgagtagctgggactacaggcatgagccaccaagcccagctaatttttgtatttttagtagagatggggtttcatcatgttggccaggctggtctcaaactcctgacctcgggtgatccacccgccttggcctcccaaagtgctgggattacaggtgtgaaccaccgcacctggccaaatttctttatagtttcttgacttgtttttaatttagaaaatttcccacgtatatagacaccatacaatttataatgtaaagctgttttcctatatcaatcatgttttaccttttttctctttctcctatatatgctgcttcctggaagatctaggagctgacaagtgtctttttatcttgctttgcaaatctaatcttttgccatttctttttatagaaatgaaagcttgtatcatgcatactaaagatggcttcttctttgggctgtagggccatttaatgagttatattgaactgaatgctttataagagttcaaattagtacattgggatactcctatgccagggatggattaatatatctgtccacatatatacacaaaaatgtgtgttgctaatttccaaattagagaatacttattttgaattatcagtatctatgacatattttgcatgtggtatatatttggttaattaaactgagttaccacttgttttatcaaaatttggtgtctttctaaatatatcatgaatatttttcttctaatgcacctcgctttctgctggaactatagaaacactttgtaaatttttacttgtgaccactcgaacatttacaggacattttacctgaaaattttttctgagtcagtgaagaaaatgtccatgtttctgcgtgtgtgtgtgtgtgtgtgtgtgtgtgtgtgtgtgtgtttgtgtgtgtgtgatgcttgcttatgaggaatttattttggctatggttctttattttgctattgcactcttaacattcgtatgatatgtattattaccctataaatacttacacaatatattcttacaaaaattaatacaaagattggccaaaatgtaatagcatatgtttttgtaaatagaatatccatatacagtcataataaaactgaagagcgattttatacttttccataaagccaaagattaagggtgtaatcactgcttataatttactaggaaactataaaacagataaaagtagatgaaaggatattacaaatatctcaataagtcgtcctccgcaactgaccccttgctttacacatgttcagacactctatactaaactctgtttatttttctattttataattttctatatgatcgtaattcagcgttttcctataatattattagtagtgctaccaacagatattacattttatgaaaaattttaaaaagggcacatgttgcataaaactaggttttgaaacagctgcttataatgctgatatttagcacatgactaggtggaatatggactttttaatgaatattttttcaaagttaggtaatttctcatcagtcagtttcaaaagcaaagttaaaatttgtgtttcaaaaaactgggtatgtttgaaaattgtatttaataatggattttgagagttctcaatagcaaattgcttggctgactgtagtttaagaagtaataattttgaagagaagttgaatgcaggtactttcaaagtgttgaaatttttaaagaagaaaattaaccttttcagactgtacacttgttcatcttttatattcttttccctttaaaaaagaattgtagtaagaagggagattaccttctgtcattgatacaaattttccacagtataaatgctgtttatcacatttgtataatatacacttcctatcaattttaaaaattacatgttactactatttaactctgacttaattattttaaatataaaataattcattcttttataaataatcaaaactatagttttacttttctttcaaaatataccactgactacattacagattagattttttttagtataccaaacatattttcatcttttggagttattggaagagtagctgcttactgccttacattttagatttctctatataacaagcattttcatcattttggcttattcgagtaattcttaataaataataatacaatatttacaaatgagatgtcatttgcaattttaacacttcataattttaacaaaatatctttactttgagttttttactttccttttggtgtgacattttgacctccaatgtgatcttcatttaaaggaaatatcaacgaaaattccttttttttcatttgctatagatgtacatataagatttacatgtgtaaggaatatagagcaataatgaattgagctattcctcataatcacttcacttaagaaatagggggctgggtgtggtggcttgtgcttgtaatcccagagttttgggaggctgaggtggtaggattgcttgtgtccaggagtttgagtccagcctaaccaacatatcaagacattaagtctatgaaaaaattaaaaaattatctgggcatagtggcatgcacctatagtcctagctactcaggaggctgaggcagttgaatggcttgagcccagaaattcaaggttagactgagagctatgatagtgccactaaacttcagcctgggaaacagagtgagggcccttctcttaaagaaaaattgactagaatatgactaatactctagaagccctcctccacatgccacccttcccaaatgcaccactattctctcttcccaattttcatttttgtatttattattcctattcataccaacacaattttaccagatgtgtatgtattttcagcaaatatttttagtttattatgcacttaattgacactatggaagaacagcttttaagatattattccaacttagggaattttaaggaaataagacctttgtatataaaaagttaaataggaataccgatttgcttttgattagtgttaaatcacataagtttaaatttgtaggagatcatagagatcagaaagcccagtggttcacaaactttcttttttttatcaacaaaacctcttttaaaaatatatagcataaggaagacggaaccataaaactgaaattacagcagctcaactgaattgtgagtttcaactgaactcaatttcaaacccacaaataagtcaaactcttactttactgagaatatatttggaccacacagagtttaaaaaacatgtttaaatttatttagcttatttataccagaaccaatataagaatccataacattctgcattagaattaagtacaaacactttttctttctttctttttctttttctttcttttttttttttttttgagacggagtcttgctctgttgtccaggctggagtgcagtgacgcgatctcggctcactgcaacctctgcctcccaggttcaagtgattcttctgcctcagcctcctgagtagctgggactacaggcacgtgccaccacgaccagctaatttttgtatttttagtagcgacggggtttcaccatgttggtcaggatggtctcgatctcttgatctcgtgatccgcccgcctcagcctcccaaagtgctgtgattgcaggcgtgagccaccgcacccggccgtagaattaagtacaaacactttctatgatattatactaaattaaaaacaggaactcaaaatgatacaaactgaactgaaataaaataaaataatacagtgaatggagtccacaattaaaatacctgcaaggacctgaaagggaatggaaataggtgaagcaaagatctaaatgcatacggacattgtgtaaattggaaagaatactggcaaatggcacgcctgtgcccagtctaaaatgggcaactgctaatcaattcagtctagcagtgtccatgtcagaatgtagagctatttttggccatatattttatttttcaagaggaacttaagaatctggagttgtatgtaaaacatcccagtgcactatatatttgcctcataagttgagcacttttttttatgtgtgcatgttgtctactggtgaatcccaagcacttggaacagtgcctgatatatagtaggcagtgatgtatatttggtgggtaactggaaaaaggttttccaattaaaaattctgtgcaagcctgaggtaggagttgggcaggacttatttcccattcccagaggataaagtgaagaaactggcaggtaccagcaggcagcgaccaacggaagtgagaaaaacagcagaaaccagcagatggcaacaaaagtgatccccagcagccctcattgcatattagcagaagccactcccaccagcaccatgacagtttacaaaggacatggcaataacccagaagttaccacccctttcctagaaagttctaaataacctgtctctcaatttgcattaatctgccacttaatttacatgtaattgaaagtgggtataaatggatataaatacagtagccagcagcccataccctgccaactttggaggcactgcctatgagttgtccctatttcacaaagcgcagtaatgttcactaaaacatagctgtttaacgccactggctcgcccttgaattctttcctaggcaaagccaagaatcctcccaggccaagccctgattttggggcttaacctgtcctgtatcaaactagccaaatgtatctcaggcctgaattagatcaatggctaccagttcaaatcttttgttttagatattagagaggcaggaagtgactctctactgtgtagcatgatactcagagcccaggaacttcttcagaatcccagtttgacttccaaaacgccagtgtcttgcttttatttactcttgtgggtggcagtaagggaagggagcatatctccttagcaaaacatctcatcagaacacggtccatagcacaaattattaattaaagacttacgtggaggctcaaatatagagccaaagcataaccatttaacaattatccttcaaagcaattttattcttggcttttggtggaaaaaactcttaaaaataaaatgataattctacatatgggatttgtgatgctatttagcaaggatatgctttattgcctgacatcccctttattttggcagaatactatgagattctcattacgtttccatttgctgcggaaagtggagaaaagttcagagggggaagactaattaaaaaaatggttgtctactaatccattgaactaaggcttcttaacagtcatgctcttcttaatagtatgaacacacattttgtattgattgcagagaataaagaaaaagaaatgacttgttttgaacttcaaaatggaaaaaatgaatacaaaatccagataagcctttgggcataccaactttttcgacttgtattatataacaacagttggcaaatgatttcaagttgctaaagcatagaaaatgatatttatttgatgaaagctaataaatcagacagaacaattaatggataatttggattgaacaagtatgaaagattccaccaataagaaccctcctacctaaaactatgaggtttttaaatgaaagactctcctaatgtcatagattttctctacctgtgctttatctgaaaataaaaatcacagcttttcccttcacctcttcattctctactcctccttatatttcccctttccttcttccttccttctccttcctttactctttgttctttttattcctgtttgttctgattacctgtgatgttttctaaaaacattaaaattttggtcaccattaatattttttacaatgaattaagaaatttatctcagaaactggatttgaaccaaagccttgttttgaacttctaataagtagactgaggaacaagcacgattttaagggcatatttaataggcaaaataaaaaaaacgcataaaatgcccagtcgttgatgaaaaaaatatatttttgtaattgctgttattcaggtgcttgaaggcccatgttaaagtatcactggagaagataaaaagcatacttcctcaatgtgaaaaccctcaaaagaaagggctataaacactttgtcctgaatatttgttgtttcaattgctgacgtttaacttttcatctgacagcaattcaagttctgcgtaccacagtgttgttgaatctttgaatctgaaaaatattttccttgcagctgtgataataatgtatctcctgataatgcatttaatgtggcaaagacacttttcttaaacacagtgaaaactaagtgttcattttgtcattgtaaaatgagacatgtttagttgctccaaattttaacttgggtaaccttgagacatagttgcacatttaacatcctatattttgcttgtcttgcagtcaagtgaattatcttagttactggagtgttacgtgacaccaattgttttgttaccactgctttaaaaatagctctatccctagaccccatcagtagtgtgtcttttagggccccgatttttttctaatctataggttagccctcaaggcaacgtggcctctttctgtttacttctcattattcctgtaattccaattctacatgtgactctttgctttattttaaaacagttgtgcattgctgatgagccttgaagtcaccaggggtggctggtgtcaatagtgagtctgtacatggctatttttatccataaagcagtttactttctgtatgatgaaaggcgttaaagtaaaacctgcctcctattataccctaggggtgtaatcaagagggatttgatcatagcataccaattaagcaggctacagcagactgctctgggttgtactaaggagtagggtgttctccacagatttttgaaccctttattgcaaaagcatcagggcacagcacatctaattcttttcatcgcacagctgtgtacataaacctctgtatacagtttctgctcagaggctgtgctcttagatttaatttttcttataagtcattacagccgtgatcattcatttaaacctcggcaagataagcattactagttcccagtaaactagatgatctcttcctctagactgtattttctcttatgaacaattataagattacaagactagcaatgttgcttatttacactacactacacacacacacacacacacacacacacacacgttcattccaagccagcagccagctcagcatccttgaaagctctcaacctcagccgaatatataaatatcagaattctctctaccaccctcaattagaaaatgttccagttctgcttttaaacttccactccaattcttcttgctaaggcctggaagcctcaaggtttcttgtattgccttatatacacctggattattcctctctgttgaaaactatgtcccattggaatgggagtgtctgaccagctggtgcccaagaatgctctcagaaaacgatcttccacaagccagagccaaaacccaaacccttgacccttatcaaccttgacgcccaaaactccaggtgtggattagcacagtaacccgcaaacccactcctacacgaaggaagatttttctagaacaactacagctctccttttatatttttgggtaattcagttatgatgaactgaaccagaagtataaagtatttgctcagttcagttcttaatctttgtcatggtattacaatactaaaccacttgctttgtcactttcatatagctcataaaagaaaatattactgtataaaatagattctgtagtccttcacttgttgttatggactgactattcgtgtttgccccaaattcatatgctgaagccctaacccccaatgggacgatatttggagatggaacctttgggaattaattagggtaagataagcacatgcaggtggggctctgatccggtggcccgtgtaaagaaaacaccagagagcttgctcttgctttgccatgtgaggacacaggagaaggttgttgtttacatatcaggaggagagccctctccagaacttgaacacgctggaacactgacctcggacttaaagcctccagaactgtgagaaaataaatttctgttgtttaagctgcccagtctatggtatcttgttacagcaggctgaaatgagtaagacacttgtattgtccctgcggttgacatctgactctgtaaaaacacccatgcatacacacacgtacacacaaaacaacaacataaccagtaagataggtaatcaagtatatggtaaatgcacctgattgcaataatgtgcgcatacccttagaatgaccctgtactgcagacacacctgaatgtgttttccgagctacggaatctgggagtagcccagcaagagagcccttccttgtctatgaggaacatctgagccccaagtgcatcccgtggaacacgggccatacatacagcggattgaggccccgagttttgggttggatgaaggttgccaggtgaacgtcattaagggcagagggttaagtaaaaatgctatataaactgcatgctgcccgcaagcagcgttggtttgcccgctcatcccaccgccgccatcactaccactgtgctgcgaggctatcttgtccagtctgccaccactggatcgtttctacaggtaaggcacttctcctgtccagcccaccactactgaattccctcccctgtatgtaaacctctaataaaacccaatgcctcgtttgctggctatgggtttcttcctcagtctcttgaacctgatgccttcgctattgagggttataggggttcagtacaacatcatgatgtgaacaaacgcgtttatttgggcagatgtattggtcagctctcaaaacaataatatcaagtaataatcattacctccaacttaatggttttaaatagcattaattctcatggtcatgcggggtttggctgacctaagttgatctagatttggttctgcatcaggctggtagttgctaggcttggctttcagcggcaggtttggtttggatttctttgatgtgtcacgtccagaggcacacactggaatggcaccggccacccagtgcatgttttcataggttgtcactagatagcaagcccaaacatgccagcccatctcaaggctctgctcctgtcatgttttcttaacaccccgttgaccaaaggctatcacatttcccaccataggctagatatgccatcctattaagtaggaatgagaaagtggggaccaataaatcaacctacagtaggaaaagtaggggattatttagtagcacaaacagatgagtttcagtgggcttgctgcttttttgtggatatggaagaaatacctaaaaaaaaaaatttccagctccactacaatatttaagaaaaaacttaggtgtgttcatagtttactactttgcttaataaccccactgtttatcacagcaaatttaatcacctctgaggggttttaatggctttgataagacaaagagtaaattactgaggaggaagacggtcactttcacatcctgagagatgctaactgtgcaaggtaattcacatatatcttgtaaacatgtttgcaaacatatataggagataggtggtattctcattttttaaggaaagaaatggaagacatgagagaatgagtaatatgtttaagaggacacagctggaaactggtataatctggctctaaatacgggcttttgtgttacattgaacagagataaattcagcttatgttaaggaagcatggggtaaaaaggtcaagaaactgaacaactgaataaccaaataagtaggcgaaaccatttggttactcagttgtctgaccaaccgaataatcaaaacaaaaatgtcacattagaaaactacgatcagtgtaattttatgaataattgaactattgagaccatagtgtagcagctgatctatcacgtcatgggattccatcattcattctcatgaattaactactctcagtccttgcttttagcattacctctactccctaatgatacatgatttttactctaacataaacttcccaggagaaaatgtctgataaatatcataaaatcatgaaaatatctgataaagtcatcatcctgcatcatgtgtgggagacttaagtttgtaactcttcccattcctttaagttggttttcagccttgcttacacgatcattgtggccagagagacagaatgtgccaagcgtgtaggcctgagctgggaaacaatgtcaataagtaatacagtataggggatgagaagtttgccaaataatacttggtgtgtaatgttatgaaagaaagggggcattagaggccgggtggctcacgcctgtaatcccagcacttcgggaggctgaggcgggtggatcacgaggtctaagagatcaagaccatcctggccaacatggtgaaaccccgtctctactacaaatacaaaaaaaaattagccgggtgtggtggcaggtgcctgtaatcccagctatttgggaggccgaggcatgacaatcgcttgaacccaggaggcagaggttgcagtgagccgagatcgcaccgttgcgctccagcctgggcaaaaagagtagaactctgtctcaaagaaacaaaaaacaaaaaacgaaaacaaacaaaacaacatggcgtggggggcatcagaaacacacaatggtacagatttaaaagctcctcgggtgatgctaatgtgtagccagggctgaaaacctaaaagaagaatgtgcagtaatgttgccagtactggaaggaagtgtctgagttttgtctagtgactgacagaaggctatgaaactgtaacagttgtaaggggttgagggaaagccgaggccagatcatgtggatcatgtgcaaattgtaggtaaaatgtaaagctgtgagttctgtggcctcactgaggaagcatttctctgcttttcaggaagtaacttggagttgagtgctctatgatttccaagttgtcagctaacacattgaataactgatgaattatggttctgtggccttcatttctgtgtcacgtggctatactgttcattggcatatgcaggcagtaacccccaaactatgacgcgagaggatggcaggattccaggtctgaagagaaaaaatgattaggctggggaagaatgatttgaggaacctcaaatcagactatggcagcaactactaggtgtagggcttcatgccatccagccttggagttgtcagttttctattaatctttgctaacaataaaatactaatgggtacataatgtagtgatttacagatgatagactctccttatgttttcattttgtctcaacagagtccagcatatttcatccaaattttactgatcagagaattgaggtacagacagaccatgaaggtcatgacagttggaaagtgttggagtagaataaggaagcctgatttttctcatttgtcctacatcgctttattagattgtcttctccagccttacctccccgccttataattcttgattttcatgaaacctattaaagggaaagaaaaggaaaactagaaaatttaatttagatcacttttaaaaatcactttgcatcttggactgttgtcataagttataggattaaatcctaatgattctaatgttgttaggccatcttaatttatatgatccacttacctctcagtcttctctcactggctcactcacctgccctctgtatatgaggggattgagaaaagtctgtttttcattatgtgtagatacacagactggtgtgtatgtagcaggaataaatgttcgcaaaactcagatgtggaagaagtaactctgaatttttgccctatttttgaactgtactccaggccagtgctgtccaaaagaaatataagctatatatgtaatttaaactttttgagtagccactttaaaaagtgaaaataaacaggtgacattaatgttttatttagctaaaatatttcaacatgtaatcaaaaaagacttaatgagacattttacgttagtgaaaagaatgtactaaatcattaaggttggaggatattttacatttacagcacatctgaattcagttgccatattttcatgggttaaagtaaacttgttctcccaaaccaatgaagttatggttaatggaagaatattaaaaactgtttgttttcaatataaataaaattgaagcaaaaataaagcaaaatgaaaatttggcttcctcagttatgctagtcccatttcaaatgttcagtagccacatataactagtggctatcttactggacaacataaccccagatcatgataaaacgttctgatttcccgaatttcttttttttagacaatctgggatgtttcgccttcttaccaaagaaacaaaaaggtgctggtactttttgtttgcttgtttttcagcagttgccattgaaatgtgtttcttttggagttggataggaaaaacctagattcttcctccaaggtgtagtctcaactgtgccccaggcatcactgtttatgatggattaagggtgtggcttttcccagataatgagtccccctcccccaccccccacaggccttaatatctacagctcctgtcaatagactggcctttccttccccgcgaaaagtttgagtcctttaagaatctaggtctaaggttaatttcaacgaaaggtttattttctctttctgcgaggacctatggaactacccagaacatataaagcagtccacaaggctcttcaacagcttcgtaaccgggcactgctagttcagaaactcactgacttctgaatgtccatttcacatttgcaggctgcttctctgagtcctgagctcttgtctcaagatgacttggctcttaattgttgtctgatttattaccggtttgctttgcagtttaggtgctggacaatgattcttagaaatccccacataaggatctacatgcagtggcagtgaatctcaataactgccttttcttgaatctgaacttaatttatatataaagcctactttccggtagatcctgcatatttcatctcagccaatttaggactgagatgccccccctttctctggggttttgtcttaaatttctggaggggacctgattgtcacgcccctccgagtgaagagaccaccaaacaggctttgtgtgagcaacaaggctgtttatttcacctgggtgcaggtgggctgagtctgaaaaaggagtcagccaagggtggtgggattatcattagttcttacaggttttgggataggcggtggagttaggagcgatgttttgcgagcagggggtggatctcacaaagtacattctcaagggtggggagaatgacaaagaaccttcttaagggtgggggagattacaaagtacattgatcagttagggtggggcagaaacaaatcacaatggtggaatgtcatcagttaaggctattttcactcttttgtggatcttcagttgcttcaggccatctggatgtataagggcaggtcacaggggatatgatggcttagctcagagtcctgacactgatacagtgccaggatttgaaggcgggtgtggcttacctgatttcatgtacaattcatcccatagggaccttgttccttggcctcaagttgtaggccctttcatatctctgtacggtcaagaaacatggtggttcccttgtcattcttcatcctccaaaaacccattgagcactgtgtttgctggaggcatgtgggaaattattctactgtaccctatatcctgctgaagtgcctgggtactgggtggctagctcatgtccatttgctaagacacatgctcacgattcttgcctgggtctgacataactttggagtcttgttgcattcctgggctggactctggaatgggacccaattacttctgcacctggatacccccaaccttctctgttgtggtggcggttctttcaccatcccctcctctcaggaacacactcttgtttctactttacattctccatccagtccaggaaaatagtatctaggctcagagacggagaaaatagtgtctatatttcacatttttttccaaaaaaaaaaattataattttccgtgcctggacttgagaatttgaaaactccaaaatcctccaggttcaaccacattgttcccaattacaggattttcttattaaagttgaatagtgttccattgtgtgtatattccacatttttgaatccgttcatctgttgatggttacttaggttgattccatatcttgtctaatgtgaatactgccacaataaacacgggtgtgcagatatctacttgatatactgatgtcatttccttaggtatgtacccagtagtgagattgctggattgtatggtagttctatttttatttttttttgaagaacttcctgctgttttccataatggctgtacctatttatgttcccattaagggtccaaggtttccctcttttccatattctcaccaacactagttatcctttgtctttttgagaatagccattctgacaggtgtggggtgatagcatattgttttaatttgcagttacctgactaatgataagcattttgtcatatacctgttgtccatttgtttcccttaagacatgctcgttgagacatggacacggggaggggaacatgacagaccggagcctgtgggggtgggggcgtagggagcaaggggagggagagcattaggacaaatacctaatgcacacaggacttaaaacctagatgacgggttgatagatgcagcaaaccaccatggcacatgtatacctatgtaagaagcctgcacgttctgcacatgtatcccagaacttaaaaaaaataaaaaataaaaattcagttccttaatcacagttgccactgtgattttactttgtcatattttaaaagcttttttatttcaaaaaaaaagtctgttgaggtcctttgcccatatttaattgggttgttgtattgctattgagtttaaggtttcttatatatttttggatattaatcagagtgaagggacaactcatggagcaggagaaaatatttgtataccatatacctgaaaagggattatttccttggctgtgcagaagctgtttaggttgatgcaacttcatttgtctatttttatttttgttgcctatgctcttgggttcatatccaaaaaatccttgcccagaccaatgtcataagcttttagttgatgtttttttttttttttttttttttttttttttgagacagtcttgctttgtcacccaggctggaatgcaatggtgcggtctaggctcacagcaacctccaccttccgggctccagtgattctcctgcctcagcctcctgagtagctgggactacaggcgctcaccacaacgaccggctaatttttgtatttttagtagagacggggtttcgccatgtttgccaggctggtctcaaacccctgacctcatgatctgcccgcctcaacctcccaaagtactgggattacaggcatgagccacctctcatagtccatgttttcttctagtagttttagtttcaggttttacctgtaagtctttaatccattttgagtcgattcttgtatataacagataagggtccaattttctttttatttatttattttttttgagatggattcttgctctgtcatccaggctggagtgcagtgatgggatctcggctcactgcaagctccgcctcccgggttcacaccattctcctgcctcagcctcccaagtagctgggactacaggctcctgtcagcacgcccggctaattttttgtatttttagtagagacggggtttcaccgtgttagccaggatggtctcgatctcctgacctcgtgatctgcccgcctcagcctcccaaagtgctgggattacaggtgtgagccaccatgcccagctgtaagggtccaattattaatattcccaattgaatggaagaagtaaaaggaaacaaaattaaccatattctcacttaaagtcattgttatcattttggcatatttcattgggttcctttttacccgaaatgagggttttctgctatttatttagatgtgatcgtgctatatttatgacttttcacccttttttactatcacataagtgattttaggttattatagacacactttaaatgttcacataatgaccacttattctaaagttaggcatttagttttttatttttgttgttctaaataacccagtagaccattttgtttccttttagacagcttccagcgcatgaaattattaggtcaaaggatattacctttttttttgagacggagtcttgctctgtcgcccaggctggagtgcagtggcgcgatctcggctcactgcaagcttcgcctcctgggttcacgccattctcctgcctcagcctcccgagtagctgggaccacaggcgcctgccaccacgcctggctaactttttgtatttttagtagagacggggtttcaccgtgttcgccaggatggtctcgatctcctgaccttgtaatcttcccacctcggcctcccaaagtgctgggattacaggcttgagccaccgtgcccagccaggatattaacattttttaaagggtctttatatgtatcgcaaaaatacttagcaaaattattattattattattttttaccagtttacactgcccaccaagaagctataaggacacctaaattgtcacataaaactgtgtatggataaatatctctattttataaaccacttggtataaccaaaatcctgcttttgagatattaaattttgaagctaacattcttagcatgtttttaaaataatactgacttcatgagctaatacccataatgataaaatgattttatattccaggaaagctgccatgtgggattgaatgttttatatatgatacacttttatctacatatgttgttatacagtcattggtacctttttattagatgaatttatttcatattcagtttccactgaattgtattcagcttgactacaaattagtcaagcagaataagaatgtgagttttattgtgactaatatatatttggagtctagatttggagagacaaggggtgagtaaaactgtgtgcctactacctgaaaggaaaggttttttttttttttttttttttccccctcaagggaaacaattacggagactgcccaggcatttaatattttattgaaatattctaaaccctcaaatttcgcttctacattttatgtgatgcatcagaaaaacactattttatttgttttataattctccaatagggaaatttcaacacattgtaagtttctttatttaacaacatcatctagcttttaataactgactttcatacacatttttaaaagcaggctaatcgttatagcttaatatatttttcatgagatttagtgataacatgatcacttataccagtagtttatctcctgaatcattttaaaaagtaatgtgcatgttttctttatatttatatacaattgggaagcttaatatttatgaaaatatgattgacttttttttgtcatttctcttcaaagccttaggctttgcagttatcagtagtgcagttccaagatgcaaagtcataaacttacctttcattctctttagtaggcttaatattttgaatctagccataggaagcagcctgaaacctctaatcgaaatcaaagataacaccacaggggtacaatatctctaatttgtcttggaatgatgcggtagcttcccttgactgctgtgattaaattcattctggtttgttcagttaatgagattagcacatcttaacccataggaaatattgtctttatgggcctatgactctgaacagattagcatcatgatcagaaaaataatttttaataaatgattacgtgtgagtggtgctaggctaggatccctacaaatctggcaagagcatattccttgaccttcagcattatatgactttataagacacagcattttctcaggcatgggtataaatacagttaaatatgtactataaaactaaagaacagcctgaaatttaagaactacaagaatttgtgcttgtcattaagctggagataaagttaacatcctgagaagatgtaaaggcgacagtgatacacttctccttgtttggtaggatcatttccacacttgtctgtacttggaattgtaaggtgatgagtcccttaatgatttcttattgcaagtttgaacctagtgtatttcatggtaatagactaaggggaatgagtatatgaaatgagttccagtgtattgatgaaacttagagttgcgtagagtggagcatagcttagtagaaacttgagcaagttactgtagcacatggtcctggttccaattccagcaacatctgttagttttaggacttggtgcaacttgttcaaattttctgtcagactctccattggtttaaaaaataaaattcaaaatattgacaaatattgccttcctgaattttttggtgaatattaagttagatgatgtatataaagtgcctggcccatagtaagggctcaataaaagtagctgttggtaccgcttttaactaattgttgttaaattgattggttaattatatatttccctgccacttaactgtcactcaacagcttttcctcatttcctgcctacctgattggaaatcattatgttgaatatgtctagaattatcactgggcctgctgtattccctgggtggtatgtttgtataggttgaaccactaaagaaaatcttttcggatgagttactttcctatgtcaccctactatttcctagtgggaactttaagttccttcagtctggggtcaagactagtcttagtataggggacattgggaatattgaggatggcatgtttaagtaacattgtatgtattggtcaagaaaaaacaggcaagggatagagtacatcaaaaccagaaaacctatgtacttacctttccatttctgtctttattagatatgttgagtttatttcaagtgcctctatagaacatctacagaacattaatattaagaatatcatgaaaagggatacatttttaagagcctaaattttggataaaatggaagtcattttcttttttttttttttttttttttttttttgaaacagagtcttgctctgtcacccaggctggagtgcagtggcatgatctcggctcactgcaacctctgcctcccgggttcacgccattctcctgcctcagcctcccaagtagctgggactacaggtgcccgccaccatgcccggctaattttttgtatttttagtagagacggggtttcaccgtgttagccagggtggtctcgaactcctgacctcgtgatccacctggctcggcctcccaaagtgcggggattacaggcgtgagccaccgcgcctggccatggaagccattttctaacaacaaatttaatttgtgaaaagctggtagcatgttaactctagaatgacaattttttaaaaggaaaattccaaagttaaagggaaaaaatattggggtagtgccagctagtatcaggatttatactttaaaaatgcataagaaagaagcaattaccagtgtccaaataagaaatgagagtaatagaaaactcagatttcattgtattataaatttaataaataagttacacaattgccgttcagtgcctgaaattgatttttctttttttgaggtcaaacttcaaccatgtatatgaaatgtaagagcaactttctaagcagaattaccctttctgatttccttgggttccttttggttctttaatctgtatgactaagagtgtggattggctgacattatgagatgcaattaatttacatgcttaagttaggactataccatcctgtttccatccattcttgatcacaagcatattacaaatgctgtgctggattatctttactattaagacatactgcagaaagccctgcaggtaaagaaaacaatctagggcttaccttagaggcaggaagaattgcatgttaagaaagctgcatacactctggctttttgctctttgagtttagctcaatgtcttcctaaactttggtgtgcaggaggtgactacgcagtatttaaaatctaatccatattatgtgtatagtatggatggtatagcaattttccaggtggatttttgacaatattttattttttactattcatgttgactttgaaaaataactacagggctagatttgattcaactgtccatggttagaatttttaaaaaagtttttgactctaatacaactgagttccatctacagaaagaatgcacatatggatacggctgtccagaagatcaaatatccttgtactgaagtatatctatatttagtcattattttataaaagtagtagaaaacaatagtggaatataatatgtggtctttggaagaatgagaaatcatccttacccattaaacacagacccaacacttaatgtatttccattttgatagtgacaagttttgggtttgggatgatgtgtcagccagggtcagttaacagacagaaaccacttgagtgactgtagcagaaaataatgtaacaagaggaattgggatctaggtattgaaaaattgacaaagagaagaggtagcaagtgcacaaagtagctaccgctcctagggctgggaagacaaaaggttagaattactaacacttagaacccttgaggaaggactctacaaagctgagctcaggtctgagtagggggctgctacgtggctggtgctaccctctctgggatagcaggaagggcccaatgggactgaggcccggacctctgccagccaggtggtgctggtatttctgcagcaggggcgatgaagctgattctctaagcttttgaaaaacaaaacacaagctaaattgaatagcttgttactaaaaagtgctgctgcaggcatgaagaagcacgtctagggaactgctaataaggacagtaagtgcatgggaagctagtgtgaatgagtaaatcctttgtccctcctccaggcttgcagtctccctctattgctccctacctttagattctgagagtcagtcagtaaagccagaagtacggtttgcagagtctttgcctcagcgttgcaaagtagggtttagaagggtgtgttggtatggctctgaggaagataaaatctctaaccagcatgagtgctaatatgtctaataagatatatggaaaataattattaagtatttgactgaatttcaaggattaaaaagcaatacttaaggcaacaaaaacatcttatatttccattaaagcataatttttcttacagctccttcacattggcaaaattagtttgccctcttgaatttttcaaagatgtgaattatggcaagtaataattgctgcctactattgaatatctggatgttgtagaactgccattgtatcatatttaacttatttttgagagtgttagatttcctctgatagaagatattttttacttttccaagattaatagtagaaatattgaacatcaaatcattttacagataatactgtcctaacattgcgtaagtatacaattattcatagactcagaaatcataattgtcttcacagaaagaaaccagttcagaatactttaagaactatttggaatgttagatttaaaatattctgtagccaaggtaaagcaagttagctaaaattccttttgtttctattgtttttagaactagcttcaaagagaaagaatttgataaatacttagtgtccaataggctctttcatacagttcaaagatgtagactgacactggcatctacagttcctagctgtacttactctggtattttttgccagctgccttcgtggtttctgcttcatacctgtttgtattcataaataactcaatctaagatttttagctttttaaaaagaattgcatacaatcatcatcagattacaggtttgaaagaaatcttagtttttttctttttcttttttttgagatggagttttgctgtcgttgcccaggctggagtgcgatggcgcaatatcggctcaccgcaacctccgccttctgggttcaagcgattctcctgcctcagcctcctgagtagctgggattacaggcatgcgtcaccacacctggctaattttgtatttgtagtagagatgaggtttctccatgttggtcaggctggtctcgaactcccgacctcaggtggtcttcccacctcggccgtctaaagtgctgggattacaggcgtgagccactgcgcctagcccagaaatcttagtctttttaactcagttttgagattctgccatatacctggcactgtagttaagagatggcatataaatgggaaaaataggtatttcaaaagcaatcaaaagcaattacaagactatatagtatgtcctaccacgggggtatgcatgggagcagaaggaagaagagacgaattttgcttggctagggttgtattggggttgaaattgatatcaactatagactagaaacttaaagggattttcatgccaacaagagtacaacaggccattcaagtccatctcttccaaacattgattaaacatcttttataggcagacaatcagttagttgctaagaagactaagctgaaaaaggcttttttttttttggccctgttggagctttcagcctattggctgattaaaaaaaaaaaaaaatgctgaggagtatgaagtcacaaaccaattgagttcaggaaccagtaagtagtttgacatgaccgtaatggaggttttgggatatgggcaattggcaaaaaattgaaaaggatgcgggaaaggtggactggggatacaatgtggatggatgattccttgctcaattgagatgaatgtgttcaaaaaaaccaggaagtttttttttatgttttgcatattagaaagttacatttggtggctatatgcagaatcgtgtatggggagagtacaggtgtggaggtcactcatgaggctaatgtctattcaaatgggagaagaggaaggtctgaaaggcaatcactattggaatacatgcaagtacatctagcattgttctgtctttctgaagatgtggaaatgaagctctctcagaattaaatgacaacatgccatggctgtttgttagagggaatggaagtagagattgaaggtcttgatttccagctgatcatcctttttatggtaccataccactcacccagcctgttgaactggaaaagattatgaacatcaggcattaacctaccaaagtaaagcaaaacaaaaacgctgaacttctccatatttttaaaaatatgtgacacatatatgtttattggaaattaaaatacagtaaaggctctttaactgtcattcaataaatattttttgaatgaacgacgatcacttgtcaataactggtattaaaaaagacaaatattaatggtgatctttattcaataatttcataaaatgggaacaaagtggtaatttgccagtaggatgaggagggcatagcagaggttgtctaaccttttggcaagggcaaagtcaaactggtgaataagcaacacaagctgtgatgagagtcatgtgccatatgtaaatggtgactctttcttcctccaatgctgtttatcaccacaggcttcccagcggcccaagaacagtctgccgcagtcactggcattaataaatgccatctctacctgaatgcccttcttttcaaatttttaccaaaaggaagatagtagactttcagttttccttctggctgtgagaggcatagggagaataacggtaacagatgcaggaataaaaaggcttgatacacatggatattatgtcatgagggattcaggagtttatattaatatacaaatattagttgttttttttttgtttgttttttgttttttgttttttttttgagacgtagtcttggtctgtcgcctaggctagagtgcagtggtgctgtctcaactcaatgcaacctccgcctcccgggttcaagcaactctcctgcctcagcctccccagtagctgggattacaggtacctgccactgtgcccggctaatttttgtgtttttaatagagatggggtttctccatctcggtcaggctggtctcgaactcctgacctcgtgatccacctgcctcagcctcccaaagtgttgggcttacaggcatgagccattgcacctggccccaatattacgatttatcctgccctacctcaccactcttttcatgattagagatggaaaaatttgatattatttaaaaatcagtaagattctatctaatcaaaccattggcagtataattcacaacttttttagagattttctaaagtaatacagatactgtagtattgtagttttgtagtatagctacaagaaaatcatactgtgctctgaaatgctatcttagtaacatattgtgttaatggattataatggtaatcaaaacctccatagagctacaggtttgaactctaacattctgtcgaagttaaagattaatcagtttaacaccatattatttttattatttttgagacgtagtctcactctgtcgcccaggctggggtgcagtggagcaatctcggctcactgcaagctccgcctcccaggttcatgccattctcctgccttagcctcccgagtagctgggactacaggcgcccgccactacacccggctaatttttgtctttttattagagagagatggggtttcaccgtgttagccaggatggtcttgatctcctgacctcgtgatccgccctcctcggcctcccaaagtgctgggattacaggcgtgagccaccgcgcccggcccattcctagtattttcaaatagaaatctgatgcctttattactgtaattagaggaatgcttatgtttcaggttgggttttggtaaagcccatgtggagaggagaatttgcatgaaagtagtttaattaaggaaatgttctcagggatggcaagtaggtgagcaagagaagtagaataggaatggggaagaaatcatgcaaggagcaatcgcaggcaaagtgccagcctcagtctggttctgcaggaaaacctgggcctaaactatgcttcagcttgttgcaacttgatacagaaggagctgggcttttgtattccagtagtcaccagtcattgccttaagactaccctaaggtgacataaacaccaaggcacttccggatctctgtttttgttggcaaagcagctttactagcctgaagacagtcatctaaagagatgtagatacagaagttttgagaagcaaagaccacaaaagccaaggaggtgggcacgcagaagtgttaatggaatcttagtggatctggataaaacacgattttttggctataacctctaaagggctaactttcagaagattacgtggacccaattaagcacttacctgaataattttgaaacatctctaattgtactatagctagagttaaaagaaaaaatattttctaatataaacaaaaagttcagaattatagcattattaaagaagcttttttcaaatgttagcattcctgcttcttgactttacatttttccggaacaaaatagttttccaaagagtatacttaatgacttgtgcagatgaattctaaatgataaccacagggctcttggacaagggatcatttaaattttgagttcttgtcagtcagacatatcaatccatatacatttccccaaccagggtgtcagaagtgtagtcaagtgagttttgtaatgatacttctttgtttacatctagctgcagaaacctcttaagactgattctgcatcagaataattgctagagggaaaagggaagctgtgattatgaaataacactgttatccactggcacccctttgtgtctatcttagttgaagctttgaggcacttctgtgtctattatttgattttaattggcaatggtattgattataaatcatttgacagaatataatttttatcttaaagtttaaatgtacctagaggctacaaagattcctgcgttcaatgaaaacattaaagtaatagtgtaagtagtttaaatgtgccccatttggcacagattagtgtcacctatggtacaactcagtcaaaaagtgaatgtagctgaaaactgaaactgttcaacagctccaaatttaagaaacacggaacattcactatgtgcaatagacaatgctagttttagtaggggattaaaaaaaaatatctttcagccaggggctcataaagtagtgaggaaacctacaacaacttcaagtcagataatgacaatatgtcattaagggacatgaacaaatgaccgagagaccgcaagatcaggagggactttttttggagttggttataaaggaatggcaaggcacatgggaatcaagaattcattcaaacagagccttgaagaaaggtgttggtggagtggaaggctagaacacaaaaatacaatctacagaataagaaagcactagggggcaactgtggttggagtacttacaagaacggtttaggaaaataactagttgtactacatagactaaattggataactgtcaagatttgaggattataggtgaagaaaccattttagagtttattataactgacattttgtatctagagacaacagggatatcagtattgatgtaattaaaggatgtggcaagaatgaggtgaaaataacttatgtcttagggctgaaaaattgagaggatggtggtatcattggatatggttagaaatagaaataagcaaaactatgatggggaagtgatttgtatttgggatatattgtctttgatgtattgatgggatatccaataatctccggaaaatatgtctggatctgaggagggaaatcagtgtgtgtttgataggtgtagcagtgagaaagtatcataggcaagataccacaactaaagaaaatggtttgggggtaatcaatatggagtttaagccatgggggcagatgatacggcaaaaggatattatacacagttaaaaaggaacccaaaaccaagtcttggagaattcacatttaaatacgtgcagatatagagaagccagcaaagaagtgttaggagaagtcacaggaaactgtaaagtgtctggtcacagaagcagcaagaaaaacagtttttaaggaggtgactacattgaccaaaggcagtgattgaattgaaatttacttggggtctgagaaaagaccattcggttttctggttgctttgactaattttaaagtaacaatttcagtggagtagtagaccataacctataaatgcattgatgtatttatttattcattcactcactaattcacttatccaatagtcattcatttattcttcggtgcttacaaccgggcctggcactggattaaagtgaaattagaagtagataaactggtagagatagccaaaacatatctccctacagaagggaaaagagcagaaaattatcatggaaacactttgcatagagtttctcacagcaggttgaaagtatcctaaggttatagcagtgtaggctggaggaaaaggagaaaatacagactaggcaggacaggcactggggaaattcaggtgtaactaagaagagactgagtgctgggagacagggtgtaatctgttaaatagaaacataggcaatagtaaatcagggaaccagaaagagttcaagagtcgatgaagagggacatgtatcaaggtctcgatcgagagggctgtgattcaaggcagagcctccattccagagggagcttaggatactcttctggttttctattactatgtaacaaaacaccccaagtacagtggcttaaaataacatctcttttatctttttatctgattttgtgaatcaggaattcagccgtgttcagcttattgatttttctactctgtgtggtgtcagttgacatcacttggcagaattcagctagtggatgtgctggtctggagggttcaagacagattcacttaatgcttaatgccattgtgagaatggctgaaaggctcagttcagcagggactgtcaaccagaggacttgtagatgtcttctacagcatggtggtttcagggtagtcagtttttatgcatggcatcttagggctcccagagtgagtattctaagaaacccataaagaggctaaaagttactaataatgatctaatcttggaagacctataacatcatattcgttgcattctacttggcagacaagttgctaagacaaatccgagctttaaggggagaattagatgctgcctcttgatgaaagaagtgtcaaataattttgtggccatttctagtccatcataactgctgtaaatttcctcctcctaccatggtattgagtgatgcatatctcacaggaggagagtgtgtcagtgactctagctgagaagggcagaagaaagaagatccttgcacaaacaagccaggcgagagagaaaactggcagtttttaggaaagaaaagagatgcatcttggcaggaaacaattgatggtagccagagttcaaggctcatgctgaccgttcattcttctacattttctaagctcaatctttgtatcaatagagaatatcagaaaacttccttggggaatcttactttggctctctgtaaaaatgaacttgtcgcaatgttctaccctcaacaatgggtgaacacagatttaagaaaaagacatgaaaagcttatctgttcttttgtgaaagtgccaaacactttctgttaaggttttcattgttgttaaagtgaaaatttggtatgacagctgctgtgagggatagacttaaggccttgcaactcaaattatggtctgcaatctaggagcaccagttgaggttttgttagaaatgtacattttcaggcgctatcctagacctcacacgagtctgcacttgactaacatcttcagaggtttcatgtgcaaacaaatgttgagaaactctgatctaagggatgtttcattattcagatcattgcaaaggacttgttaggttcctgttcttggtcttgtccctgtggacttcagattgaaaatcttacccttagcttaggctaagataaaattcctttccttttatttgatggcaattatacataacatgtcattacttgatttttattcgactttggagaagcaaagggttttggctaatttttagtaactattcttagcttttacaatgttatcattttatgtttgcattttttcctagccttatttagattctagacacagaataggggactgtgagtgctgagagtatccttagagaataaccactgtaacctacttcattttcatataagaaatgaatgctcagaaatgtgccttgatgtactcatggctacttaatcagtggtaaagctgagcctagaattatttcctcaaaattgtagtcctctgtacacttggatcagaattaacaggcaatgcatgtcataacgggctcatccaggtggttctaatatatactaaagtctgagaaacaggcctgagtgtagcttcaatgtctgctctctcactctaatgcctactgcctgccatatctagatgcctgtgtgtatgtgaacgaggagggaagagaattaaatcctagagatgttggtagccaattatctcaaaagcacatatttaggggtcagcttttaaaaggaggaggggggcttattcccctgacatttgagcaaagcaggaaagggtcggtgatgaaatgccatgtgtcctgaggacctacaggcctgggttatatgaccacttcaggaattgcatagcaatcaaaaagggaactaaaagaatcggaggctgggtaaaatcaggactaacaattgataaagcaattatgatcaacagtgagtgagagaaggagatttacctgatggtgaggtggtagccaccactaagattagtttaaataagattagccaccactaagagttttaaaatgaatgcatgaggcactggagtcttccattgcttctcttgccctccttgatgtcttctgacaggagccatagagatctttataaaacacaaactagatcatatctctcctacccaaagcctgtaaaagcatctctattacatttagtttaacatctctactgtggcttaccccttatccttctttgcccactaacttcatttagcatccacttcccctacttccctttgtgcatcttgtgcctgctatctgtaattcttccctttttataaaatctcctttttaagatcataccttgaattgtatctcttcagaaagggcttcctatagcttagccttaaaattctttttcagttgactttatttctaccttagcatgtaaaatgttgtcatctcttatttgttgttcatcttcttgagacagtaagctccagaaatgcagaaactaaatcattattcaatctaacctcatgtgatatctgtcacattgtagataatacttgaattttaaaaaggggacagaagtttcaagaacagtatactgtggtttaagtgagcaattcactgtgtgtgatccatggggtaggatggttcgaggtaggtgagaaagcatgaactggccatgaacatggacgcaaattgatcaaagtcattgcagcttagcaggtcaaaaagctgtgaggtcagagcatcagttaaaatgttcaatggtagttggtcatgatggcattagcaacctttaaatttaaagggacttaagtcacatccagaaatcggggatgacaagcctatagtcatcctctcttgaagtcttctgctgatacaagtaatcattcagtctgttggtctctatccccatgtcaccaccaacgatgactgggatccagtcaagcccttggatatcatgtcctctctcgtgtccttttcataccaatttaatcatgcctggagtgcccagaagcatactttcagtctcgcctgctttgacacctgactcattcatgccttaacctactgtgctagtgttatgatggggagggagggggtgactgagtggatttgacctcccaaaccatattctagcaagcaaggtacatcttaactctggaattcttctaaacctatatagggtttctgaaacttagtctcagagtgggagtggaatgatacagtactttgtcagaagctcataacaacgactgtgtcttaccataatccattacaatactgttcttgttccagttgaacagctggaagttgaaaaacatttcctttggaatgagtcaaactgtatcttacacaatcttcccagctcttatttacgagatagataatgtcattggtgctcaatatactaaggatttttcaatgcagggctctaatcttatcaatagattccagggaattactgagaaacacattatttgatccttgatgtctctttccttgtatttttatagtagcacgcttgaggaagtacacatatatagcttccaagaatgagggaaggcatcagttaatatgttaaaatagaaacctcccacttgatcttaagtatggggagggcgggggaaggagacaagccttaagcctgtttaccattgcaggtaaacaaacatgaagatcaaattctaagtaaggagagtttgttatggaatagctgagactgagggcataaagacaaccattcaaattattctagggtttcagaagacactgaagaaagaatagggagatgaactgttggtgaagcagagaggaaaaatagaccaagattaagagaaaaaaaacacgggaaaagattgcaggttggaggagggtgggtctatccaaggctgaggtcgaagcttacggcaaggatgcaggggaagaatgttttgttaatggtaaatagattgcaaaaattctgtagtttgcctgttcattctgatgatgggttttgtggttttttttttttttttttttttttttttttgctgtacagaagccttttagttctatctcagttgttaatttttagttttgttgcaattgactgatgtttttgtcaggaaatcaaaatctttgcctgtgcatatatcctgaatggtattgcttagattttcttacagggtttttatagttagtgggttttgtgtttaagtctttaatccatcttgagttaatttttgtataaggtgtaaggaaggtgtccagtttcagttttctgaatatggctagccagtcttcccagcaccatttattaaatagggaatcctttccccattgcttgtttttgtcaggtttgtcaaacatcagttggttgggtattagatgtgtgatcttatttccaagatgttggttctgttccattggtctatgtgtctgtttttctaccagtaccatgatgttttgggtagtatagtctgaagtcaggtagcattaggcttctagctttgttatttttgcttaggattgtcttggctatatgggctcctttttggttctgtatgaattttaaaacagttttctttttttctaattctgtgaataatgtcaatggtagataaatgggaatagcattgaatctataaattatacagtatggccattttcacagtattgattctatccatgagcatggaatgttcttccatttgtttgtgtcctcttagttccttgagcagtggtttgtagctctccttgaagaggtggtgcacttagcctgttagctgtattcctacttactttattctctttgtagccattgtaaatgggagttcatacatgatttggctctctgtctattgttgtaggaatgcttgtgatttttacacattgatttttgtatcctgagactttgctgaatttgcttgccagcttaaggagattttggggtgagacgatggagttttctagatacacagaagagacagtttgacttcctctcttcctatttatccttgatttctttctcttgcctgattgccctggccagaaattccaatacagtgttgaataggaatggtaagagagggcatccttgtcttgtgctggttttcaagggtttgtcataccaaaacctacagccagtttttgcccatctagtatgatattggctgtaggtttgtcataaatagctcttatttagagacatgttccatcaatacctaatctactgaaggtttttaacatgaaaggatgttgaattttatcaagacttttctgcgtctattcattcctttgcattcttttttctctaatcttgtctgctggtgttatttcagcaagataatcttcaagctctgaaattcattcttctgcttggtctatttggttattgatacttgcggtagcattgtgaagttcttgtgttttttcagctcccttgggtcatttatgttactctctagactgataattcttgttaacagctcctgtaatgttttatcatggctcttaacttctttgcattgggttagaccatgctcctttagctcagtaaagttcgttattactcatcttctgaagcctacttctgtcaattcagccgtctcagcctctgtccacttctgtgcccttgctggagaggagttgcaatcacttgcaggagaagaggcactctggctttttgagttttcagtgtttttgttttttgattctcatcttcatgagtttgtctagtttcaatcttggaggctgctgacctttggatggggttttaattgggattttttttgttgatgctgttgttgttgctttctgtttgcttttttaacaggtccctcttctatagggctgctgcagtttgttgggggttcgctccagaccccattcacctgggtcccttctgcacttggaaatgtcacctaaggaggctgcagaacagcaaagatggctgcctgctccttcctctagtatctctgtccctgagggtcactgaccagatgccagcaggaaccttcctgtataaggtgtctagcgactgctgttgggggtgggtctcacccagtcagggtgcacgggatccaggacccacttaaggaagcactctggctgccccttggtcgagggggtttgctgtcctgggggaatcccacttgtctgggcttcccggattctttagagccagcagggtaaagactaagtccgctgatctgcggagaccatggccacccctccccctaggggctcaggtccaggggaatcggagttctttccctaaacccctggctggagttactggaattcctgcaagcaggccctgcccagtgaggagggatgggtcagagtccggcctaatgaggcaatctggccattatttgccatagctggtgtgctgtactgcagggaattcctcctgggttcaaactgtccagtctccctcaaacctgaaggggaaaaatggtggactggagctgcagtgatggctgctgccctccctacaggagctcagtcctctcagtaagccggtagccaccgtgatggctgctgcccctccccacagcagctcagttctcttaggtggcagttctcttagatgccgcccctccccgggagagctcagtcatttgctgtaacaggcagctgcagtgatgatggccgcccccgcccccggaaactgagcagtcttaaggagtcgtctccatccgagtggcctgcgagaatctgcacagctgtgttttgagacccaaggccctgttggcatgggctcgcaagtgggatctcctgatctgcgggttgcacagatctgtggaaaaagaaagatttcccaggcagggtaggacaatcactcactacctcccttggctgggagtgggagcttcccttgtcgcgtttggctcccaggtgggccatggcaccaccctgcttttccttgcgctctcatgccaactgcctagtcagtcccagtgagagaacctggacacctctgttgctggtgcaggattcactcacggttttggttcttctcagtgggagcctctgactgcagctgttcctagttggtcatcttggcctctctccatatttttccatttttgatgtaactttaagtttttgcttaaattcccatattggatattacagtctaaaatcaagagaaggttaatgtggaccgagccattatttaaatttaaggttcaaagaggtaggtcattcagccaggtgagtgagcaccaatcttttaaaaagttggttaactatttgatagtttccacttttcaagctgataatgatattttaaaccaaggtcatttcaatttccttttggttcaatatttttggaaagttgctacctctttgaaataaaaatattttgtacaggattgtttacaattagcaaatgtttgctgataaagatgaatcactgaattaggtaccttttgtagttatgtaataaagctcttggtaaaaacttctatttaagcagttataactaatttttcctattgaaatgtcaggtacctattaagattttctcatagggcaattttaaattttttctttgagctttgtaagaaaaaaattgtcaactctactttcctttggctcttattcaactttattttaaaatgcatttttctagaaacactaactaaaggtgacagttttagttcacagggaactatttttgatttactatttttgttttggaaatgtctgaataaaccactggaaattatagcttataatgaagaaaacaagataaacacactttttatctaaagtgacagtaaaaatctagcaaatgggagaaaaataaagtcaacttttttttttttttaacttctccaattgaacgtcaaatgaacatattgggcaaggaatacaaccttagttgcatttacaatacagtggctacaacagaagagttaaacactaagtcttacgaaaggtagctttagaaatatttgaaagttggccgggtacggtggttcaggcctataatcccagcactttgggaggccgaggtgggcggatcacgaggtcaggagtttgagactggcctggccaatgtggtgaaaccctgtttctactaaaaaaatacaaaaatcagctgggcgtggtggcatgcgcctgtaatcccagctacttggaaggctgaggcaggagaatcgcttgacactgggagacggaggttgcagtgagctgagaccacaccactgcgctgcaggctgggcgaaagagtgaaactctgtccccccccccccacccccccacccccccccaaaaaaaagtgtgtgtatgtatatattaaggttgacactgtatttaaaaaatttctatgaaactgacaaaactattgcttcgttaattcttttttgcaagattgcattggaggaactgcatggaatataatgactgtgttcttttctaatagcacatgagtcagatctctagaaactgacttttgcccatattcaatttcagcagtaaaataatttctagcttgatatttctcataaaaactcctagggctcttttaaaaatattttataaatatctttataatgtggcttaatttttcagacatcttctgtgtagaaacaaatattcatatgtatgtacacatattagctattgctgtgtaataagccaccttgaaactcagtaggttaaaacaaccaacatactatttcaaatacatatgttagccaggaagttcttcaccttactgctaggattactcgtgtgtctctagttagctgggggttggctaaggggctttgctgatctcagctcagctctgcgaaatgtctggctgtctgctagtctgggaaaacttcatctgggacaactagggcaacttgactcggttccacttgtctcatcctcctgctgtctagctctgatgtgctcttacggtaaatgcagaggcatgaacaagagagcaaaagtgttcaagcccttttgaggtctacatttgggagaggaaatgccagcacttcaattgcactctgttggtcaaaatgagtcaaatgccaacccagatttaagaagcagggaaatagataccaacttttcatgagaagaacagcaatgctacattgcaaagggtatggattcaggaaaggatgaaatactaggcccaattttgtagttaacttaccatttacagcagttgctcctggacagtatggcttccttgccaaatatttttgcatgcaaataattggtaaacagtgccaatattggtttttcctaaacaatactatgttaaagtgtcagtcaaaatatgaattaaaaaatgcaaaacatggtaagagcttctcaaaattagttatgtttgaaagggtgaaaagaaaagacaagcagacatttgcctaagcagctttgggtggttaatcaagtcggtacactcggatggggtgtcttgtacctctctagtctcatgttccatccgtccacttacgttccaagaagtggcttatagttccttgaacagtgcgtctatttcatctgatccttagcatgtgaagtttcctctgcttgactttatcttccctttacacttctacctgttgataacctgttcaaccttgtatattctattcagggattttcactctgttgttctctccagtgaagatatcttttatttgtgccagcaccatacttacgacaaaaaaatcactattaataggattataacaccatgctataattatattcgcttaaatgtatatttccttcctaggctattacaaaagctgtgaaaacagtggcagtatgtttttatcttttatcttcccatttttcttaggacagtatgatgcataatactggttacatttagttgaatgactatccccctcgtctgacacataaggaaaataagccaagtgctatgtaatttatcagtgttcacacaactggcaaaatttaaattatagaactgtaataaataaaggcctatttgcttccagatactatattatttaacttacaactacaccgaatctcacatggaagactttcaagtaaggaactggcacttttcagtggatcttaagaaatggctacactaaatgccctagttaaactttttcttctgtttactactacctcatttaatccttatcaacttcaaggattatatttcttatattttgatttatatagccttaagtttttgttgaatgatatttcttctttagttaatataaaaagccacatttttcaaatacattagagtgaattatacattcgaacaatttgcagtgtgctctaaaatagtatttagtaattgagtctgctgagcacactggagtcctgaggagttaatgaaacccccgatgtcaaatgatataacaataggaatttgggactttgaagaattttcctaatgtatatatgtagaattatcactgttactatctttccattacaaatgggacctacaattaggagcaattttattggcaggctatataactgtatctgaccttttggaaatgatagaagaaagaaaagatatattaaactatctttgtagaaaagatgacgtaaaggctcaagtaaaactcacctaacccttgcccctgaatgtgatgatagtcaagcccagcttaaacagcagttgcaaagtaaagaatggtgtagagatctgtagatacactgcctaagtccaaattagtatctagcacttacttgctgtgtgaccttattcaagttacttatattgtgtctgtttcatcagttgtaaaatgggggtgactgtgaacattaaaacaacccacaaaaagtacacagaagtagcgctgacataaaccagtcgatgtgtgtaactcgcatctttctgatacatgaggtagagtcatataaaaattgtaatatttgacaatatttgacttcagaattggaaattgcataaagttggaccactaaaaggaaataaagcatagcagtgacagacgttctcctttaaatattttatcctctgtgacttttgacagaagatcttctttaaatattgtatcctatgtgacatttatcttttctgtgtttccaatttctttgatttggaacttcctgtagacagacccttacaggcatggaagaagaaagaatgaataaaccaaggatgacttcccagtaggtggaggatgggaataattaggaagaagctgtgtcttgtcacctatattgtccatacacaactgcaccgtagggtaattgagaaattataagaatggtaataaatacgttttacattcattaattaaagtcatctttggatgccctttgtccataatgtttcctctactagatctgaagcctaaatatcacttttcttctctgcaatttccctggaactgagtactcatagatgtttgtctagtgagccattccattatgtcatggtatatgtgtgtatttgtgtgtgtgtgtgtgtgtgtgtgtgtgtgtgtgtgtataaacacaatcttttttttttttttttgagacggagtctcactctgccacccaggctggagtgcagtggtgcaatcttggctcactgcaacctctgcctcccagattctctcccaccttagcctcccaagtagctgggacttcaggcgcgtgccaccatgcccagctaacttttgtatttttagtaaaggtggagtttcgccacgttggccaggctggtctcaaactcctggcttcaagtgatctgcccttctcggcctcccaaagtactggggttacaggcatgagccactgcgcctagcctatagatttcttttttgaagaatcagtgttatttgcatgctttgaaacaaagtgcttcatcttgccaaccttgtaccataccgtttctgtcagaaaagcaaccattgggatagattgtaattagccttcatttccatcactggctatctcaaatgcaaatcatgtatctatgtgaatcaaaagaaaaactggatttaggcctggtgcagtggctcatgcctgtaaatctcagcactttgggaggctgaggcaggtggatcacgaggtcaggaggtcgagaccagcctggctaacaaggtgaaaccccgtctctactaaaaatataaaaaaattagccaagcgtagtggctcgcgcctgtaatcccagctactagggacgcggaggcaggagaatcgcttgaacctgggaggcggaggttgcagtgagccaagatcacgccactacactccagccaaggtgacagagtctcaacaacaacaaaaaactgggtttaactttcagaatgttcaattttataggggatatttaaaggtggtgtaattagtataatcatggattgtaatcattccacaaattttaaaataactttgtgaattacattaatacataaaaatataagataaagcatttaccataattttattaatatttcctttagaatacctggtaaaatgaatgagtactgacctaacttaaagataaaacaattgagacctagctttagaagttagttttattacaaaacatgttaaggatagacctgatcagacaatgaatcatgctgactttttgttaagcatacttctgggttcataacatcccacttacatataacaacttgatttccattaacgatggtgtggtttcctatttaaagttcgaatgcacatctgtttgaatcatttctagtgtacttaatagagtaacatacatattgggttctagttaagatgctttataaaatgccaaataacattttatatctggagagattataaaaacttgtattttgtagctttgctcttgaacacttgctagctgcaaggaataacttggctttttcttgatgatcttcatagccagattttcgtgctttttttggtagagagaagtctctacaagtatttgacgctaaggaataatgaataaatacctactgattttatctgctaaggtccacaaaacattccagtattttgatatcactattaaagaagacgacggtgttccagtgatacatatgattccttacaatgacatcaccagagatagaaatatgaggcatgggaagtaacacgtaggccttcatttattttctgatatggacatccctggcattgatctccttggctcaaaggaaatttgcttccatgtctagggtggtgaatgtctttggcttatttctttggccctactctccacttttgtcttccttgggaggctgatgtctgtggactacatcaacaggctcctttgccctctggctactagttggatttggccaatgagagccttggtaagagagggagagaggaaagaaattccatcacccaatatcaaagctcctgtcagataatcttctcttctcagttctctctctatgtagtaactagaaaccactctccttcttttcattcttaggagtctaagagtagtagtgacacttctctattactagttccagtggtttcattataccttccctcatttttataaacagtcccttattaaactcttctcagattaccaaagtcctgctatggccatataaatttcaaaggagagtgtcattctccacctccaggtgataacatttaacaggagggaatgtaatttatttaatgtttttattgagcattttctatgctaggtaccataccagacatcttacatttattaacccttttaattctcatattttgaagttggtcccttctgttactttgaggccaacattacaaggaaagttatagacgatatggattatttggcttagaaagtttggaataaacgtgtgatagctaacacttacagaatatatcttacaaagtgccatactaagttcacttaaatctttgcaatatcaccacaacataggtaatgatacatgctctttctatagatgaaaagagtaaggcacggagaagttacttgcccaagatcacactgcagagctgggagttgaacccaaggcattctgggtgtacagtcaacattcttattcatggcatcataccattcccccgtgttttccaaagcatattttatcagtgtgacttttttctaaattccctctgcataaatctaatgtatttcagtcactagtattctaactcaaaatacaaaaccagcatttttctatctttaggtgactcctttcaagagaaaactaacctatgatgccacaagtcgtcatagtggccattcttgaggggagcttccacatagggggtgtgaggaagctgctagggtgttgatcatattctgtttcttaaatctcgatgctggtaatataaatatgttcggtttgtgacaattcattgagctgtacacttaagacgtgtactttcctctatgtatattattccgcaacagaatactgctttattatacaataccttttccaactcatatttaagaaaacaaaaaaaaaatcaactcggaaagcttcctatttacatgaaaatgggttgccttatttttctgggagctggtcagcagcgttcttcagtaagttttgaatccccagttttgcaattctttgtggtatttgcgatatttttggtgtttccaatgtctagggatttgtaattgcagaagtatcttgactttcttagcgacagttatgtccatggcttgtcctttttgtaatcagaaggtcatgctaaattatccctgtgttctttactttctactgaaacgtattgatccctttggattttcaggttaaaagaccaatacaactctgaagaatcagaaaccacttaaacaccttcacaaatgcatttcctttctcaaatttttttactttgatttgttccactttgatttggttcactttatttatgccacttgtcaacctacctatctgtgtttctttttgaacactgtttgtgcttccgtatttctttatttcatactaaaaaggatttggaaggaatactgtctcgtttttaggtcctttcgtgttgtggtttgggttaacaaagacaatatatatgcagatacattaaactgagtaatatcagatatccactcagttcacttgataagggaaatcttagtcataaaatgaactgaagacagagagctacagggtcgcctggcccaaggaggaattcatgttttgtgtgcttcacaaaatagttctcatacacttgaaaaggaagccattaaaggttgaattttaaagaaaaaatattgttcttaggatataaaatgccacctgcaacaaagacatggtgtatgttgaagatgaaaggggagaacaacaaaagaatacttaaaaatagtcaaaagaacaagaaaagggaggaaaaagcaagtttctaagtgcatcctctgtaccatctgcattcaccagttttagtaattgtatagggaataatgccttcccctattgacttgcactcccacagggatgccaaactaatagaaaacattttacatgtattctgcactttctaatataatatttttatattatcgaaaagactttaacttgtgtgtgtgtgtgtgtgtgtgtgtgtgtgtgtgtgtgtgtgtgtgtgtgagatcttgcttcgtcacaaaggccggagtgcagtggcacgatctcggctcactgcaacctccaccttcctagttctagcgattctcctgcctcagcctctcgagtagttgggatcacaggtgtgtgccaccacgcccagctaattcttgtatttttagtagagacatggtttgaccatgttggccaggctggtctcgaactcctgaccttaagtgagccacctgcctcagcgtcccaaagtgctaggattacaggtgtgagccactgcacctggccgagttaaacgtttttacacctagaatttggtcaaagaaagagatgcagacaaatagtgttaaaatgaaacataaaaatcaatctatatttattgagtgcatacgatttgccaaatctgtataacgttcctatgtgttgcagttgaacctcacgggagtgctctggagtaataatttgagccccattctaatagtgaataaattgtgcctcagaaaggctgtcacttgcccaagataacacagctagtgagtgagtgagagacctgagttcagaagttagctatttctgcttctgaaacttgggttacttttgctatagtatctataattctatagagtaagttgcaggcaggaaaattagaaccatccaagagaaatagtatgttagattttacctggggtattcatactacagggagaataaaactgagcaccgaaaggtctataaagttacaggctaaatgtagcacatttcactaaaaaaaaaaccacatcagaccgtgggaacgggggtgggggagatttttactcaaaagtacttaaaattacttttacataagtccaggtgtgatggctcatgcctgtaatcccagtactttgggaagctgagggaggcggatcacaaggtcaagagatggagacaagcctgaccaacatagtgaaaccccgtctctactaaaaatacaaaactgagctggacgtgatgacacatgcctgtagtcccagctacttgggaggctgaggcaggagaatcacttgaacctgggaggcggaggttgcagtgagccaagattgcgccactgcactccagcctggcaacagagcgagactctgtctcaaaaaataaatgataaataaatagttttacgttgaaacaagcatatattaaaagaagaaggcaaaatctctaggaatttttagcataaagtatatgctttcaaagaaatttaaaacctgcaggcactgtgtaatttatactgccagactccagggtaaattccttcaatttcatttcctggaaggatgctctggtagaatattctgagaagcactctattagagaatatggtgaatatgactaatagaaattggatttcaattgtgatactttaatatatcattgactctgtgagtttcgaaaataatacgatagcaggaactgtttctctatcacctcactgctttctctctctcggtgccccagctaggtgtacatggaatcccctacctgacctataatcctttactccctctccattttggttacctccagttttaaaagaagacttataaaagaccttggtctatgtatttaagtttggcccacaaagcaagattctgtctgcgtttttgacctttgcctagactttgtctccaaacccaaacgtagtccttgtgtcttggatgctatatgatcctgatggctttgggattcatgttttattctgtactccaagacttctctcacctttcccagtctctgctcctctttttgaataaacagcagtttatcacgcacatacttcttggtctgacagacttcaactttctaccctggattttttcttttcataaaaacaagtatctctgtcagttaacagttaactatattttcttcaacaatggacacattgcagtgcataagattattttttgatgagtttaaaagtcatgctttgctcagataagtgtgaaattttgctcctggccaaaggagggaaaaaaacacatcattttaatggcattgtataccttcattcaatttgaaaaacaaattattacactcaaaataccaaattattccaggttagatatgaagttcttggcagcactattagaaagtgtaaatttattttcttattactagagagctttccttaaagtttcattaaaatggcactgttttaagatttatgtgtatattatgtatagtaaagttgctttgttttagattaaatttatggatacatagtatatttagggggtaaatagatatattgatacaggcatgcgaagcataatcatatcagggtaagtgaagtatctgtcacctcaagaatgtatcctttctttgtgccacaaacattccacttcaaatttttttttttttttgagacgcagtcttgctctgtcacccagggtggagtgcagtgatgctatctgggctcattgcaagctccgcctcccgggttcacgccgttctcctgcctcagcctcccaagtagctgggactgcaggtgcccgccaccaagcccacctaattttttgtatttttagtagagacggggtttcactgtgttagccaggatggtctcgatctcctgacctcatgatccgcctgcctcggcctcccaaagtgttgggattacaggcgtgagccaccgtgcctggcccaaattcttaaatgtacagtaaattgttgactgtaatcaccctcttgtgttgccaaatagatcttactcattctaactagatttttgtacccactaaacattcccactcctcctgtccccaactacccatactacactctggtaaacatcattctactctctgtctccatgagttcaattgctttaatttttagttactgcatatgagtgagcccatgcaaagtttgtttttgtgcctggcttatttcacttaatacaatgtattccagttccatccacgttgttgcaaatgacagcgtctcatttttttttatgactgagtagtactccactacgtatatatgtaccacattttctttatccattcatttgttaatggatacttggattgcttccaaatcttggctattgtgaatagggttgcaataaacatgagggtgcagatatttctttgacaaactgatttcctttcttttgggtatatacccggcagtaggattgctggattatatggtagttctgttttcagtttttttgaagaacctcaaacagttcttcacagtggttctactactttacatccccaacaacgatgtaccaaggttcccttttccacacagccgcatcagcattgatgttgcctgtctgttggatataagccattttaactggggtgagatgatacctcattgtagttttgatttacatttctctgatcaatgatagtgacaaccttttcatattcctctttgacatttgtgtcatctcttgagaaatctctattcaaatttttgcccttctttcaatcagatgattatatatatttttttctatggagttgtttgagccccttatagattttggttattccttgtcaggtgggtagttggccagtattctctcctactctgtgtgttgtgtcttcactttgttgattgtattccttgctgtgtagaagctttttaacttgatgtctcatttgtgcatgtttgctttgattgcttgtgcttggtagggtattgctcaagaaatatttgcctagaccagtgtcttggagattttatcccaatgatttcttgtagtagtttcatagtttgaggccttagatttaagtctttgttccacttagattgatacttttgtatatggcgagagataagggtctaatttcattcttttgcatatccatatccagttttctcagcaccatttattgaaaagatggtcttttcttcagtgtatgttcttggcacctttgttaaaaatgagtttactttaggtctgtggagttgtgtctgggctctattctgttccattggtctatgtgtctgtttttatgccattagcatgcatttttggttagtatagctctgtagtataatttgaagtcaggtaatgggattcctagttttgtaaacaaggatcatttgattcttccttttcaatctggatgccctttgtttctttctttgatctagctaggacttgtagtaatatgttaaacaacagtagtgaaagtgggcatccttgttacagatcttagagaaaagtcttgtagtttttccccattcagtatgaaattagctgtgggtttctcatatgtggcttttactgtgttaaggtatgctgcttctatacccagttttgagagtttttatcatgaaggcatgttgaatttttatcaaatgctttttcagcatctattgaaatgatatggtttttgtccttcattctgttcatacgatctatcacattgattttttgcatatggtgacccatcttggcatccctaggacaaataccacttggttataacgaatgacctttttaatgttgtgttgaatttggtttgctagtattttgttgaggatttttgtatcagtatttgtcagagataatagcctgcagttttgttttctggatatctgtctggttttcgtgtcaggctaatattggcctcacagaatgagttcagaagtacttcctcctcctctttttcacaatagtttgagtattaggtgtttcaatgtttggtaacattcagcagtgaagccatcaggtctcgggcttttcttcactgggagactttttacatctttgatctcattacttgttgttggtctgttcgggttttgcatgtcttcatgacacaatctaattttgagtttggtttgctattctagttctttaagatgtattgtttctcttttttttttttttttgatacaagtgcttattgctgtaaactttgctagtactgatttatctgtagcccacaagttttagtatgctgtgtttacagttttgtttcaagaaattttataacttccttatgaatttcttcattgacccactgatcattcaagagaatatagattaattcccttgtgttttgtataattttcaaaattcctcattactgatttctcagttcattcaactgtggtcagataagatactttatatttcaattttttgaatttaaggcttgttttgtggcctaacatatggcccatccttgagaatcctccatgtggtgatgagaggaatgtacactctgcagctgttggttgaaatgttctgtaaatatttattaggtacatttagtctgtagtacagattaagttcaatgtttcctagttgactttttgcctgatgacgtccaaggctgaaagtggggtattgaggtttccagctctctttaggtctaataatgttgctttatatatctgggtgctccggtgttcggtacgtatatatttacaattggtatatcttattgctgaaatgattcctttattatatgttgatctttgtctcttcttacagtttgtcttgaaatatattttgtttgatgtaagaatagctactcctgttcttttttggttgctatcgacatggaatatctttttacatcccttaattttaagtctggctttgtaggtgaagcgtgtttcttgtaggcaacagattgagtcttggtgtttgttgttgttgttgttgtttgtttttttttttttttttctgtcactgtgttttgattggagagtttatttcatttatgttcagttttattattaagaacttattcctaccattttgttttctggttgttttgtggctttctcttccatcctgtcttcctttttagtgaaggcgatttttctctagtggcatgcttttatttcttgctttttaaattttgtgaatcttagtatatcttcttatttgaggctaccatgaggtttacaaacactataacccattatttcaaacagacaacactggttgcataaacaagaaagcaaagagaaaactaattaaaaactcaaacttcgtctcttttaatctttttgttgtttgtttatatctcattatactgtctatgtcttaaagttattagagttatttgttaactgaaagcttcctttttttactcttcttattcaagatatgagtagttcatacatcacaattacagtattacaatagtttgtgtttgtctgtacttactgagttttgtgccttcagatggtttttctggctagttaaggtcctcttctttccagttgataaattctctttagcatttcttgtagaacaggtctggtgttgatgaaatcccacagcttctgtcttggaaggtctttatctttcttgttggaaggagattttcactggatgcactatcctagcataaagggtcttttccttcagcactttaaatatggcatgacatgtcttagcctgtaagttttctgctgagaagcctgttactagttgttgttaagctttttggaatgtatcttttctcttgctgcttttaggatcctgtctttatccttgacttttgatgcttgccatctaggagccaaggcctgaagttgcatctttatgaatctatctggtgctctcttctattgtggcagagctggcacccaagccacaatacaaagtttgtcccattcttcctttcccatttcataagcagaggaatttttccccatggctaccactgcctcaggctcatggtgagtactgcctggctaccactgatgttcactcaaggcccaagagctttttagttaactaggagtaaacgctgcgaggcctgggtctctccgttctgtgcagtgggttctcctcaggccccaggtgagtccagaaatgccatccaggagccaaggcctgcaatcagagaacccaggagcttgcttgatggtctacctgactgtggttgagctagtacccaagctgcaagacaaagtccactctattgcctctcctttccaaaagcacaaggagtatatccccatggccaccacacttgggaatgcattgggccacacccaaagacagcatggctctgagtcttacccaagacttggtgaatactgcctggctactactgctgcttattcaggacccagggactctttagtcagcaggtgacgaattctaccaggactggattcttctcttcaaggtagcaagttcccttctggccctgggtgtatttaagaatgtcactcaggagccagggcctggaatggggggtctcaggactctgcctgatgccttatcctactgtggttgagcttgtgtccaagttgcaagacaatgtcatctttactgtccctatcctctcctcaagtggaagaagcagtctctctcaaagctgtcagctgcactgttaggggttagaggatggggtggtacaagcactggtgtcttactgggttgtgtgcccaccaagtcccctgacttcgagtccagcacgacaccaagacttgcccaggaattgcagtttttgtagcctagactccctttgaagtttatttaggaccccaaagtgcttgagctcacactggtgagactagctggaactcagcttctaactgctgagatgggtgatacctccctggatagggctggtctaaatgtgccctctatgtgcgcttgatgaattctgccctgtgttgcttcccactgtgacagggcagcactgggttccaatgcaacgtttcacaatcctgcgccctccctcctgcaagcacacagatcgtctacatgagacatggcctctgccaggggatgggggaggggtggtgttggcaattcgtaactgtctttcctaccatcttcagtgcctctttccttgatatgatattaaaatcaagtactgtgattgctcacttgatttttggtttttatgtaggtgcttgcttgtgtggctatctgttcagtttggtgtttctatagcagcggtagcgggaaagatgattgctggaaggttccatgtatttgaccgtcttgttctgcctccctcctagtaaagctattctttaaaaattctagcatgttagggttttgtgttatgttctttttcccatggaatttgaaaatggatctatttgagtagaatttcaaaagaataactcataatttttgtctaagtatatatgtggctggattcacaaagctgggcacacagggactggttggttgccgcaggtatcattgttccctgcttgaagtacccgggcatttacaggtcttgtcattgacatggctacctggttgtaggaatagtctaaatcctatgtttttaatcgtggaagtttaagggatgtcttttgcctggaaaccagggattttcttgacttgtgtgaaattcaaagtttatatgtgatccaaggagtgtatgtaaagagcacagtcacccaaaggctaatgttagacccatcacctgacgttttttggaaagtatttgttgatcccaaggcttgtgagagctcccactgttacatgttctttagtcctttctaatgcttctatgtaatagtaccttttaggaatattttctttgctggactctaagttctatagggtctgggcctatgtctgatgtactagcatatgattcagtacctagctcaggtttattcatgctcaatatgtctttgactgattaaattagggatttccagataggtgatgaaaaagctgggaattacctcatgaggggattgtagggttttaagcagaaaacgatttggtgaagtatgacaaaagaaagacaaatgttagaaagataatcaaatagtaggttataaaaggacaaggaagcaacataagattgaaagaacaagaacccagaattagacagatctgagccataattttggctttaccccattctagtttcatgacaaagagccacatactcatcttacatgagatacttagaggttaagtatgttactgctaatctcagaaatgccacaacggttatgaaatccactcatttaatagtgtgtctcatgagtatttacgttaaaaatgttaaatattatttattgactattatttttccttagtataattcctgagcaaagaactgagtaaaatagatgaaaagctctcacagggttgtttcaaacctaattaaacccgatattcctaaaatttgagttatccagtatgagaataggtcatagcatgcaaaatgtgtatgcacagcaagcatgttttgagtgataaggatgtcgaaccactctgactggtatattccaagaatggttaaactttatgtacccacccaggtagattgtggtcttttgcttctttgtgtatttacttttccctttacccgtaactgccttgatcatgcctgtattttttctctccttcatagaatctatattcatttcagtgaattaattagatcatttagggtataaatctcttactcttgctattcaaactaattcaaatagacttgacctatgataaaatttttaaattttttttgtcatttgaactttccttttttcatccgtcatcttcggcagattaattatgcacactaattatccttaaatatagctttagttttcaaaaggggataatcgtgaaaatgtatcattggaagtgtgctttgttaaattgagtgtattttttttaatttcagtttgggaagcagcatattgagaacctcttcagtgacctacaggatgggaggcgcctcctagacctcctcgaaggcctgacagggcaaaaactggtatgtgacttatttttaagaaagttaactttaaacttagtagaatttcagaccagaaactgacaacatagttttatgacatctagtagaatgactaggtactgattgaaacagcaatacctattccttagtaaagcaacctcgtatgattttcatttggcatactctaccgcctgcagaaaaagtaaaaatttcagtaatacaatttatattaatagatattattcagttttactacttggtatctatcttatcaaatatcttaatgaaggcttttatacataatgacttgagaaattatctttgtacttttgtgtatttttgaagttattttacaaggaacctgtatgagtttatacatgtgggatagcaaaataaggtacaggcattatagtgtaatacgtgatagcatatgtgatgaaaatatcacttcctcttgaactattatcttgtctaacttcagagcattcctgtgaagatacatgattgatatacatgattacagatcagtgaagtcatgttgatcaaggtcttacactggggggggaaagaactcaaattgaaatcccctgactgaaataatcgtcttagattgctattctaaaaagtagagtttaagcccccagtctatagtcataaataactgttctacctatcaaattctgctaaatcatagccttcgtctcttatctttgcccttcattacaactccccagcacatgcacatacacacacagacacacacagattttgtcatattatacaaactgaagctgtcgttcaaagtcagttagcaaaaatcctatctaccccagcctgcctcctgtaacacttaacgctaagccactcttttctcggtatatattgtcagatatctctgggtttttgcctgtattattttacttgcctgtatttctttttgtacttctgtctaccccaactgtctgccagaaaccttgatttcacctcagtaaagcttttcccaaattacctttgctaatttttccctcccaaattccacagaaggcccatttttgtcttgtttttagtgtatgtatgactgacatccctcctcaattaaattctgaagtcctatacagaagagacatacctatgctttcattttttatcttcagctatgtgagattaatactaaaacggatccatttttttcaagaagtctgaacttgtactaatagaagaacaacttgatgacatattgaaataataactttagtcaagggggaaaatcagatttaataccttatagctgaactgtttgctgggcgccaatttgaggtcatcatgtaaacttggtcttaatttcactagttagagatagatttgtgtgtaattcatctcctatgactgtgaacaatttacatatatatggatacgtagcatatgtacagaaatcagtgtgtctgtgtatctcgtttctcctgtattctgaagtcagtcctactttgttaccgaatacagaagtcccagtgtcttccaaatgttcgtgaaaaatctttcaaagattatggcttactcatcttgtcctggccctctgttaggaggctgttgtctcttcacttccaggtatctgcgtgatcacttctcctgtgttgcaatcctctggtcatttccctgactgagtcaatccatctatcacccaaagcaatttagtcagggttaacaaatttcatacataatgtttaagataatgaatttcagatcctttcgtaattcataagcatgatttgggtgtttatactcagatatgagataagcctttctctaaacttatgatgttggcacactacccatttgatataaagaaaaaaccactaatttcggcaaaattaaaaaatccacatgatttgcatttatgcatatacatacatagacgctaagacaaaatgaacctaattagtaatagcattaaagaaaaaaatatcaaacaaaatatccatgagattggccagtataaggtaagctagtggtagggaaaaatcaccaaacatttacacatggcagtgtagattacataatttcagatactgctactaacagaatccattcaccattgtttgtcctaatcacagatctgtcagccctggtctgaggattttgcctttctcataaagcagaatcacctctaacaaatgctcccgatcccagaactccaattcgctatgccttgtcttgaattctaatagtttctgtagagatatatcttctactcctaatgggaggcatgtatactatagaacagaaattttagtattctactcagaagcatctgcatttggattattggctcaggacatccccagggttaaaaggaaggtacttgccttacaatcataaaataagaaatactccccaaggagactctaataggggcagattttaagttcccacttcaggatcagaaactgcagctttttaaaagagtagactatgtttggttctaatacatatgcacatgtgtacatttaatgtttgaatatgatacaaaggaaaattttgctaaatcttgtgactatataattacataattgaaaggaaatatgtggctttggtctaactactaggcagagaactgatttgagtaattattttcaaaactttaaagtcctataattaccattaaacttgtatactgtcaatctatatatacacaagaagattggttatttgctgtttttctttcatgtattttttttttattttgatggaatcttactctgtcgcccaggctggagtcagcgacatgatcttggctcactgcaacctctgcctcctgggttcaagcaattttcctgcctcggcctcccaagtagctgagactacaggcatgttccatcatgcctggctaagttttgtatttttagtagacatggggtttcaccatgttggccaggctggtcttgagctcctgatctcaatgagccacctgcctcagcctccccaaatgtctggctgttgcttttttttttttttttttttttttaaatctaaagtcttatttttttcctctttttggtggaaagtgggagaaatatcagaatgtaaaccaacatcattctgacattcttggaggaaaatctaagaggtaaaaatggagattctggttcataaggttagccttaatgttttgtgaaatcaaaggaacaagatgtcaatactgtgttataaaggatatcaggcaagttaccttggagagtaagatggctttagcttaatttgggttgttcagcaggcagtgcaaatgataaggagttctagggtgaggaactacttgagaaagaccaggagctttgctggaaagtataggagttaaatgcaagacacagaaatatagatatttgtttggtgcatgcacaaggtagttagagaagaaggaaataaatttgcaagactggggctctacagacacagacaaaagtttgggtcctggctccaccaattattagttatatggtaatctatatattagatattttaacctgaggttcacttctgtacaatagggatgaaactaactgccttgcaaggcggggattaaaggtagtgcattcaaagtacttggcacatactacgaagtcaataatatttatgttggaccaactatgtgacaagcaccaatcttagtgctttatgcatatcgacacactgaattctgccagaaaccatatgtacaatggtttgagcaatatgaacaataagtagtgccctggacaaggtctggatcctgtgagacagcatgcttcatgtttgagtgagggctttgacctcaaatgcagagaagaaagtatgtcgaattctcttgtaaatcagagcagttgttattgagagcacatgttgtaacttgtgtatgcctcttgctaatattttcattaagtccatttttaacagatgagaaaactggtatacagggagattaaattttttatgtaggccagacagcacaaaaacagcagagctgacaattgaacccaggcagtcagctttgtagctcttgcccttaactgttacctataatcacccaaatgtttaggtgagaactttgcaagtggtttgcattggcagtgggcttacttcaggaacgtcattgttgatggtatgaaggaaggatgaaaaaaatggtgagtgagtggagaagggaaagaggttagatttctctgggcaatagctaataagggcttgtagtaaggtaaaagaaatgaaaatgagagtaaataaaacaggttatcataatggtagaatttctaaaactctacaacttaataaatgagttaatttgtatattacaatgaactatgcagatgttggtttaaaaattacaggataagatacaacttttgggattgagaataaaattagggaaccaaagtgattgaggtttagagcttcagtgacaaggacaattaaggtaatcttcacagaaaaggtttcctttaaccctatttggcattatataattttgctagagtcaaatctcctttagatttttctaaaaagtttgggaattgtttttctatcttactagaaaatgtttttatgcatgctgatgtttctgtcattggtggtcatgcagtaatccccaactgggctatagaatgaagaaacaatcataccaaaataggctttgtaaagaaaaagtgttgccattcttagagtggttggtttatgctaaaaacgtaccaggccaaggacaattagcgcaaagtatttagattcattatattaatgcctcacaggctctgttcgtttacaatattcaagcttaatagtgaaattataaatggtttcatttctagtagattgtcggtctctctgctggtcagtgaacactcttttgttttgttctcagccaaaagaaaaaggatccacaagagttcatgccctgaacaatgtcaacaaggcactgcgggttttgcagaacaataatgtaagtagtaccctggacaaggtctggatgctgtgacacagcatgcttcatgtttgagtgagggctttggccccaaatgcagagaaagtatttcaaattctcttgtaaatcagaccagttcttactgagagcacatgttgtaattcgtgtatgcctgattgtggctaatataattcaggaagcaaatgcatgctgccacagagggaagggaaaagacatagacctgacctgataggctgctccctgttttcagattttacttcatgaagctgtgtttggtggacaaagtcctgcagtcaactcggtttcttttcttactttgcttttctttttcttttttcttttcttttcttttcttttctttttttttttttttgagatggagtctcgctcttctgtcccaggctggagtgcagtggcgtgatctcggctcactgcaaactctgccttccaggtttaagctattctcctgtctcagcctcccgagtagctgggattacaggcacatgccactatggccagctaatttttgtatttttagtagagacagggtttcaccatgttggccaaggctagtctcgaactcctgacctcaggtgatccacctgcctcagcctcccgaagtgctgagattacaggcgtgagccaccgtgcccggtgaactctgtttcttacggcagtgttttgtgcaacaaacggatttttctataccaaatatttatgtactaaatgtgttcaaacctgataatgatgtttgtttaaatcaagccaacacttattaaacgctgtctccaagcatataaattatacagaaacatcactatttttacttggggtatgaatggcagatttgtttttttggtttagatttaactggattaaaatacgtgtgttgcattagaagaagtaaacagtcacagctaaaccaagtaggcaggtcagaggaattctaatctcctctgaaccacttggtgactcttcccctgtgtcatggcattggaggcagccttcctttcttattaacatcctaaaatctgtctaatcgaccaatacatttcaccaggcacttagtagctccctaattacattacctctctctttcaaagataaactcaagtacattgagtacgttgatcacttactcttaaaataaccataagcagggatagattaataataacatgtactcccccaaatgttgctcagcttatctggcagggagatgacattacataagatatggaaatggaaactgtgcagcaattaattggctgattttatgaattcagggtcattgtcacctttaacctatgaaagttattttacagagatgtttgtcttaggaagaaattaactagatttttcactccgcagccagaataatctatgagctgattttcttgtttattagtccgatggactctttggaaatatcagtgtcattgacattatgagaattgttaacaatattaaagttacacaaagaaaatgtctttgaaatatcaaaatatcatattctgtttcaaaatgtagcagtgaagaaaagagcggaacacagaattattagatttaatttatttgtagcttgactgtccccagcaagaaaatgtcatttaaaaaaacaaactttgggatatcctgtaaaactcaatcctgcataaagaaaatgcggtacaggtcgggcgcggtgctcatgcctgtaatcccagcactgtgggaggccgaggctggcagatcaccagaggtcaggagttcgagaccagcctggccaccatggcgaaaccccgtctctactaaaaaatacaaaaattagctgagtatgctggtgcatgcctgtaatcccagctactcgggaggctgaggtaggagaattgcttgaacccagaggctgaggttgcagtgagtggagatcgtgccactgcactccagcctgggaggcagagcgagattccatatcaaaaaaaaaaataataataatttggtacatatacagcatgaaatacaatactatgcagccacagaaaagaattagatcatgtcctttgcagcaacatggatgagtctggaggtcattatcctaagtaaactaacacagaaacagaaaaccgaataacacatattctcaataagtacgagctaaacactgaatgcacacgaacacaagggaacaaagagccagcagcagctagtgctggggaactttgagactcctacgtgataaatcatgaaagggtgtatggggggggtcttacttgcaagtatgttttgggaggttttttgggcacacatgctctggttgtacatgctagcacacataccacatctcattggcatctaaaatctccacccaggggtgtgtgggtttttttgtttgtttgtttgtttacactattacaatgagcaaaagaatagggcaagtttttggaggagtgtgtgcatgcttgtcagtggggaaaatccctagcgtggttatctctggcgagggcctgagaagtcccctttggggctagaggagcccaaccacaaggctagacataatcagtgtggacagtgtgtgtattcattgtccgtttcgctgattgtcaacaggcagcactgactcagtgaaacagcatcttcaggacttcttttctcaatggggctcccttgcctgctcatttctggctatctgcctactccaagggaaccagaaaaatcctggcaataaaacatatagaaggaaatttatatgactttgggataggcaagtatttatgatacctgaatccaaagcatgtttcaaaaagagaaaagttaacttggacttcatcaaaattgagttattgctatattctggatatgagccctttgttttgagttgcaaatgtattttccttttctgtggattacctttttactcacttcaatggttaatattaataaaaacaagttctccacttggatatagtttattctttaaaactttatatttttatgacctgttgaagaaatactggcctacccaaagccattatgatactatattaggttattatctatagaaccattatcgttttaccattttgtttttggatctgttttacctgaaattgattattgcatatggtgtgaggaataggttaagactcagtatttattttatttgaagtctaattaacacaccatttattaaaaataatgcttcctcattgcttcacagtactaagtgtgtcattaaaaatttgtccgtacatatgtgggtctgtttttgcacttcaattctcttgcattgttctctctctctctacacacacaaatatcatgtaatgtggagtaatgtagttttataatacagcctagtatctggtgaactaggttctcccactttgttcgagattttattggttattggccctttctatttttgtatttgttttgtaatcttttccatttacatgtacattcattttaagtatgattaacattgagttaaatctatagagaataactgacacatttacatatggagtatcccagtcttctgtttttcttgattttttttttaaattttaggttttctagaatgagaaactgaaattgaacaggaacacaaaaggtgttcacaaattcaagaatcatatttaagaaatgtttaacctcagcagtaacttgaggaaatttaaattagagctgtaatgagataccagtacaaaattaccaaaatgactgaactagactactaatgccaaatgttgatgaggacatggatcaactggaaatctcacaattaacttctggaaatataattcaggcaactaattaaagagttgggcatgatctactaaatgtgaaaatgcacatttcttaccacccagcaattctattgtagacatacaagttacagaaatacatttcccagtttgccaaaaacacatatatatgtgagaatgttcatagcagtttcatttgtgatagcccaaactggaagtgactatgatacattctcatgatgggatattacagagcaatgaaaatgaccaaatgatagctacacacaatatacaagatgaagtcgttaaaatgtatttgagtgaaataaatcagacaaattatacctactatgatttctttcaattaaatttcaaaaacgggcaaaatgtttccatgggtttaaaattgaagagagtggttaacttttggaaggagtaagtcagtaaaacgcataagagaatcttctgcggtgctcactgttccatgttttgacctgatagctgttacacatgtgtatttactgtaagaaaacgcatcaagttgtacacttatgtatatttttctatatgcatattccacttcaattaaaagaggaacttatgaagggaacttaaaacctccgaaactccacgggccatatatagaaatctgatcatagaccccatgttttctaatgaaattattaaatgaatataagtgaatataaaattagaatatgatgtcatatgaatctcttcagggaaggccacatttcttacagaaaatatagaacctcctaatgttttagtagggaaaaggccccaaaataatggcttaaatttgagaaggagttgttcaaaagcagatattaacaatgctttcatctgagctagagctttaatggggagctgcataagatgctggcctatgcgttagaggacaaaacctcaagacattctcatgcagaaaccaaacttggaacaaaggaacctttaccttagcctgtggctgaacaataacacatggattttcaaaagtaaatctaggctgggcgcggtggctcatgcctgtaataccagcactttgggtggtccaggcgggtggatcatgatgtcaagaaattgagaccatcctggccaacatggtgaaaccccatctctactaaaaacacaaaaattagctgagcgtggtggtgtgcatctgtagtcccagctactcatgaggctgaggcaggagaatcacgtgaacctgggagcagaggttgcagtgagtggagatcgtgccactgcactccagcctggccacagagtgaaaaaaaaaaaatgcattatcttataattctccattttgtcataagtataaacaaaaatggaaaacatccataagtacaactttagtttgcttattaggaagaataaatcaaaatgctcaagcaggattttttttctaaagttgagcttgggtgtgttctatatcaataagcctgtgcaggatataaataatcacattgaagaagtcctatccaaatttccttttaaaattcacaggtatataagttgattgattggtgtcagagcaaacacaaccctttgtgtgtcagagattacagccacatggtaggcaatatgaagcatatatacttaggaacagttaagtgaataaaaaagagatacatagaataagaggtctgagaagaccttttggttcagttcctatatgagcagagacctggagaaagggagtgagccttggaattgtctataggaaggtgggttaggcacggtaataaagaccttaaggtgaaaaagcatttggaatgaggcctcagcaagtggagtagagtgagtttagagataaaggaaacatagcagagataggggagcagagaggtagtaaggtgggggtgagaagaagaaagcatggtgagccattgttggcatttggactcaggtctaaatgagatgacaatgactaaaaaaacactactagaaattaaatgggtcataagtcaggttattttaaaaatcagtaatagttccaagtctttgctattgtgaatagtgccacaatgaacagatgtgtgcatgtgtcttcatagtagaatgatttataatcctttggatatatacccagtaacaggattgctgggtcaaatggtatttctagttccagatccttgaggaatcaccacactgtcttccacaatggttgaactaatttacattcccaccaacagtgtaaaagcattcctatttctccatattctctccagcatcttttgctgactttttaatgattgccattctaactgttgttaaatggtatctcattgtggttttgatttgcatttttctaatgacaagtgataagcattttttcgtatgtatgttggccaaatgtccatcagtgatagactggattaagaaaatgtggtacatatacaccatggaatactatgcagccataaaaaaagaatgagttcatgtcctttgcagggacatggatgaagctggaaaccatcattctcagcaaactaacacaagaacagaaaaccaaacaccgcatgttctgactcataagtggtagctgaacaatgagaacatatggacattaggaggggaacgtcacacaccatggcctgtcagagggtggggggctaggggagggatagaattaggagaaatacctaatgtaggtgacgggtctatgggtacagcaaaccactatcgcaggtgtataactatgtaacaaacctgcacatgtaccccagaacttaaagaataataaaaaatataaaacaggaaaaatcagacaaaatgaaaaatcagtgatagaatactaacaaacttagagtgtcattttattcaagaaagttacagtcaataacgaaaacgtatcgcacagtagaaatgctgctaaatccatgaagaaaaattgatggaaatatatttttagagccattaattcaccactgtcaagtttatgacatatttaacagcaaaagattgagagtacaaataactgtaggtttaatagtgattttctgtatctcaacactaaagcatagtagatacttctataaaatatgagcattatcaataaatctccctatgaagttggatgtgcaagaagagcaatagtttaaaaatttcagttacattaactaaattcaagtctgaactctcaacaaggcattcagaaaatcgtatgtctgtcattattgggaatgctctcccctgagcctatggaatggccagagctcagtagatccacatggtgtctttcatagggcaaaagcattttcattttcagttcattgaggcaaccaagtgatacattcactatacaattttaaggtatcttgtgaagtcaagtgtattaactgtcctgatattaaacacgtggcatacagaaaaagttgaagagagtgtaatcaggggaatatttatagaaacgtggggaggattaaaggaagaaactatggtgaagaatgcagggattcacatgagttaataacctttactacatctaaacctaagcagtcaaggggagagggctattaatttgataaaatccctcatgttgggagagcgccactggacacaactgtgaactgagcccctaggtatctaaagaatgctgttagtttcaaatcattgcctggtgaagttgagagaagtgataccttagtctctccatagaatcctccagtgttttgccagtgccgctccttagtttagtctaaccagaagtccaaggttaagagattccaggtgatgtagtcatcacatacaaagaagaggtgaagaagtttggtgggttagtgaagtaggagtggaaaacggtataatcggcattccaggtatctagttctgttttgtttctgtgcgaaatgaggacttgagaatctgcatgccgagaactctgatgttggctagggcccagtcttgttggatgcatcaggaagccagtcacctttgaggccataccacttctatttgatgacagagagtagacgtggtttctggctaatttggggactaaggactccttcctattcttctggagacaaccagagccagaaaagaaagacacgctgagagtcacttcggatatctgctcttcgtcgtaaacttgttaaaggcttaggaaaatagtaaaaaaaatttcctgccacatacacaaattataaacgggcaatatatttgaatgcagtgaaaatgtcattaaatacacacaaactttcaaaattcatgttatttaataacagtagaaactaataatatacttataaattaagtttgattaaggtttgttaaaccaagagtataaaactacatttgtgaaggaaaaagcattccatatgaaaacccatgagaaatggctcaggctgtactgagagtttgaatttttgtctttgattttgatcttcattaaaaagataaattgaatcaagctttcaaataaaaatgttacaaaaatgctttaaggaaagcaggaactaaagataaagaaatagaagaaacactagataaaatatacagctagttccttataatatgaaatagattaatatcttatgaatgtgatccagacaaggagggagaaaaacaaatgtatgcagtttaaaaatggaagggaaatattaagtatgagatatagaaaccaaaaacgggttttacacagaaatacatatatgtttattataaaaaatgaagttgaggccgagcgtggtggctcacacctgtaatcccagcactttgggaggctggggcgggcagatcacctgaggtcaggagttcgagaccatcctggccaacatggcaaaaccccgtctctactaaaaaaaaaaaaattagacgggtgtggtggctggcgcctgtaattccagctactggggaggctgaggcatgagaatcacttgaacccatgaggcggaggttgcactgagaggtgatcataccactgcactctagtctgggggatcgagcaagacttgtctccaaaaaaaaaaatttttttttgaataccagtgataagtttgtccacacaccaagaaattgataattgctaatagaaaatcatatgaacagcctcctaattctataaacctatgaaaagaaaccctggtttaaaaaaatcactcaaaatttagccctctgatttttaaaggaatattagaagtgtcttttcaaaatgatactttttggtaatttctggatcattaagtcaaggtcattttgtcttctctcttttccttagggtctcctccattttagcctgtccctctgccataaatcactagttctagcatattctgtagttctaaactagctcctcagtttaaccctgttcctcagtttctttcctttccctgtcctggcgtttaacctgttatcctcacttgaatgccactcagcttatatctgtagagctcagacactacgtctgtgttccaatttgcattctttgtggtggctgttttagcatgaagttatccctgctgtcaataatgtattttggaaagccacttattgagaagaaagtacttctaagtgcagtgataactttattgcggtatttgctgagagcaaagctcatttgtaatagttggttgtgattttaaaaagcgaacaaaatacaaaatcctgagaaatgggagactatgctactaagtggttattcttgtctctacatcagctctaggtaaaaatgtatccacagcttctttttatttacaagtttttgaaggtaaagcaaatcccagctaggatgaaacatctcttatacagccattctattatttctttgccctgtcccacttttgtttgtaagtagtgcctttcattaggcattttaaattcagttctacacttaactctattctctcaaagatatttaatgggtaatttaaactttccttggatataactaagttctaatcagtgagtattctctattagatatttgcacttttaataattttgtgtctagtttaatgattaattttttgtctggtaaaggaacttagaaattacaaatttgatagagatttaactgtggtgctttaaactaccccccgctccccaagatgtattatgatctgtcttcctttctccaagcttgtgtcctcgtcttccctcttatgatttccttgcttacattttatgaattccgatcccttttataaagattcatacaaaaggtatagtgttgaaatataccctaggaacattaccaagacttcgctgacttaatataatttaatattaactgacacagttgtagatctaataattatgttcattgtaccagctcatcaattgtctatcacaaggtggtaagtttttaccaagtaacttcaaatctacaatgtgggatactacaaagcaaatagtcattgctatacattaaatcacaaatccaaggtgagtatttaaaaagcctagggtggaaattcagatgacagctatgttcaaatattcacttaaccccatcattgaaaatagtcactgaattagattgaatggttgtcagatgtcactgatctgaaaaatgatatactgttcacatgctggcatataatgttagataaagaggattctaaaatgttctttaaaactagtattttatgtgtcctttaagtattcagaaacttaaatagccatataatacatattttggagcatgtcagaatatatttgactataaactacttctatttattactcataaaatctagtatttaagtacaaattccaaatttaatttgttagacaagtatttcttacacaaaattgtcagtccacacaataggcctgtaaaatatttgcactttatatgtattaattctcaagtttgcagaagaggtagatcttgttaactctgtaacttatcaactatagggtctttgccaaatgattccgtgactttgactcactttatcatctgcgaaatgcattaatagtaaatgttcacttctttcaaaatacttgttatggaagatacaaatatacaaacataatctcgtattcattaaactcacattcagttgcaaggtaatataactactcttaaattgcagcatgttctcatttaaaataattttctgggtgagttgtttattcttcccatcccccttagtatacctcttgctttaagggaaattagtattgacacatttcttgtatattcaacttcaaattgagatagccagttacctattatgttcacatatggaggtctgctgggataataattatataactataaatagtactgtttaaaaatatttcttataatgtcactcaagtatcttttaagatttttattgtagctattgcttttttttttttttttttacttgaaattagtatacgtgacttgagcttaaaaagttggggctatatgggttgatttttgtcgttaaagttacatcctatattgccagataaaagatacgtaattacaaaaattcaaattaaataatatactgaaagtatatatatctttcatactaaattgtgaaagtattgaggacagtgtccatttactcaggcaatgccctctaatatatattctatataaggaattttgttgagtttagttaaaagagctactttcccaaaaagtttagtttgcattttattaatacgttcaaccagattacctgtatcaaaacttctattttgataaatttgttttaatgtctttcatgccattaaatgttcatattttcttaggattatgagacacttgtattaactgcctcaattctttattgtcaaagaggcagtatataaacaaatgaaaacatgactccattaaaaataattctcctgcaatgtatcagagtgatcataaacatatctgaaatatagaggaaatttaacatttcacttgtccataagcaatttgttgaaagtctattttttaaatttattcttaacattctatgcgtggcatatagtgagtggtcaaaaatagttaaagaatgactaaatatgtaaaacttaatcattgaaggtagagatagtatctttgtagtgagtacccagaattaaatcttgtaatatagttgaggtcaaaatgtgcttcaaaaattatctaatgtaaatttctatatctgaatcaaaaataattcttgaaatacggagataaggaagggaataaaaagctgtcattggaaatccaggtccacagtggcaatatggcccaccgtttaggttgtatatatcgacgtatttatgatttaataagaaaaagattcaatacatgcatctctcaatggaagaaaataggtatgatttatgcccataagtcttgaaattttaaacagtgtaaatcttaaatgtggtgtaaaagcacatgctgcagggcaatgaaactactttgcctttcctgtattttttatctttttaaaatgcattatatttagaaggattgtatgaatacttgagaagtttctcttgaatatggagaagtctttagcttggctacatgatggcagacatcttataaaagacatttaacatgtttaaaaagcaaattctgtttatctagaatgttggaaggaacttctcggtttatatatattttatgagaacgaaatgaaatgaaaagaaatgaaagaaccaaatagatggtggaagtacatgcttgaggtttcagtgtcaggaaggatatttacataataattttcaatgcatgggatttcccttttagttattgtttaagattctgtttaaggaaatcaactcaaacttttaaggatatttcagggttcctttcagaatctttttgtgaaattattttataatagtttgtaccatttcatatctagttaaaatcaccaagactgagtgaaaaggtagcttacccttatccccctcccttagctaattttaaaaatgcttgtattttacactgcatatgagggaacaaaagtgactccttcttaggacaaatatcaaactctgaaatgatctgggagaaccaattcctttgaaacaaatgtgagaaacgacctgctttagtctaatttcaattggctgaatgacgcaggacgtgttttcattagagcctgtagctctgaaatgtccttgtcactggttgtctaaaaaggcaagaagaggcagacaccatatattataaagatgatggttcccctgtgaatgagatataactttctgcaacttccaagttaaaaccgcaaatgcttaaatgatacacaaaactctaaacatccatctctctctgcatctaacaaaaataaaattgtatgaaaaaattcattaaagctttgtcagaactttgtcacctgtctttttctctctctcatacacaaaccacacatcacacacacacacacacacacacacacacacacacacacacacacacacgtaaatatcttacaggaatgtaactcttagttttattcatcattttcccttctctctctccttctgctctgccctaagaacttccattttcattatttgacttggttattgaaattattttcaagttacatgcccctcattctgacgtcttatttactattttctgtttgatgaaccctagtctgctattcttctttctgtaaagcaaatcaaaaataacactaacttgttcctgtcaataatctttcagaaaaccatcatatttcaggtttactttcatcttaagtttttcttaagtattcttaaatcttgaatatatcaatataataagtataaatccttttactgtaaaccatcatgggatatctaatcttagcttgaataaaatattgacgatggtagaaattacatccatgttcctgaaggaaagtgggataaaagaaaacagcgaggttttttgcctgtctcgaacaagcaaatgacgagaattgttcctcatagcccagtcatttaggaggtagagtacctggaagtaaatgctccctgaaatgattatatattaatcttagaattactaaatatatattgttatacaaaattatgtattgtaagtactagtctggcgatagaagagggacccccttaagttcttgtcctatgcctttaaaatagacagcaggagactactccatactaaagaataatttaatgtattaggttttctatgtgcaattcttacagactgcttattgtaacttgaggtgtttctaaagagttcacattttaatattctactggagtcacaataagtttccattatgtcaaagcaaaccatggaggttttctatcctccaaaattacatttgaataaagcaacttccgaagataacagtgtaaaactctgagacagcatcccatgttactttatgagtaaaatcttaggcctgttgacaggaactacaaaagccaattgtgctgcgtagtttaacttatttctgcaaaaactcaaggcatgttattacattttcacacagaatatcaattttcacacctattttggtatcagatgttttcattgtgcaaaacaggaaagcagaactttgggtaaccacagtgaccctactatttaatttccaaccatagagtgcttgtcacaacactgatacacacagtaggctcgtacattaacatacatgtcatattaatgttttctgttttgcttagtagacagatgtaatcattcacttcacacagattttaaaaggttttaatatttttaccattcagttatttagcaattagactgataattcttgaaagacataattctggaatgtgtattagaaaaaaaaacataaaagagaagttactgtatggcagggtgatgattatttaagaggaaatagtactgaattcagaaaaatgttatgacttacagctaatagtaagaaatacagcattataagagcaacaagcttatgagaattcatggccaaaacagaccagaccgtcaatgtgaggcattgaagagtaatataaatgccatgaacaataccctttcaggcatgacaaatacctccctcctctagagtcttcatggttatcaattagcatttcttacactccttggtagtttgaagaagacatgtacaagagacaaaacacaaccaaaataaataataatccttgtctgtatcatggtgtgaaatgtttattaacttggagagagagcctcttaaagctttttgtggagaattcactagatgtaattaatgaaatatcttctatccagacatagttttaaatcagaccttgtggaagcttcatttatctttgatactctgtttccctcttggtaaaatgcacataaatgtaaaatgttcatgaactcttggtaaaatttatatagctcatacatactctaatgatgtaggcatagtgaaatctgtattcagagagaactgtatagccataagatttttaaaagatggaaataaaagaagtatgcatcttaagaaattgtaaaaatagaaacaaaaataaaaattgtattcaacgtagaaaattgaataagaataatccattcaaaagtgagctcttgaaaagattaacaaaataggtaaacctatcccagtcataacaaagaaaacttagaataaaaactagacgagataaatgagaaaagacgcatgacagcagatacagaagaaatgaagtggaaactaaaagcaattttataacaattttgcaaaattctggaaaacttgattttctcgtacaatacaaatcactaaaattgagataagaataagtggaaaattagactgattacttcagaaaacatttagtaggttattaaaggtgtactgttgaagagtgtagtaggattctttacaaatgaatttaacgtaacccttaaagaataatttatatactttaagctattccaaagcatatgaaaagaaaaaaactccacaattccttttgtgatgtcaggttaacctttgtacttaacagtcaaaaagcaaagatcataaatctgtaagacagttttacttttgaatgaaatacaaaattttgttgaattataagaaatataatcacattttgcaagtggtaagcattctacaaatgttatctcttatttaccaagagctcttaaaattcaagaaggaaaagaaaactaccatatagaaattaatgagcaaaacatattaacagacaattcacacatggaattgtaataggtcagtgatacaaaaatatattcaaatgcacaaggaatcatggaaataaaagttaacaaagtgatgtatttgatcatacaaacaaaactaaaagaatcaaaaacaaaacaaaaatttcctggtgagagaagagcctattcttatacattctggttaaaatatgtaattctaaattgtttctaggaaggcaggtggaaacacctactaaaattacatatatatgtgtatatatgtgtgtgtatgtatatatgtatatagatgtatacatatgtatatatgtgtatagatgtatacatatgtatatatgtgtatagatgtatagatatatatgtgtatatgtgtagatacacatatacttgtatagatatgtctatatctccctgaaatgatgcgtatatatatatgtatagatgtatctactagagcagagtgtgtgtgtgtgtgtgtgtgtatacacacactctgatccagtatatacatcctgtgaattgttataataacagtagaagcatcagtatctgaaaatgtatgcataagatattggccaggtgtggtgactgctggtgggaatgttaatcaattctgccattgtggaaagcagtgtggtgattcctcaaagaagttaaaacagaaataccattcaacccagcaacctcattatttggtatatacccaaaggaatataaattgttctacgataaagacacatgcacatatatgtttattgcagcactattcacagtagcaaagatggggaatcaacataaatgtccatcaacagtagactgattaagaaaatatgctacatatacaccatggaatacaacccagacaaaaataagattgtagcaacatggatgcagctggagccgttatccttagcaaactagtgcatgaacagaaaaccaaatatcacatgttctcacttataagtgggagttaggctgggcgcagtggcttatacctgtaacctagtactttgggaggccgaggcgagcgggatcacctgaggtcgggagttcgagaccagcctgaccaacatggagaaaccccgtctctactaaaaatacaaaattagccaggcgtggtggcgcatgcctgtaatcccagctacttgggaggctgaggcaggagaatcgcttgaaactcgggaggcggaggttgtggtgagccgagatcgtgccactgcactccagtctgggcaacaagagcgaaactccacctcaaaaaaaaaaaaaaaaaggggagttaataacaagaacacatggatataaagtggggaacaacagacactggagcctactcaagagtaaaaggtgggaggagggagaggatcagaaaaactacctatcaggcaccatacttattacctgggcgatgaaataatgtgtacattaaacccccatgacacgcaatttacctatgtaacaaacctgcacatgtactcctgaacctaatataaaagttaaaaaagagtagctgtctgccactgaatacaattctgtccctgaatataatatctccaattcccaatcagttaattaccccctagtgatctgaatgctttctggcatgctttctccacctgatacttttcttcattccaatctattttttctttacagatttaatcaatactgagtacatgaatatatcttatgtcttttgcttatcttttcacaatgttacttcctttttcttaccccttgggcttccgtgagacacagttgcctacctaattgtttttcctgtggatatagataaattttattggaaaaaaaccatgaacatttatttaggtattatctgtggctgctgctgtgtgtgtgtgtgtgtggggggggggtgcgatgtgtgttccaatgacttattttttattgtggtaaaatacaaatgatgtaaaatttaccatataactattttttattttttaattagcaaaaaaaattgtatataccatgtagcatatgattttttaaaatatctagatgttgtggaatgcttcaagctaataaacatatacattaacttatatgtttatcatttggggttgaggacacttaaaatctattctcttagcaattttcaaaatacaatattgttattaaccaaagtcagcatgttgtacagtagatctcttgaatttattcctattaaatgtaatttagtatcatttgaccaacatctgcctaaccctcctcctccaagctctatcccctgctaaccaacattttactctcaattctatgagctcaacattttaaaatttcatatacaagtgacatgatgtaatgtttgtctttctgtgcctggcttatgtcatttgacgtaacgtactctagattcattaatttcattgcaaatgagaggattctctgctttttaagtccgagtagtattccagtgtgtgtgtgtgtaggtctgtatacctgcattttctttattctttcatctactgatggacacttaagttgatttcctatcttcgctattttgagtagcactacaatatacattgaagtgcagttatttctttgacatattgatttgtttcctttggaatatatacccagcagtagaattcctgaattatatggtagttttatttgtaattttttgagaaacctccatactgtttttcatgactacaataatttacatttccaccaacactgtgcaaagattcctttttctccacatctttgccacaacttaccttttgtctttttgataatagccattctgtgtgatgtaatatttcattgtagttttaatttgcatttctctgatgattagtgatgttcaacattatttcatttatgtgctggccgttggtttgtcttcttttgagaaatgtctattcaggttcattgccctagatagggtttgaggtatcattttttctatttttttagtgtataattcagtggctttaagtatatttctgttgttgggtagtcatcaccgctatccatctctagaatgatttcatcatcccaagttgaattcatactgattaaacgattactctccattttcacctcccctagcctttaataacttccattttttctctatgaatttggctattttaggtacctcatataagtagaatcatacaatatttgtcattttatgtcttgcttatttcacttagcatatgtttccaaggttcatttatgttgtagtttgtatcagaatttcattcctttttaaggctgaaaatattccgttgtatgtacataccacattttgtttatccatttatctgtagatggacatttgggtgttctcacattttggctattgtgaataatgttactatgataattggtctaccaatatcttaatctctgtttttaattattttggttataaacatagaggtagaattgctagagcctaatggtagatacttttttattatgtgaccttctgttgtgaactttttgacactgggggggtagtaccttactttcctttatcaggtctgagcccagtacctgaatatagtggaaattggaccttatgagaccttttatgaggacaaggaaatggaggaactatcttcctgcttacacagtgacaagtcttatgacagtggataaggggttactggaatctaagttcctattacttgatctaagtctccccagagtcaggtccatggcaacccaaaacgtatctaccagcagtgcttcccgcagtatgagtgagtatgtttcctaaaaatagcatattctctgcttaactgcttgagtctttagtgctatatcatctgattgtcactatcactagaattaagtttcatgaaagcagaaggtttttacttttacatgctcttattacttcattgcctggcagatagccaaaaggtacttgttgagttagtgaatcaatgaatcaatagataaattcatagtggcttttccttatggaggaatttctctcctctactgccatatgaggaatccccagatgatgatgcagatgatgatgctttcttattcttgaatgatcaatctccccttcgatgtagtaacatcttataaaactaaaatacgatatcatgaccaagatgtcaacattcataaaaccaccaatagtattcagattttcccagctttactcatatttatgtgtatgtgtgcatgcatatgtgtgtatttagttctatgcaacattattacgtgtgtaggtttgtaaatccaccatcagagtcaatatgcagaacagttccaccattacaagggtccctcatattgcccttttataagaacattcagctaccccacatcttactcccattcctgacctctgccaactgctattctgttctctatttctgtaactttgtcttttcaagactctcatagatacggattcatacagtatgctaccctttcagaatgactttttccccacttagcataatgcccatgaaattcatccaatttgctgcatgtatcaatagtttgttcttttcattgatgagtgttattccatggtgtggctgtactatggtttgtttatctacccctgagggcatctgggttcccagtttggggctattacaaataaacgtagtatgaacacttaggtgcaggtttttgtgtacacatgtgttttcatttccttgagataaatgctcaagagcccaattaccagattgtataataagtacatgttcagttttgtgagaaactgccagactgttttccaaagtggctatatcatttgagtttccactagcaggggttgagtcatccagtttctccacaccctcaccagcattttatggcactattttttaattttaaccattatgataaatgtgcagtgatacattattgtggttacaatttgcattcctctattggctaaaaacattgaacatcttttcatatgcttgcttttcagatgcttgtgtttaactttactccaccttaaacatttgaggagtgtgaaggacaggagacacagagatttgccttgattaaggcaaataaaaccctgccagattttcatttccaaacacagtcctagacagagataagagagctggcagtttgctccattgtttattagagacctaacattcattctaaaacagaggcgttttactaaaatgcagtcagccttaattataatggcactccttggagctaggtggaagtactggtgaatttttctgagttgtaattccatactagaaagcatatcttaattttaaacatactttatgacattttatttggagatactccagttgacctctttaatctgcagtaatctattcatgtgctgaaagtaaatatatttggggtgcttgtttgttatggaaagtgattttacacatgcattttgtttaatttttagattattttcaaaaagcttcaatgctaagtctctgaaaatagctaaatgcaattaccttcacgtttttattattattattattgcaactaggcatttggtctcttaccttcaaatgttttacccctttctttaacaggttgatttagtgaatattggaagtactgacatcgtagatggaaatcataaactgactcttggtttgatttggaatataatcctccactggcaggtaagaatcctgatgaatggtttccttttgggtaacattaatcttgttttttaatttttacccttgacgtgtgaaacaaatgtgtatttctaacaataacaaaccctgctccatagtgctgctttttaaattgacactaccatgtcgtctgaaatgttaaggatcatcacggtataaaataggttctggtacatttacaggaatatttttcaaaattttatttcattgagtaagtataaggtaaaaatacaaagtcccaatcataggtgagtaatttttttcacaaatgtatgttctataacttgtctataagttaatttagtatgttttattttaatcactaccaaaggaatgaggctttctcagtcttgggtattcttaacataaattattgccaataaaagattagtagaatatgggtatctctatcaataaatgtgtgtaatacatacaaactccataatgtgatttggaaattatttttaagtcacctgagcatagggtcttccgactgtctatttgacctctgcaaaatgggttgaaggatttgtggaaaagatacagacacacacccgtgtgtgtgtgtgtgtagtatatatgcgtatatatataatgtgtctatatatacacacatatatacaatatgcatgtgtgtatatacacacactcatatccacacattatatatgtatatatatacacactcatatccacacattatatatgtatatataagaccaacatgaacttatatccactaatattatccactcattgtatacatatacataatagtataatcataatatgtatacataatcatacatgaacttatatccactaatattttccactcattgtatatatatacgtaatagtaactcgttatacacatatgtataaatatgtatgtgtatatatatataccaacatgaacttgaatttaaacttccacggttaccatcttagtggcatttggtatattgccacccctgttctgggccatggtcccttcactatcaaaagagtaaaaataaaaataaatgtgtatgtatttcttatcacgattaagtgggagaatatctgcaaggcactcagtgtagtataccacttttatttgaggtgtatcatatgacttgtattgattgcttaaagttttccactcatttaaaaaatttggaggctgagaaatgactgctgtttttactggtcgggattacttttttataaatcagcgtttttgaaatgtaattgttagaccatcaatgtactcattctaagtgtaaaattcaatttgcatcaatctggtttagttctggttcttggtagcctctcaaactattttgagggatgaataactcccccccaccacgttcattaaaatttgcaggatatttacagagttatatagccatcatagcgatctaattttggcacttttccaccaccttaaaaagaagtttcttctccatttacagtcatttttcactcccaccccagccctaggcaattgtcaatctatttctgtccatatgtatttgcctttttggatattttatatcaatataatacatgttcttttgtgtctggcttcttgcaatgagggtaatagttcagatccagccctattgtagcagatatcatggcttcattcggtaaacttgaatttttttattttttatttttatttttttttatttttattttgagacagagtcttgctctgtcgcccaggctggagtgcagtggcgcgatctcggctcactgcaagctccgcctcccggattcacgccattctcctgcctcagcctcccgagtagctgggactacaggcgcccccccaccacgcccggctaatttttttttgtatttttagtagagacggggtttcaccgtgttagccaggatggtctcgatctcctgacctcgtgatcctcctgcctcggcctcccaaagtgctgggattgcaggcatgagccactgcgcccggcttgaattttaacttgaattgtagattgctcttgctcagagtcaaatagtgagtagacacaaagagtacctattaaattcagcagccatgttgctctcctaattggcccccatatatttttattccaaattctctgaacaggcttaatgctacttcacaacagtaagcggggagaggggaagagaaagagcgggaattaatatgtgctggcaacaaagaatagctcataggagccttaagtgagcccaagttggccgattttcagcccgttccatatagtgatggtgtcaaatagaaccagcaagcaacataccgcatctctccccaaactgcttttcatatgttgctcagtacttctcaaaatatcttgaggaaggaacacttttcccctaatccattgtatgtaagatagaataaaaccaaagcgttacaaaaataagatgcccaacacccatgcttcctcctttattattaaatacattagacataaatggtactctgtaaaatcgctacataagtttcttgatgcactctgaattgttgactttatcttatggcatagtaacaaataattcctagagtgaatccagtttgcagatcccgctttgcgtaagacagatgtaagttttgacaaagccagcagaagaactcaagcatgcacagagctccaaaaggcactctgaactgtatttattgtttatactacttcttatatgatcttaccatttttaaaaatatcctgaagccctttccaactccatctgaactagtccaagataagctttcaagactattatgtctgataatttcttcacttgcttgcaagttgttcatttattattatttttttattttttatttttgagacagagtctcgctctgtcacccaggctggagtgcagtggcgcgatctctgctcactgcaagctccgcctcctgggttcatgccattctcttgcctcagcctcccaagtagctgggactacaggcgcccgccaccacgcccggctaattttttgtattttgttcagtagagatggggtttcaccgtgttagccaggatggtctcgatctcctgaccttgtgatccgcccgtctcggcctcccaaagtgtttggattacaggcgtgagccaccgcacccagcccatttttcattattagcatgtggaggcgcttttgcaatgaggaatatcagaaggaatgctttttaaatctttctttgtctgagacctctcttatagcctgttgtttttcatttatgcccttgaatcaccatatccttgagactgcaagactgtagactcttcccagcctctgcttacttatctcatctctcttatatcacactgccctgttctaaaactattaagcacactttgaaaaattatcttgctcagtgttcatcataatccagtgaatctaaaaatgtgtttttcttttttttttttttttttacaccaacattacatattttcttcctattaaatggtagaagcccttgaatttcagcaaagattaaaggacattttggtcaacttaatgtacattctagatctatcagataacgagcggcatttacagatagaaccatgttggcccctttttctaatgcaacatactatgttattaatagtgccatggaggacttctcattgaacttgtgaaaactcaggaatgcaaactctgttttcctattactgtttttctactgtccatctcaaataaaattgctagcctaaaacagtaacgcatattttgtaacataggcaggtttgaacaaaattgcaaagcatataacatgtgtttggcatctttttcttccttcttaagtgcaattctttttttttcggagtgctaaacttggctctggcaaccagctggttgtaataacaaatcttgctaacagtggtgagctatcagaagtcaggtccatacttttactggacaattcaagggatgtacttaatggcaacgctaattcactttagaatgttcatattattgatacaatttgcaattacaggagaatgatgacgttcgcactgctgaaagccatccctgtaaattcctgcctaccaagtcacttctgtgcaagacagttcttgctctgctcttctgcagagcttcacagaaactatccttaccatataagattattcctaccctcttcatttctattcctctgctgcaacttcttttaatcacagtctgggttctggggagtagacttcggagttgagtttggcaggcagcatgtttattaagccatgccctggaaaaaaaaaaaaaaaaaaaaacacctgtagaagggcagaggtgacaggagtggaaagaggaagaactagagctgtgacgtagaccctatgacacgcttattcaaaccccatagacaacttgcagctaggatgacccctcagagttgtctcaaatggggttaaaatggctgagtgtttatactctgccccttcatcagtcaatagtagtgggttgccctagagagggtgtgacattggctggcaggactctgcaactcaggtggtacctgagagaactaacaactagaagctgcctgaccacagctggagcaacaagcccttccttgaaggtcaatcttggtggtgcacctccatgtccatcatgccttcttggcccagttaactcctagtcatttttaaaaatcactgctcaaagacatttcaacttttttccttttaaaaattgatttatagttgtatgcgcgcacacacacaaatacatctgtttaaattgagcctcctttagagacagtgagacctgaggacgggacagttttctgtttacaggctcacctttggggaccagctcaatgattttttgataactgccttttatgtaggaaaaggagacatgattatcatacattgccctttattatttttttttgtctgagcaacatttgcacctaagtagaagcaataacagcgaggctgaggctgataagctgaattagtgacataatgatgctataaaggagttttggattgaatactttgttgtcctttaacgttatgcacatagagggcagactggccaagcatttcacaaatgaatcacattcatcattggaggattgcttgattattgcaaatccattaccaccattaagccactatctgctgattccaaccgtaatttagcacaggacacaaaatacacctcctgcagtcactgtacataaaggttgagcaatttataattttagaatatgagacaaattacgtaattatttgacctgtattcactgagtaactgactaaataagtaggtcaagaaggaattaggaaaacttggataatccactcctaaataataggcttagttatcaagggattgtgacagatacatgcaaagatttcatatctccgaatcgttactgtgtttacaaagcatcatctcaaatcttttaaaagtatgttaaaatgagatttagtagtatatcctaaaatttgcatttactttttaataaaaagatgactaacattggagatgttaaaatatgcatttaccccaaaggcatttgttaacttctatatggatgaaaaaataaaattgtcatatttagaatgcacaataaatattcatcatctgatcaaatgttgatagtatatgaaccttaaccttcccagaaggaaagtgcttagtggtacagactgatcacttttacatagatgtcttcttccagcatctcataaggggcttatatttaaaaagcagtctttaataaataataattctttaataaaagatgtagacagttttttctatgaagcgtcactgcattcatgaaacttagaaaaaatgcttagaatggatttctgcatcagatgactcagaagaattaaacttgataatctgttgaataacatctgcacatgcacgaagcctatgagacaatcaaatacatggaaaccaagtaatgaaaatagaaccaaggctacatatgtacacctcttagggataaatatttccttcctttgttgttttttttctttattttaggtaggcaaacatttctgtcttcttttcagttcagccaataaatatagcttgcgttaaatgatggtatgaaatcaggggttttatctgaccatattttgtactttgatcttacactaaccttgcatgtaagatacacagaaatgaggcctagaagaggttaagcaacttgtccaattaccacaattaatagcaaaggcaaaatttgaacatatactttaaaaaacaattatctatagtattcctcctatccaaaaagcgcttttatatcttaagtccttggttaacaataagtctaatgttttatacactgtcttctctagcttgttcattgaaagctagaaggtgagcaattctataaacagtaaatgttgggtctaatatggcagaatccaggagtaatagtgaacacattcagtaaatggtatggcatagataccaatgaatcagaatagactcctagcctttgagaatagacttaacttctggtagaatctattatgtctcattactaattggccctaaaatttctatttatcactgaagatcaaggacattcatatttaagtttgcatggttcttgctcaaggaatgcattttcttatgaaaatttatttccacatgtaggtcaaaaatgtaatgaaaaatatcatggctggattgcaacaaaccaacagtgaaaagattctcctgagctgggtccgacaatcaactcgtaattatccacaggttaatgtaatcaacttcaccaccagctggtctgatggcctggctttgaatgctctcatccatagtcataggtaagaagattactgagacattaaataacttgtaaaagtggtgatttagactctgatgacatatttttccccagtatggttccagatcatgtcctactttacaacatgttatgtacattgaccacattgatctaacgttccattggaatgaactaattaagaatattttccagtgttctatgggatacatataattcagttgttgaaacattaacattagcggagcgtgaaagtggttatagtggagggggagagtatcaatatgtttgacactgggaatcccagtaaatccaggttgtattctaactttgccgagaatggtgttggtctttttatacagataatgtgtttgtataagcctaaactatacaggtaaaaatgatactagatctcatgtgagtagttgtagttaaattaattaccatcatcagatacgtagtgtggagaaagaaacatctgtcttatcagatacacactttgatatcaaacaccataaagccctgtatactttgttctagttcagggtcataagatgctcagagcatttttagtaaccaagacaaagagcagaacacaattaattatatgacacaatgttttgaataccaacagaaacaattgcactggaacagcaaatcaattgctataaagcaagagagagatcttttgtggattttaataaaaagaattcactgtaatacagtgaaccaaagtccttaactatattccattcaacattatatttcttaagatgaaaaagattttttttgcttttcttgtgtaaagttcagtaaatgaattaataacagttcaagaaaaagcaaagcagtgtaggaaatacatatgtatatgtacacatacacttagagatacaatatatactatatgccatatatactacaccatttatactctatatatgtatatatatgtgtgtgtgtgtgtgtatatatatatatatatatatatatatgcttgtgtgtgtgtatttgagagagagggactacagtcactttattttggtcttcctgttacccgtttcatttacccaacccagggctaaatgcattgcctaattaactgtttaaaatgtcactggactgcatcttgcctaattttcagtgcaagttatgttttctcactttgatttttttttttttttgaccactctaccattttcctatgccaatcctgcttctagaaaagctaagaatattaattttctctaaggtaaagctcagtccaagagcaaacacatttcaaataagcatctttgtcaggtgtcttgctccagctggatttaattaaccccatcccgactgggtttccaggtgaattactcagcaacctgatttagaacagaggcagacatgcattcaaatgtcacgttaagcagcgttaacacattgtttctcgtatgacagaagaaaatgtttccacagcctcaatacagttagatgagaagggatagagacattctgtctgtgttttaagtcaatgctcatttatgcagccacatgcttaacactaagggcccgaaaatattgattttgctgttcatgtacacatttgcagatgaataaaaatatcaaggatcaggttatgtggtccttgttggctctctaacgtttttcccttcaagtggaagacttcaatcctgcaagcatgttcccactctatatttgttaatattctatttaatgatttctgaatacatttgtaggtaatacagtaaacatacccaaattgccctgttttatctgtccctgacccactctttctctgtcaaaatatcctcatttatatactctctcctgtcatattggatgaatcatcagtaactctctttatgtattacatggttacttttcaagaggttcttcacagttgtttaatgttctttcatgaatcatctcccccttctttttgtatttggcagatgttcatattctttatctaaagaaaaaaatggttgaactctctgttccatagcgattgtcgttggcacaattaggaatgtcatgaggtgccctcatttcaataattgagtggttcaactatacagaacaaagacatgtagttaatatagagcataaggattgactaagtgtcatggcagttaaaagttgtgtgataaaacgcaaagtccactacaatacccttcaaaggaagccagatttctactttttgtgttaaaacccaatgataattgcttagaaatatgtacaaaagatgcagataaaattacaataactataaagttacaattgtcttcctaaatccttattttagtgtattaccacagcaaattagaagcaaatgaacactagaatcaggagcaaagggaaaacagaaacacaatgtgtcttcatgaccccaatcttaacttaccttatttcaattcttagatgcagtcactgtcagctacttgtactttggttcctgctggttataataatatgtgtgataatgtttctacttgttgacaaactaatttctaacagtataggtatttactccatagtatgaaaaccagccatattatgtttcatccccaggtatttcctaattttattacttataatcattttatagttgtaatttttgcttttattacattaaatggtatgagtatacctcattttaaatttttaccaagtttagaaaggaacttttgaccaatatgaaaaacgagaaaatcatcacacattcttactctcgcctcttctccacctcccatttcggattacattctgtttgcatcagtagtatttgtaacatttatatcagttctgtaaagataggtgtttttggcttgagtctgtaaattgaaaatacatcactcttcttatataaatgtaattaacattacagcaaaataatagaaacgaatgtttttaaacaattattattttgtagacaccgttctaggtaaaatattcaatcaagttccatgacgtagatgctgtcattttacccatctcacaaatagataaattgagtcatagagaggttacgtaatttacctaaaactgtttggctaacatgtggtagagctaggatttaaatttacactatcctaatcatggtgttgatttaattaaaaatctggtgatccttggttgcaagtcaataaattatggtccaggttaacattaaatgctgtgtgggtttccttcatagttggttagttttacaatttttatgcatttgaaagtcatagatatttaaaatgttaattaattttaatagtataaaagaattcaattcatttttaatgctagacgtgacctcaaaggccttttggttcaatgctttttgaatgagaatgccaaagctcaaataaattatatgacttagataagatatccacacactcagttggttagttagtggccaaggaaatggggaaggtaagacaagggaatacagcacgaatgcataagcaatgctcttttttctcatcatactcaatttaaccttgtatactatgccatagatgagaaaactagtttctcatatgttcccacctatgtcctttttttactcccattgcctacagaaaaaaatgaagataaggcagagtgcgcatagtgaacttaaaagtcccctaaatattctacaatttttaaatttttttatatatttttcataacaaaggcattatccaatttgtaaataagctagtttccataagcttgttagctgttaggggtattggaaaatatggagggattcgatttcctaataattgtaaaaattctggtgtattaactagagtagaagcaattaagaagaaaccaataaacctatacctttatttatgtatttttttgagacggagtctcgctctgttgcacaggctagagcgcagtgggccaaccttggctcactgcaacctccacttcccaggttcaagcgattctactgcctcagcctcctgagtagctgggactataggcacgagccaccatgccctgctaatttttgtatttttagtagtgtcggggttttaccatgttgtccaggctggtctcgaaatcctggcctcaggtgattgacccgtctcggcctcccaaagtgctgggagtataggcgggagccactgcgcctggccaattttgaattacagttttagaaaaataacagctaaactacctttgtaactttttttttgtttttttcgttattttgtttttttgtttttgcatagcatgagctcttaaacaggagtccattaatagattcaaatattctaaaactgtatgtagactctgttcacagatatggagagtttttttgtaggagtagaagtttcatagctctcaacagattctcaaaggtgtctgtgattcagaataggtgaagaaccacttgactaatgacttccagtgctgttgggataaattataatacgttaacagccaacaccttatgcaaactcagccagtttctttcttttaaacctatctcccaccacttgatacttagaatcttccaatggagccaggcctgtgaggtcttgattatctgagcatgttttgcttttttccttccctaagaactttaattctctaacgctcacacaacttagaattctattatcaatacattttttttaatgcaagtcgaaacgtctatttaatctgtctttcagcctcagaaaactttcttgaccgcttcagattttacaaaacattttcttattgtctgtgttttttcacatttagagtttaattaattcatatggcttcttcatttttcttgctcattaaatttaaaatccttataagacaagaactgcctcttacactcctttgcattttctctattatcaagtaacatggtatgtaagtttcatgtgctcatccattctctcgtgtagttgataaatatttgttgagcctttattttgtgtcaggctaggtttccagcagtgaacaaaataggcaataaaagattgtacattctagtggaagagaaagatacacagagaaatttaattaaattatataatacgttaaatagtaagtgttaatgagaatagtataaagcagataaggagaaagaaaataagtatatgtgagtttgatttgaggcatgcagttttctttcatttatctatttaggagactggttcttcctcagtcacccaggctggagtgcagtggtacaatcatggctcactatagccacccaggctcaagtgattctccaacctcagcctcctgagtagctgggaccacaggggcatgccagcacacttggctattttttttttttttttttaataagttgtagagaccaggtctcactatgtggttcaggttggtctctaactcctggcctcaagcaaatccttcagcctcagcctcccaaagtgcttggtttacaggtgtgagccaaggtgcctggccagcatgcaattttagatagggcttgggcagggaagaacttatcagtgatgtgattttcgagtaaagacccaatggaagtaaaggagtgagccatgtttatgtcttcgaaaagcgaattccaaatccaagtgcaggaaactatggatcctgtttatggaatatgaggaaagagacaagaaataaaatcagagagttaatagggacctggaccctgttggacttcgtagatcacatgaaatacgtaatttgtacttcccctaaagcagagatttgagaagacggatatgatgaaacatgttaacagatcactctggcaactctgctatgcactaattaacgcaggcaagagtgagagaagagttatgaggctattgtgataattcatgcaagataaaatggattttggactagagtgatggcagtgaggatagtcagaagcagtcaaattctgaatacattttgaattaaatgttgtgtgagagtaaaatagtcattaaggatgactccaagggtttttatctgagcaactgcaattttaaacacattgttcattattgaggaagggagaacagcaagaaaagtaggtaggtttgggggagtatgatgaggataaacatcagaagctcagttcaggacacttgaagcttgtgattactaaatggagataatgagtgtttagaagaatctataatttgaagtttagggaagaggtctgggttagacatataaaactgggcattaccagtaaatggctggtattgaaatccacgagactggatgagatagataaatttttgttgcttggataagctagcgtagattatttgtcatcttcaggattttcttttttccccacatctttattgctgtataattgacaaataaacgttgtatgtatttaaggtatacatcctcagcattcttttttgatacagggtctcactctgttgcccaggctagagtacagtggcacgattatggttcactgaaccctcaacctccctgggctcaggtgatcctcccacctcagccttctgagtagttggaactgtaggcatgtgacaccacacccagctagtttttctttctttctttctttctttctttttttttttttttttttttttttttggtagaaacaaggtttcaccaaattgtctaggctggtcttgaacttctgggctcaaaggatctgcccacctccgtctcccaaattgttgagattacaggcatgagccaccacacccaatgagatcttccattaaaattattacttgtttaaatagaaatattttaaagggtaaatgaattacactcaagacttaaggactatgggcattggttgtcaatgaaaattaagcatggaagtaaatctcatggaacattctagattgatttatatttgtctttgtgtatgtgtgtatgtgtatgtgttttaggccagacctatttgactggaatagtgtggtttgccagcagtcagccacacaacgactggaacatgcattcaacatcgccagatatcaattaggcatagagaaactactcgatcctgaaggttggtaaatttctggactaccactgcttttagtatggtagagtttaatgttttcatctgagacttgtcatttctacacaaaatacaaaactacatatcttaagttttccaatactgtagatatatttaaaatgttcagccttcttgcactatattatgaattgtcttatttaattctagttctcaaaataccagtatctaaaattgcagtgaagacttttaggaaaaaagcctttaaaatgtgtatgccctatggatggagcatactgcatttggagtgcattgactccaaataattataaaaagttaatgttttgcttatgctaccaagagatttgatagagtaatcagctataattaattagctactcttgccaatttcattcatatactctataaaaggcaacatggtttactatttaaatcaggaaatctattcctgccactacttctgttgtaatttttcactctggggagatcctctgttggatggttactcattttctgcttctttagttgataggcagaagtgtatttatatttttattacattacacttcaataactttgactcttatctctggtgctacatagtcataccttccagacgtagagattacagagataataacactgtgacctctactcttcttctagcctatgaagtacactttttgccatgccaattttgaaatggtagcctctgttctcaattctcaaggctttactacactctaaaatcaggagttggaaaagtgaaatcggtgggattgaagatgatatttgggtagaagctgttctacaatagaagctgataattaaatgcttttgggaatattaaatcgatttcatcaattccaaaacaggagatctttcaatatggatggtaggtcccatcaagaaaactcaaaaatgacccagaagacagccttttgccagtgaatttattatcaaccagaatctagtactcagttttgcagacgcagaagcctgattgcctcagatcatctagcagatccacattggggtgggaggagttaactttaagtttaaaaagtgatatataaataaaaatggaaattcagtaatcttaaatgagatataacaagcagcagaatattcacatacaattgacaaatatattgctcttgataagcacatgtacttgggaaagcaaattacaacaaaaatgttagtttgtgaagttgggatcagattaagttgacttgaaatgtttcttctcctttggataatgcatggctgaacactgaatactgtaacccctttttattgcttctatacacgatagtatccctcctacccctgtttttagctctaagggagaaactattaatcctacgtccttagtttgcagtataggggaggattactttactattgactcgtagtacacatttgtatgttttctcttagttcagtgaggtagaaagggcagacataatgaaaatacggacttcaacctctgaggataaagagctatactgtatgaatttgaaagataaggctgttaatatgtttgttttttattgaatcacatatggtcagttcccattattggggtgtatgctctagttattcttgtgtgtgtcctatcctttcataaaacagtaagagaagatttaaaaatagatatttttcttattaagtgacaaaatggcttttgacctctagtgctcctttgaacttacagaataggagtgcctaaatgggcatccacatcataatcagaaaataggtaaatatatacacctatgtatatatccacaaaaaatttaaatgaataaaaacaattttaaaaagtaggttgacgagcctgtaatcagaaaaaggcaggtacatgaatagtgtattttatagctaaaagagcctggtatacctaactccatatgctctcctaagtgggaagtatatgtagaaaggtacattgtatatcctataagatcaccattttactgtctcaaacttcaacaatttaaaatcaacaaaatgtaatatgaaatacaggctgattaatgaagatccagccactgcttatggtctcgttttcccaataaaatctcatatctgtaaagcctttctatatatagactcttccaattgaaagagcatcttatcgcttaaacaggtttcctgtttatttgcgtagaggtgtttgtagtattctctgatggtagtttgtatttctgtgggatcagtggtgatatcccctttatcattttttattgtgtctatttgattcttctctatttttctttattagtctatctagcagtctattttgttaatctcttcaaaaaaaaacacctcctggatttgttgatgtttttttttttttttttttttttttttaaatgtttccgtctccttcagttctgctctgatcttagttatttcttgtcttctgctagcttttgatttgcttgctctggcttctctagttctttcagttgtgatgttagggtgttgattttagatctttcccgctttctcctgtgggcatttagtgctgtaaatttccctctcaacactgctttagctgtgtcccagagattctggcacattgtatctttgttctcattggtttcaaagaacttctttatttctgtcagaattctgttatttacccagtagttattcagaagcagattgttagtttccatgtagttgtatggttttgagtgagtttcttaatcctgagttctaatttgtttgcactgtggtctgagaggttggttgttatgattttcattcttttgcatttgctgaggagtgttttacttctaattatgtgatcaattttagaataagtatgatgtggtgctgagaagaatgtatattctgttgatttggggtggagagttctgtagatgtctgtgaggtccacttggtccagagctgagttcaagtactgaacatccttgttaattttctgtctcgttgatctaatgttggcagtggggtgttaaagtctcccactattattgtttgggagtctgtctctatgtaggtctctaagaacttgctttatgaatctgggtgctcctgtattgggtgcatatatatttaggatagttaggacttcttattgcattgatccctttaccattatgtaatgcccttctttgtctttttttgttttttttaaatctttgttagtttaaagtctattttatcagagaatagaattgcaacccctgcttttattttttttgctttccatttgcttggtaaatattcctctatccttttattttgagcctatgtgtgtctttgcacgtgagattgctctcctgactacagcacaccatttggtcttgactcttcatccaatttgccagtctgtgtcttttaattggggcatttagcccatttacatttaaggttaatattgttatgtgtaaatttgatcctgtcattatgatgctagctggttattttgcttgttagttgatgcagtttcttcatggtgtcgatggtgtttacaatttggtatgcttctgcagtggctggtactggtttgtccttgccatatttagtgcttcctgaaggagctcttgtaagacaggcctggtggtgacaaaatctctcagcatttgctcgtctttaaagcattctatttctccttcgcttatgaagcttagtttgactggctatgaaattctgagttaaaaattattttaagaatgttgaatattggcccctactctcttctggcttgtagggtttctgcagaaagatctgctgttagtctgatgggcttccctttgtgggtaagccgacctttctctttgactgtcctgaacattttttccttcatttcaaccttggtgaatctgacaattatgtgtcttggggttgctctttttgaggagtatttttgtggatgttctctgtatttcctaaatttgaatggtgggctgtcttgctagtttgggaaagttcgccgggataatatcctgaagaatgttttcccaggtatactaatcaaacttaggttttgtcttttcacatagtcccatatttcgtggaggctttgttcattccttttcattcttttttctctaatcttgtcttcacactttatttcattaagttgatcttcaatctctgatatcttttcttctgctggatcgattgagctattgatacttgtgtatgcttcatgaagttgttgtgctgtgtttttcagttccatcaggtcatttattgttttgcctaaactggttattgtagttagcaactcctctaaccttttttcaaggttcttagcttccttccattgggttagaacatgctcctttagcttggaggagtttattacccaccttctgaagcctacttatgtcaattcgtcatactcattctccatccagttttgttctcttgtttggtgaggagttgtgatcctttggaggagaagaggtgttctgggttttggaattttcaccctttttgtgctggtttttcctcatctttgtggatttatctacctttgatctttgacattggtgaccttcagatggggtttctgagtggatgtcctttttgttgatgctattcctttctgttttagttttccttcaaacaggcccctctgctgcaggtttgctggagtttactggaggtccactctagaccctatttgcctgggtatcaccagcagagactgcagaacagcaaagattgctgcctgttccatcctctggaagcttcgtcccagaggggcacccaccagttgccagccagagctctcctgtatgatgtgtctgtcgacccctgctgggaggcatctcctaggcaggaggcacgggggtcagggccccacttgagaaggcaatctgtcccttagcagagctccagtgctgtgctgggagatctgctgctctcttcagagccggcaggcaagaacgtttagtctgctgatgctgcacccacagctgccccttccctcacgtgctctgtctcagggagatgggagttttatctgtaagccgctgactggggctgctgcctttctttcagagatgccctgcccagagaggaagaatctagagaggcagtctggctacagtggctttgctgagctacagtgggctctgcccagtttgaacttcccagcgactttgtttacactgtgagggaaaaccgcctactcaagcctcagtaatggcggacgcccctccctccaccaagctggagcctcaggtccacttcagactgctgtgctggcagcgagaattacaagccagtggatctcagcttgctgggctccgtgggcgttggatctgctgaacttgaccacttggctccctggtttcagccccctttccaggggagtgaacggttctgtctcgctggcgttccaggcaccactgggtattagactcccacacaataatagtgggagacttgaacacaccccactgtcaatattagacagatcaacgagacagaaaattaaaaaggatattcagtacttgagctcagctctggaccaagcagacctaatagacatctacagaactctccaccccaaatcaacagaatatacattcttctcagcaccacattgcacttattctaaaattgacgacataattggaagtaaaatactcctcagcaaatgcaaaagaatgaaaatcataacagcctctcagatcacagtgcaatctaattagaatgcgggattaagaaactcaaaagtgcacaactacatggaagctgaacaaacctgctcctgggtgactactgggtaaataatgaaattaaggcagaaataaataagttctttgaaaccaatgagaacaaacacacaatgtagcagaatctgtgggacacagctaaagaagtgtttagaagagggaaatttatagcactaaatgcccacaggagaaagtgggaaagatctataatcgacatcctaacatcacaattaaatgaactagagcagcaagagcaaacaaattcaaaagctatcagaagacaaataactaagagcagaactgaaggagatagagacacgaaaaacccttaaaaaaaaaaaactcaattcaggagctgtttttttgaaaagattaacaaaatagatggctagccagactaaaaaagaagaaaagagagaagaatcaaatagacacagtaaaaaatgataaaggggatatcaccactgatcccacagaaatacaaactaccatcagagaatactataaacatctccacgcaaataaactagaaaatctagaagaaatggaaaaattcctgtacatatacactcttccaagattaaaccaggaagaagtcaaatccctgaatagaacaataacaagttctgaaattgaggcagtaattaatagcctacaaaccaaaaaaagcccaggaccagacagattcacagccgaattctaccagaggtacaaagaggagctagtaccattccttctgaaactattccaaacaatagaaaaataaggactcctccctaactcattttatgaggccaacatcatcctgataccaaaacctggcagagacacaataaaaaaaatttcaggtcaatatccctgatgaacatcaatgtgaaaggctcaataaaatactggcaaaccgaatccagcagcacatcaaaaaggttatccaccatgatcaagttggcttcatccctgggatgcaagattagtttaacatacagaaaccaacaaacgtaatccatcacataaacagaaccaatgacaaaaaccacatgattatctcaatagatgcagaaaaggcctttgataaaattcactacccttcatgctaaaaattttcaataaactaggtattgatggaatgtgtctcaaaataagagctatttatgacatacccacagccaatatcatactgaatgggcaaaagctggaagcactccctttaaaaactggcacaagacaaaaattccctctctcatcactcctattcaacatagtattggaagttctggccagcacaatcaggcaggagaaagaaagggtattcaaattctctgtttgcagatgacatgattgtatatttagaaaaccccatcatctcagccgaaaatctccttaagctgataggcagtgtcaacaaagtctcaggatacaaaatcgatgtggaaaaataacaagcattcctatacaccgataataaacagccaaatcatgagtgaactcccatttacaattgctacaaggagaatagaattcctagcaatccaacttataagggatgtgaaggacctcttcaaggagaactacaaaccactgctcaaggaagtaagagaggacgcaaacaaatgaaaaaacattccatgcttatggataggaagaatcaatatcatgaaaatggccatactgcccgaagtaatttatagattcaatgttacctcattaagctacaattcactttcttcacagaattagaaaaaaactactttaaatttcatgtggaactaaaaaagagcctgcattgccaaaaccatcctaagcaaaaataacaaagctggaggcatcatgctaccttacttgaaactacactacaaggctacagtaaccaaaacagcatgatactggtaccagaacagatacatagacgaatggaacagaacagaggcctcagaaataacaccacacatctacaaccatctgatctttgacaaacctgccaaaaacaagcaatggggaaagcattccctatttaataaatgatgatgggaaaactggctagccatatgcagaagactgaaactggaccccttccttaccccttatacaaaaattaactcaagatggattaaagacttaaatgtaatacctaaaaccataaaaaccctagaagaaaacctaggcaatacctttcaggacataggcatgggcaaagacttcatgactgaaacaccaaaagcaatggcaagaaaagccaaaattgacaaatgagatcttactaaatagctcctgcacagcaaaagaaaactatcatcagagtgaacaggcagcctataggatgggagaaaatttttgcaatctatctatctgacaaagggctaatatccagaatctacaagaaacaaatttacaggaaaataaccccatcaaaaagtaggcaaagggtatgaacagacccttctcaaagaagacatttatgtggccaacaagtatgtgaaaaaaaagttcatcatcactggtcattagagaaatgaaaatcaaaaccacaatgagataccatctcatgctagttagaatggtgatcatcaaaaagtcaggaaacaacagatgctggagagaatatggagaaataggaatgattttacactgttgggagtgtaaattagttcaaacattgtggaagacagtgtggtgattgctcaaggatctagagccagaaataccatttgaccaagcaatcccatcactgggtatatacccaaaggattataaattattctgtgcttatttcagcactattcacaatagcaaagacttgaaaccaacccaaatgcccatcaatgatagactggataaagaaaatttggcacatatacaccatggaatactatgcagcaacaaaaaaggatgagtttcatgtcctttgcagggatgtggatgaagctggaaaacatcattctcagcaaactaacataggaacagaaaatcaaactcggcatgttctcactcataaatcggagttgaacaaccagaagacatggatgcagtggagcatcacacactggggccttttggggtgtgtggggctaggggagtgatagcattaggggaaatacctaacatagatgacggattggtacagcaaaccaccatggcatgtgtatacctatgtaacaaacctgcacgttctgcacatgtatcccaaaacttaaagtataataataaaaagtttcttaaagtttacttatggctgcaaataagatgaggattcagcataagtcatatatttttaaaatatgtcaattcttgccattgtgttagggaaaccaccaagtacacatttatacatttttgctcagcatttttcaggagataatctcaatgatgattcaaagaaaaaaataataactcataagaatttttatttactgactgcttagtcacaaaagacagaacaccatctcttgaagtctcagacttagaacactctcttcgatagatttaccagcaaaattcgtgattcatgcctgtatagtaattgcttttgtgatgttcatatttttatttaaccagatattggttctgtagcttatgcatgatgttggctactctccaaagaaatttcattttaaattagttatgccccttaggagaataatgaaacatttggggagaattttattattgggggattgaagctatatttggtttaagaaatacctgccaaataatgctttgacaattttaaacataagctttgttgatagaattgctttataaaattaggaagtcattgaaaccttgtaggatttcatatatagaatttgatatgctttggccttaactggtgttttgaggcctgaggtttagttttaagtggaattgccttttaaaatgagtagcagtaggcattagcataagcgatttcaggagctgtttctagtgtgtttagatgctaacatatgcaaaaataagtacatctagggtaaacttaataaattatgtatgtttatgctcatagataataggtatatctctttaaaaatatccttttgtgaatcagacaattctcttcccgttatgatttctctgtaagacagtacattctacatgcgttggtcgtgggtttcatatacattgtttctctgagtttcaaacagattggtttgtttgccagtccaaaaaaaaaaaaaaaatcctccctatattaagagagtgctttgtcagctttcccctgtgaataacaaagtgaggatgttctctttaaaggaataaaacaaaaaatcagggataaaagattgcgcctgttctagatgtcttttgaatattagtgtagaaagccatttccatttaggatatgaaatatgatatggaaatgttcttacttatttaccagggtaactttagaacaaaaatgaataatgacagtcaaatttgaccaaaaaaggaaggacactaggactcgagagaaatttttgtatcctcaaaatgacatttacaaacccgttagggtttggttttaatcccctttattttgacttcctgagaatggtgacacggattctattttctgcttggctaatccctgcatcactcttgagttgtttttatagccttcttttccaagaattagctctgcctgttggaaagttttactcctggagtgaatgctttcagacttggctttgtatgcatgcaggattttaacctacaaaaataatcatggaaagatacatagaatttgctataaaagagaagaatatttttaaggcctcttatgttgggtttgatatcaattggctgaacaagggctgttttaacttttttccgcctctgctgtaatcatcacattttgataccataatggcaagaaatgtttataagtttacacaggttaaaattgagagggttaattctcaggaggattagagttaatttaaataaataaatatttttgtgaacataaacactaattttatatcatttagattgatttttgtctagaactcattatagagtaccttgttttcagaaaatctaatgcgattgcaatattataggtgttccttctctatatacggtatttcaactagaaatccttactgtaaatatttcagacaatttagagtcaaactctgcagttgaaaatatatttaagaaaatatttaagaaaatatttcactggcacttacatgaatgaaaaatggccattgcctttttgatgacaaagtaatatataccaaataggtatgatacagatgattatattaacattcagatattattgtagcaatttcctcttccctgatgggaaatcttgaaattgctcttcatgacaaaaattaagacgtaaatgttatttcccagtggcctaaaagttagaagaggcatgagagtattccagtgtgttctcttgatgttatgtgttgtacatctttctcagttcagataccataaaaaaactgagtattttctgggcagttggaaccagtcactaataaatgaaagcaatttttgttctccttatccatttcagttgtttggatgacaaataattgcatgtaactgtcccaaattcacctacttagacaacagagacttgaaaaacattaaatatgatatttgtgtgtgcgggagcctggcttgaatttaccctttataacaaattttggtattttctactaatctttcacattcttctatgatttgtcaccattttaactttatggaaaatggtcaatttataatttctatctcccctaggggctgatttgttaaagtatgctttagttaagtaagagtttcttactcagttggggaatttaaataatgaagtataatcatgcgattgaagatgtgcattatggattaggttctatgccaaatttgttcagaaacatttaaatataattcttacctagataactgagaatctcttttcaattagcttaccaggattattttcacaactttttttttttaattacaggtgaaataacaatatccttggcctatacagtgacattaagtgatttttgaatgattgacaagacattaataaattaataatgagaaatgcagccatgaggttctaatgctaaataatatgtaatagacactttgtggatggttttcctagtcatatcatcacaatgagttcatgagactaaagaaatatattaaaaacatctattggtatttgttaattttatttcagctatgaaggaatacatgagatattaggtttgattcagaaaagtgttctatagttgatatctgtgtttcttgtcacagaattttgccttggcaaaaacattttgaccattctaatgatggtaaatgagaataaaatggcataagtagtttaaaattttctatgtggttttaagtcagtgataatatttgaatgtaatgtatattttgctgatagttggaaaacttacttcactgtcttcaaaatggagttaactgtgttttatacataattataagtgatatcacagggctgggtgtgatggctgacacctgtaatcccagcacattgggaggccaaggcaggagaattgctttaggccaggagttcaaggctgcggtgagctatgattgtgccactactctcaagcctaggcaaaagaactgaggccctgtccccccatcccacaaaaacaaacaaaaaaagacatcacagaacctgcaaatgaatatccaaaaaccttaaagctgggcactggaaaaatagatattaggttggtacatatgttttccaattaaataatttctatatataaaatgcatgtgacattttacagctggaacatgaaatataagatgaaaatatactattttacaacaatatttgggtaaaataatgatgaactaaagtctttgttgatgtcatttaaatcttataagagggaaatttaattgtcatacaataggatttattccttgcagagggaaacctgaagatttatagttgtcttgtcattttattttaaagcaataagctatcctcttagatttattctctttttagaacttttatttttattgatgcataacgttttacatatatgtacatacatgtgatattttgttaaacgcactgaatgtgtaatggtcaagtcagtgtatttggggtattcattactttgagtatttatcatttttatgttctgtgaacattttgagttctctcatctactttgaaatgtacatcatattgttgctaactctagtcacccctttctgctgttgaacattagaatatataccttccaactatatatttgtacccattaaataacccctttttatattcccttcctacccttcctagcctctggtatcttattatactctctatttccatgagaacaactttttttacacctatatatgagtaagaaaatgtaaaatctatttatctttgcctcgattgtctcacttaataacctgcagtttcattcatgttggtgcagaaaatgtaattcttttttatggatgaagagtattccactgtatatatgtaccacattttctttatccatttgttcactaatggacacttaagttgctattataaatagtgcctcaataagcatgcaagtacaggtatgccatgcatatacttttcctgatagttagaaaagtatatgattgctttccctttacatatatacttattagtggcattgctgacacatactctatttctatgtttagttttttgagaaatcttctccatactgttttcaatagtggctatactgacttatattctgaactacaacaatgtattaagagttcccttttcgttgcacctcgtcaacatctgttgttttcttgtctttttaataatagccattctaactggggcaagatgatggctcatcatgacttgatttgcatttccctaatgattagtgatgttgagcattttttcatatacccgttggtcatttgtcttcttttgagaaatacttattattgtcctttgtccatttttaatgtgattatttttttactgttaaattgtttgggatcctcgtatttcctagatattagtctcttgtctgaatagtttacaaatcttttctcccattcagcaggttgtctcttcactctgttgaatccttcctttgttttacagaagctctttcattttctacagtcccaattatctatttatgtttttgttgcctgcgcttttgaggtcataaccataaaatctttgcctagaccaaggtcctgtctgttttccctatgtttgcttcatgtagtttcagttttaggtcttacctttaaatccttaatccatcttgagctgaattttctaatatggtgagagacagggatccagtttcatacttctgcatctgacaatccaattctcagcaccatttgaagaaggtgtccttccccctaatgcatgttcttggtgcttttgtcaaaaacaagttgtatgtaaatacatggatttaattctgagttctctaatctattccattgttctatatgtctgtttttattctaacaccttgctgttttgtcaagtagtgtgattcataagtctttgttctttttgctcaggattgctttggctattcaggctctctgctggtctttgatcgtacaaattttatgatcactttttattccatttctgtattctgatagggactgcattattcaatgtagaatgctttgagtagaaagatcatgttaataacattaattcttctgaccgataaacatgggatgactttccatttgttggtgtactcttcaatttgttttgtcagtgttctgtattttatacggacctttccctcctgggctaaacttactcctaggtattatttccagccgttgtaaataggtttgccttcttgatttctttctcagccagttcattattggtatatagaaatgctactgaattgtgtatgttgatttttgtatcctgcaactttactaaatttatttatcagatctgagagctttctggtgagggtttagctttttctagctataagttattaacaaagagcagtacttggacaacgatttcttctattaggacgccttgtatttctttctcttgattgctctggctaggacctccagtactatgttgaatgagtggtgaaagtgggcatccttgtcttgttcttttttttgtttttggttttttgtttttgagatggagtcttgctctgttgcccaggctggagtacagtggcccaatcttggctcattgcaagctcagcctccagggttcatgccgttctcttgcctcagcctcccgagcagctgggaccacaggcatctgccaccatgcccggctaattttttgtatttttagtagagatggggtttcaccgtgttagccaggatgatctcgatctcctgatctattgatccacccacctctgcctcccaaagtgctgggattacaggcgtgagccaccacgcctgaccattccagttttatagggagaaatttttcagcttttccccattcagtttgatactacttgtagatttgtcatatatggtctttattttgttaattttttttgtatgcctagtttgttggagtttttatctcgaagggatgttaaattttatgaaatgttcttttgtgtctattgaaaggatcatgttttctgtttttcattctgtttgatgtaatatgtcatatttattgatttgtgtatgatgtatccttgtatcattgggataaattccacttgataatattacattttttatgttctattggattgctagcattttgtagagaatttctacatcagtgttcatcagggatgttgtcctgtattttttgttgcataattgtctgggtttggcatcagggtaatgctggcttcatagaatgagatagggggaattccttcctcttcaatttttcttggaacacttacaggagaattggtaaagtttggtagaattcagcagtaaagacatctggtcctggactgtcttcgttgggaaattttttaagattactgattcaagatcattactaattatagatctgttcagattttctatttcttcttgatccacggttggttgtatgtgtccgggaatttatacattcctctagatttttagtttattatttaatagttgttcagtatagtctctgaactttttatttctatggtatcagttgtaatgtctccgtcttcatttatgattttgagtcttttttttttcttggttagtctagcaagtgctttattttcatctttttaaaaatcaaacttctcatttcattgatactttgtattttttgctctctattttcttgagttttgctcaatttttaggattttcatccttctactaattctgggtttggtttgtttttttttctttgactagctccttgaagtactttgttagattgtttgaaatatttcaacatttttgatgtgagcatttttgctatatacatcccccttagcactgcttttgccatatcccgtaggtgttattatattttgatattcatttgtttcaataattttttgaaaacatttcctcaattttcttccttgacccaatggtcattcaggagtatgttgttcaatttccatgtttttgtacaggttccaaagtttctctttttgttatttccttgtgttttaagaagatattagatatgattttgattttttataaatttgttaagacatattctgtcataacatatggtctgtcctggagaatgttctgtgtgcttatgagaaaaaaatgtgtatgactgttgaaggaattgtcctataagtgtctgttaggactatttggtctaaggagcagtttcaagccaatgtttctttgttaattttttgtctaagtgatctaatgctgagagtggggtgttgaagtcctcagatattactgtatttgcatctagctctccctttagatctaatacttgctttatatatctgggagctctcgtgttgggtgtatgtatgtttagaatttttatatactcttgctaaacttatccctttatcattatataatgaccttattgtttgtttttactgtttttgactgaaagtctgttttatgtaagcatagctgctgcttctcccctttggcttcggtttgcataaaatatacttttccatccctttacttcaaatctatatgtgtctttacaggtgaaatgagtttattttaggcagaatatttttgggttatatattttttaatccattcagccagtttatgtcttttatgtggaatgtttaatcaatttacattcaacattattactgatatgtgagggcttatttctttcattttattgatttatggttgttttgaatattttttcttcatttttttccctcattatcattatagtgtgatggtattctttagtggtaacatttgagtaacttttcttgattttttttgtgtgtttgcactactagttgtttttatatttttatgtgttttcatgatggtagttgtcattctttcacttccaggtataggactcccttaaacctttcttgtaaggccagtatcatggtgataaatttccacagctttcactcgtctaggaactattttatttctccttgatttatgaaggctaccttggctgggtagagtatccttggctggtggttgttttctttcagcaagtttaatataacatctcattcttctctggcctgtaaggtttcttctgagaaattcactgttaatctgatggaggtttctttataagtgacaaggtgcttttctcttgctgtttttagaattctctttttgtctttggcttttgagagtttggctataatgtgtcatggacaagacatttttgaattgtatccctttttgagatctttcagcatcctgtatctggatgtctaaatctcttgctagacttgggaagatttcatctattattttgttaaatagggtttctaaacctttagtttctcctttaccttctaggacataaaaaatgcaagcatttcatggctttatggtgttgtatatgtcacataggctttgctcatttttttaaaattttttgttattttttgtttgagtaggttattttaaaagacctgttttcatgttctgagattcttctgttttatctagtctcctcttgagtctttgcctttgattctgaatgtatatagtagtatacttcctgtatgatttctttggatgtaaacagtatgaatggtgtctgtaacttcctcagtagcttagggtgcagttgttagcagaagctgtggtgaagttttgccggtgactgggacaccaagtggtccagtcttcaggccccagtggtggcatcagttggttgagcgtgcctgtcctcaggcctcagagctgtgtacattggcattgatgttagtgtgtccaggcaggctaaccctttggcttataggtggcttgcttggttgtcaggaaaagcataggtgggctgggtgggtacacaggttcccagcccaggggcagcaagcatggtgcgggtaatggcaatagtgggaggggggcaaccctctggaatgcaagcaatccatgatggtgttggtggtggatgcaacagattgggcaagccagttcctaggcctgcagatggtgcatgtaggttgacgccagctttggtggtagtggaagcttgagtgggcccaaattcaggccccaggaagactagtcagatgccaatggtggtaaactggggtgggagagccccaggtctctatacaaatttttatgtactgggggatttggaagagcagagctgggaagacctgtcctcaggactcctggtggtgcatgcaaccactggttattgtagtcgaggggcaaggtgctccccaggtcccttgtgcaatgctcaggtggaaggcagtgttggctacactgtggccctgctactggagagggtaaggttgctttccttgggagcagccataagcagttgcctgggtagcctgtgcgtcgcttgtgtctcaactccacagcagttcacagtgacagcatttgcaggcagtggaattagtcttcagtgtgcatgaagttgagtggccacccctctgttgggcaggggagggtttgctgccagtggttcctgccttggccccagcagttgcagccatgggtgggaaatatcactgagactccaggaatgtggagatagggaagatttttagtcctaggtcaggacatagactggtgggggctgggctctcaaaaccaggccatgttgcagctgcttaggactctagagtttgtggaacccagcatgggcttcttccgtgaagcaatgcctttgcacagtatctagacagctgtgtgttggtttgggggcccacacgggttgaagggctctcaattggctaggattgtaggaatcttgtacaagaatgtgtacctttgtgcatctctaattctctccccatgttagggagcctctccagactcctagccaatctcagctggatagagtgcctcatttccttctttttccttttagtggttttcattgcttctctgttgaatttcagtgttttctcttagttaatgtattcaaagtatgattatctacttggtactttggttcctctccatggaagaggtgagtaacagatccatcaattcagccattttgaagccccagattttttgtcttatggcaatcgtgtggagttagtggatcatatgatatccagttgaaaagtgagaaaactgttacaactattaaattattaggaattttatatattattacaatttaataaggtggttgaaaccagtgtttttacttttaggaaatatcctgtaatatcattcttgtgagatgttaatattgctgaataaacttttgcttcaaatcaaagcacatttttcccctgcaaagatttttctaatttatcatcagtgatataaactcaaatttgcaagttccttttggtagaagagtgcaaatgtttaagtagggcagtcatgttctagataatttccatactttatcttatgtcttgtacacaacaattccaggtaagtttatccttcttttataaatggaaaaactgaggcttagagagctttattaaaatcaagatcacacagccaatagataactgagctataatcaaatccagggtttatctcttcttaaagtccgtgttatttctcacaagactgtccaataaaatcggttggggaagctttatggcaacactgggattgaaactagtattttatttcactgaggacgggctgtgacatcagcaatttttagaagctcagtaagtgagagtatcctgcagctaagatagaaacaactacaatggaacaattgtttctgtgagatatgcccttttataggataagatccagaatctgttgtcccagcatttgtttagacttctagcattttcttccttaaaaaatgactaagcctgctgttcacatcttcaattactggagtactgcttattgctaacagttctgttaatgagaaattgttcatccacagacaaagtaaaaatagactagctgtcacataagactggccatcaaaacattctctttaggattaagaaacttgccttatctcctgtctgcacagttgtctctcttcattccttcttctatttattgcttcacggacatgtttgtgatagaatggtactctgactcaaacagtttccagcaagggttgcccaggtgagaggagctgtttgcagaggtgatccctgactctttgttctttaatttatttcttcttttgcctgcctctctcatcttgttactaattgacatcactgtgttctgctatctgaggtttgttgatgccttttgcagccaataaaaatgtctttcattggcagagctgataaagaactagaagaatttttaataataactaagggctaataagggaaaacaattaaaatgatggtaaaataatagttttcaaattagaagtctgatcccataaatccacttgaaataagcaaatggcttaattttatgatctctgatattaatgccataaataggttgaatttatttaccatttatccagggttagttttgctaaacagtttgtattttagccagatatgcaacttttactgacaggacataatgaactttggagcctgcactgttagtgtagttgtaaggagataaaattggcaattatactcacagatggaatagaatttaatctatgacatttacttagctgtacagaaggatacaaggcaggagatacactgtcatagaatctttgtatcattggatggcccagaagcaaccaacatacagatttccacatgcctctcacccaaatgtgctccatatagctgctaggacaacggccaaaatcagtgtggtttacttgacatgaagaaattgcagcattaatttcccaccaatatttaataccattgttgtcacataggacaaaagactatatattgcctctctgccccactccccagttaatttaatagtagtcctacctagcaaacaagagtgacaagaaattctactattatcttaactcttaatcctaagaaaataagtttctatgttcattttcctaggcagcatcagattaacctagggttgatttaactttttctacacagagccaactagttttgggttaaaatctgatttttgcctttattagttttaggccactggaaaattattgaggctcagtattgctcacgtgtaaagtaaaaatatttacctcccactgctacttcaaggagtaagtaaaacctgtatgtatttggcccgtaatatgagcccagaaacagtagctaaagttatgtcaaataactggaatgttgtaaaaattaaatggtccctttatactcctgtagggaaaactgatctttccagttattttgcctgcctctagaataaatgctgactctccccaaattaaatacaggagtcctcccttattcattacagtttctgctacccatggtcaaccgtggtccttaaattgatgagtacagtacaattagatgatggtggggagggtgggcagggagaggtgagagtccacattcacgtaacttttattactgcatattgctataattgttctattagttattaatctttttctgtgcctaatttataagttaaattttatcataggtatgtatatgtatgggaaaaacagtatatatagggcctatttgtggtttcagacatctgctgtaggtcttggaacatatcccccgtggaaaagggggatctactgtcatttcccatttgaaatcttgctggtcttcctgtgaccttcccactcattctggttttctggtctgaggaatactgctggctcacagctggtgtactgggtggtaatctttgatatccttgagctccagagtctaatctagttttcataaaagatttatactatatcttaaattcctcagagtggttctctctctctttctctctctctctctctctctctctcacacacacacacacacacacacacacacacacacttgacagagagattgattcacagttgtcatggatacatggtagatttctagcaagtctcctgaaggctggttcatgatagtaccttataattgtcatagtatttgtaagacattagttagcacacttgcaaaagtataactaggttttctcttgtagtcattacgtcatatgacatcgtaaaagtggttgaattggttcccagactctcagaaaaactcaacttctgaagctgggagtaatacatacatagtaatattgatgtaatctggtgtgatatttattaaacattaagtgctgggcacattgcttgatattgtataatttcgttttatttctgcaaaaactctaggaggtagagactattattttggtcatttgcaactgaagagtttatgtaaattgcccacatcactcagctagtgagttggagttaagattccctacttgtaactactacagaatataatcttatggcagaatattcctctcttcttccatgaatattttctttgcattaactaaaaggttactcattttattacagggctaattgggtttgtttttaattggatgcacatccatcagttgattccaaatgttttgaaaataaatggaaaagttttataaactagagccagaataagagggatactgaattctttttactatgatgtttccttgagagaatcattaaataattaaagtagaaggatgtttacaaatcttgcaagtatgacattctatccaagccacactaaagttatcaaagggagacactcaccagttatgaaaatattcccctctactctttctcagttaactctaaaattagatggcaaaggcatcaaaacatctcactatctcaaatatttcctcagtgaggtcgtgatgtgaacatctcttatctagattgaaatcccaccttgagtcatatgtggattaaaaaaaaaagctattatctgagaaagtctaaataaaaagatacattttacctaggctttaatatctaagtttttctgtatagaatcagttgggcaagtgagtctcttggaaaagtgatttgaaaactgtttttattaataattggaatacacacacacacacacacacacacacacacacacactcttattcctcctcaagaggcaagagtacatggtgaagcccttaataaattcacctcactgtagttaaacagcagactatgatattgttgtagttgttaatcaaagggactctgaaaagagacagccagaagtggggaaaaaactagtatagaaaaataacgattgggcatttgagtatttggaaaaaacctggtgaagtaactaggttttaaaagactgaagagaaagacaaatttcacccattgcaaaatataacaacgatataaaaatgagacataagctcctggataaaaataaataatgtatttttttctctctattatatctcgaattttgctttcaccaacaaactgcatgtgaaatacgaaaaaagttaaaaaatatggaatattaagggactataagatgagaaatttttaaattgttataacctaagtaaaactgctaaagctagttgtagcgagatctgtcttacataaattttccattaaatgataatatctttgcattcatcataaacagaaatgtacattttaagcaaaatcattataatagaaatgataatactccttacctagccttcttcacgttaatcttaacatagactagtgaagaacatagcaaaggtagtgcttgaaggaatgttcttattgaaagaaatctttcctcagattgatcaagaggcattgaataatcataataattcaaactttaatcttgcagatggaatgaaaatgtttaaaattagaattattgtcagagcttaaatattgttacttacacaagccaaatacattaatattatgagcactattgttttagctaatgtgtcttttactctgcagagtacatatagactagtctaaaaggttttttttttttaatgcttttatagagcacgagcatttgtgcaggtggctgagtagactaagattttttccaatgggttgatttgaccacatcattaataaagtagaaattctggagcccctactttttattcttagtctgacattgtaaattctttcagatgctacataagcattttaaagttatgtgccccaggcttactttgttcagtagaaatgcatgttaattcatcaaatgtctattgataactttacataaggaatagtgctatatactccaagtgtgtcaggaagtaaaagatatacagtctgccaaggtattgaaaattgcatataggccaacaaacaatatataggtaactgttatataagacagaatgtgaactaattcagagaatattttttaaagtacagagcatgtttttcattctaataaatgtacaaatatttatgtcaaatgaaaatgtggctgcatcataattcttatatgggattttaaatataccaaaatccacggatccatacagtagttcttactctgcttccctaattttattagttggacataaatgcataaatcgataagatgattttggagcgggaacctaactttttctatagttccttggaagttaattgatttcttaagtgataaagtccaccactattttgagtaaggtttagttaatgatttctgtttaacatgtgtgatttctaataaaaagttctggatttattttctcttgttgaaagttgttcattagaactgacacctgagctaacataagcaaaagtcattgtaagtccacacgtttgcacagatgggtgtccccccaccatccttaggtttgagcaatggatttttacaagtgaaactcagtgcaattaatcacctccaacatgagaaaatgctctttaaactattttaagtcaacatttacaagagaaattggcctataatacacctcgggttcttaacctttttgagagctatagaaacgctgcttctctataaaggtaacatatattgccaataaaatacataagggaggacatctacttataaaactcagaaaacgatttaataggaacagttgttttattagccttctgctctttaatggctgagatcatcctggggctatttaaaaatgatttaatttgtcctctaaacacacagatgagttccaggtgtgtatttcccccccccacccccgctccatgaatcaaccatgtctgcactgacattaatagcttggatcgggaaatctctgtaataataaatctatcttttaagttggtcatttaagcagctttaagtatgaaaaaagtgaagtattagaactatttcaatccatgatgccttatagattatactttaagaatacgactgtgcctcactatctgagaactggttctaggaactccagatactaaaatctgtggatgcttaagttccttatataaatgatgtcatatttgcatataacctatgcacatcctcctgtttacattaaattatctctagattacttataatacctaatacaatataaatagtacgtaaatagttgttacattttattctttgtgtttaatttctaggttcagggttacacatgcatttttgttatatagataaattatgtgttacaggggctctgagtacagattactttgtcacccaggtaataagcatagtacccaacagggagatttctatcctgttaatttttattgtatttcctgaatatttttttatttgggaaacaatttattttttttggaaatttttgtgggtacatactaggggtgtgtgtgtatatatatggtatatatgtgtatatatatgtgtgtatatatataccatatatgtgtatatatatgtgtgtatatatataccatatatgtgtacatatatgtgtgtatatatggtgtatatataccatatatgtgtatatacgtatatacacatatgtgtatatacgtatacacgtatatacacatatgtgtatatgtatacatatatggtatatatgtgtgtatatgccatatatctatatatatggtatatatatatacatatatgtatatacatatggtgtgtgtgtatatatacaccatatatgtatatgtgtgtgtatatatacaccatatatgtatatgtgtgtgtatatatataaacacaccatatatgtatatatacgtgtgtgtgtatatatacacacaccatataggtatatatatgtgtgtgtgtatgtgtgtgtgtatataatttttgtgggtacatggggtgtttgtgtatatatgatatatatgtgtatatgtatatatatacgtgtgtgtgtatatatatatggtacgtgagatgttttgatagaggcatacaatatggaataagcacgtcatgagaatagcatgtcacctcaagcatttatcctttgagttataaactaattacactcttgaagttattttcaaatgcacaattattgactatattcaccctattgtatcaaatcagaggttatttgaatttgcagatacagaacccgcagatacggagggcccactgtatatcactaaatcattcatacctctccacctgtacaaccaccaccatagttcaagttattctcatctttttctgtgactgcaggaagaacttgacaatgactggccctattttctttctggatttaacttaattctcttttacacacaatcatctagcatgatatttacatagtttaaggccttagcacttgctgttccaactccctgggatgttgttcttccactctgcatttcacagctgaaccccagaaagattatgtcctttgttgatttaacccttctcagaatagcatgtgtctctgttactgcatacatattgaaactattcttagttttttgttttgttttgtgcttatgttatcacatactatacacaccaagtctgtaggctgtttttttgatattctagtgatttttaatgataatatttaatacatatatgagaaaagaacctttttaatgttaagggagagcatgatctgtgaaattatctgtctttaatttatctttggaaatgaacatttttcaaagttttcattagattgtattcaaaattggtttttattctaaaaaattaccatgttactatttcatatttaaatgcaactaggattagacaagcaacaataataatttttttcttacctgggagcctacatgaatactgagtgtattaagatatcaactgagatatcttgctatcttagtttgaggagaataccatatatttggggaaatagagagaaagtggagtgaacatgtaatttatgtctcttaaaggtgactcaaatgttctttatctgtatcttaaaatctttagtgagcattcttccttatgtttaggctagttttctctctgagataggtaaagtaagctactttgccttagtatgcggatgtatgtgtgtgcacgtactcatgtgcccatcttgtcaatacatggagagatggaataagacgaatgtagtatgtctggggtagaaatttggttgcaggagagaggctgacacattcacaagcagcagcaagggaagagggattactggagtagaggcaagggagaatttatttacttaattacataatacttatttagaatctacagtgttcccggtatattgagttatatatgagaatgcaagaaaatgacatcactagtttaaagatacaatgtcttctgtttttcaaatgtttcgttgattttgttttattcaatactgtttagtacaatattaacagagtaaacaacagtatgagtccttctcatgtttcactttgattgtatcattgatatttaatccaacgtaaaattcctaaccttcaaaaaataattctcacttaatgttccagtggagtttgttcccaccatagtactgctggcctatcacaatgctgtaggtagttgtagacttgttcagtcctgttattggtggtgacttcctcatgtgctgggacctttattattcacagctgaattcccagagcataagagtgccttttttttttttttttttctttttttgagacagaggctcgctccgtcgcccaggctggagtgcagtggcgcgatctcggctcactgcaagctccgcctcccgggttcacgctattctcctgcctcagcctcccgagtagctgggactacaggcgcctgccaccatgcccggctaatttttttattttttatttttttttattttttttttatttttagtagagacggggtttcactgtgttagccaggatggtctcgatctcctgacctcgtgatctgcccgcctcggcctctgaaagtgcgagtgcctgttttttaatgtacaacaaatgtttcttgaagacacggcttttacattagcatattacatgaaagtgtgagggtcattaatatgtgtgaagaccagttaggattttaaagttctgatcagatacgttatcaagctgatagattaaattaactgattaatccaaggaattaacattaacaagcaatgaaatggtcagtatccaagtattgaagttgtatttgggttttacctaatattttccttgatcttactggctactttgttgtctaagctgaagaaaggccttcctgattacctttatttaaataaaataacagtggtgaaggtaatttcaaaaaatattaactatgctaaaacatatacctgtggtttgatatacaagaagctgcagaaggttctcagaaatatgtaaaacaatttattcccaaggtaattgataattgtatgcattcttacagaataagctgttataaaatttcaaactttatctaaaactcaatagcacgtctcataaaatgaactaaatagttctgtcgggcataagaatgtcggcttctagtatagaattccatgtatggtacaaaagttgtagagagattgtgtaattgctacattcatcgtataattttagaaaaatcctcttggtaatttatatggtaaaaattgactgttacaattagaaacataaggcatattttgtctcaatggattttattgagtatgctaaagcaatacacactacatatcgggtaagtgtgtgtactatgaggggagaagtatatggatacacagatcatgatttctatgtaaaatttatatcaggcttgtatgggagaagatacatgacaagttaaaatataaaatgaccacataattaaagtataatttaaattgggattattataatttaaatattttcccaagaatatcttgaatagtaatctttaaaatttttctttttttgatttttttattatacttttagggtacatgtgcataacgtgcaggtttgttacatatgtatacatgtgccatgttggtgtgctgcacccattagctcgtcatttaacattaggtatatctcctaatgctatccctcccccatacccccaccccaccccaccccaccccaccacaggccgtatgcagccataaaaaaggatgagttcatgtcctttgtagggacatggatgaagctggaaaccatcattctcagcaaactatcgcaaggataaaaaaccaaacaccgcatgttctcactcataggtgggaattgaacaatgagaacacatggacacaggaagggggaacatctgtaaaatctaaaaataatttagtttcaaaagataactttaaaaatgtctaaatgctagtggtaaaaattaaatatgtagatgatttattaaacattttaaaaacctcatgaaaaagggaatgtgcgacaaaagactaatttgcagctatcaaaaaataggaacagaaaaaatgtgctagcatattaatataaatattaggtgtcattgtgtgtccgagcaacattgttatcagttcccatctagtaatgactctctgtgtgtgtgcagtaaaatcaataataaaggggatgaataggacgactttcatttgaaactaaatctcttggaattgtgtgagctactgtgccacctatcagtggaatgatgaaataattcatacatgaacaattagcttaaataatcagcttaatttagtcaaatttattacaggcaccagtttacaaaaataattggtgcccaagatatttaatacttgggaataccagaattagagtatatcggagacaaagtgaaatctggatactcaatatgatacgacttttttgtttaaacctgcatatttaaactctcctttggtagttggatgctggctccccaaggatactcatgtcgaaatccctagaacctgtgagtatagtacatgatacatgacacaggggaattaaggttgttaattagctgatcttaaaatagggagggagattaacctggattacctgagtgcacactatgtagtcaccggaatgcttaaaaatgaaagaggcacaagagtaggcctgagtgatataatttgagaaagactatacctactgttgttcgctttgaagaatggaggaagaccaggggttaaggaatattggaggtctataaaagctagaaaagggaaagaaacatgatctcttctagaatttccagaaaggaacaaagccctgctgttgcttgagtttagtctaataagactcatgtcagatgtctaacctactcagctgtaagataaaacatttgtcttgttttaagccattaagattttgggaatatgttacaacagtaattgaatactactgcactctctgtagttttttttctgttcagtttcttagctctggtctgttgtacttggctgttcagctttggggcctgacaaactgccctcaatggtagaagtccagcagtgctcatttctatagggttcgggacttgaatcacaaaaggcacgaagggaaaaactttttccctcaccctagacgaaagtccatattttttttttttttttttgcgaggatctgacattttaaaagatgtttagcagtagaaatccctactgttttcagggaatattatcctctacgcttcttacctggcacagtcatgggacaattacatcaacacacaatactttgtcctatatattctgtattatttttaattaacagcatcaactgacaaatctatgttgaaccatatgaagcccaggtctcacctacagtctcttttccagtaatattcagacatatatcagttttttagaattcttgctgggattgcttcttgtatggttaaatgaatgtgctcatgtgcatgggtatataattatgtgcatgcacacatggacgtgcgcacactgctggacatccaaaattgagcagcgatgtgcacagggcataagaatgtatacttgatacttaaaaggatttctaaaatttttacacagtaactgttgccatccttaagatagctctttccttaagtatgcaaaaacagttgggctgtttcaaatgcttatggaagcatctgaaatttccttgcagaagaatgtctttgttttaaatttacatgtctaaataccaattggaaaggtaaagatttgctcaatagaaaggagtaatctgttaaaagtttaaaaaataccgatttcttttggaaaactgcgaagtcctgaattcagaggtcttattcttgtttattctaatcaccccatctgaaggaagcataactttccccaatgactgaaataataacagtaagaatgagaatacatggaaaatgatattaaattcttaccataaacaatcttaaaatttttgctttgaggttaagttttctgagaaattccatacttgcttaaaatatgtttttacaaagtaataactgccattattatttacaacacattaagtactatcctagttatttcaattgcatcctcccattaatttcctagcttggtaggattccccccccaaccagaaaccaaacttaaaaactaggaacttccagtccagtctgtatccctagatgtaagattctgacctggataaattgataatgctgcgaaacaaagtgacctagaaatccagctaatcttatcagtgctcgtttttaattgagaaaatctaattactcagataattgtggagcgtgttgcatactcttaattactgtaaaaacaaaaaaaaaagacaaatttatgctgctatataggcctcacgccctataaaactggatatacttttttatgacccatttagcttcattcattttatcagtgcatagaatgcagtatgttttccttatttcatactattttgttttactttttgtaaccataaaacatcagctttcatgcacaagcatatttttggttggatgagtttgtttaattaattaagcatttgagaacatcagtggtttagttttgaggtgtcacaaatagaaaaacttagggaaaatttctcattgtattggaaacaatttattctgcattaataagttgatataatttggctctgtgtcccctacccaagtctcatctcaaattgtaatccccacgtgtagagggagggtcctggtgggaggtgattggatcagggaggcggttgtccccatgctcttcttgtgatagtgtgtgaatgctcatgtgatctgatggtttaaaagtatttgacagccttccccccgaccccactgccctgtgaagaaggtacttgcttccccttcaccttccaccatgattgtaagtttcctgggggcctccccacccatgtagaactgtgagtctattaatcctcttttacttataaattacccaaccacaggtactctttataacagtgtgaaaacagactaaaacagaaaattggtgcccagatagtggggcattgctataaatatagcaattatagaagtgactttggaactgggtaactggcagaggttggaacaatttggggggggggtcagaagaagacagaaagatgagggagagtttggaatttcccagagacttgttgaatggctttgaccacaatgttgatagtgatacggacaatgaagtccaggctgagatagtctcagatggagatgaggaacttgttgggaactggagtaaaagtgactcttgctatgctttagcaaagagattggtggcattttgccccttccctagacatctgtggaactttgaacttgagagatgatttagggtatctggcagaaatctgtaagcagcaaggcattcaagatgtgacttgactttttctgaaaacatacggttatatgcgttcacagagagattatctgaaatgggaacttttctttaaaaggaaagcagagcataaaagtttggaaaatttgcagcctgtccatgcggcagaaaagaaaaacccattttctagggagtaagtcaagcctgctgcagaaatttgcataagtaaagagaagcagaatgttagtagccaagacaatggggaaaacgtcttcagggtatgtcagagacctttgtgccagccccttccatcacaggcccagaggcctagaagggaaaaatggtttggtgggccaggcccaaggccccactgctctgtgcagccttgggacctggcttcctgtgtcctagctgcttcagctccagccttggctaaaaggggccaaggtacatcttgcaccattgcttcagagggtgcaagccccaagccttggcagcttccatgtggtgttctgcctacggctgtgcagaaggcaagaaatgaggtttgggaacctctgcctagatgtctagaggatgtatggaaacacctggatgttcaggtagaagtctgctgcaggggcggagtcctcatggagaacctctactagggcaatgcaggggggaaatgtggggttggagcccttccccccaccacagagtcctcactggggcactgcctagtggagccatgagaagaggcccaccatctagaccccagaatggtagatccactgacaacttgcaccatgcacttagaaaagctgcaggcactgtgaaagccatgggggctgtgctctgcagagccacaggcgtggagctgtccaaggtcatgggagcccaccccttgcatcagcctgccctggatatgagacatggagtcaaggcagatttgggagctttaagatttaacgattgcctggctgcatttcaaacttgcgtgggacctgtgtctactttgctttgaccagtttcccccatttagaatggaaacatttacccaatacttatacctgcattgtaccttggaagtaactagcttgcttttggttttacaggcttgtaggcagagagaacttgccttgtctcagatgaaactttggacttggaattttgacttaatgccgaaatgagttaagactttgcgagactgttgggaaggcatgactgtgttttgaaatgtgatgacatgaggcttgggaggggccgggagcagaatgatatggtttggctatgtgtacccacccaaattttgtctcaaattgtaatccccacgtgtcaagggagggaactggtgggatattggatcatttgggggatgggggatgggtggttcccctatgctgcactcatgatagttctcacaagttctgatggtttaagtgtctggctgttccctgccccctcctgccacctagtgaagagagtgcttgcttcccctttgcctttcaccatgattttaactttcctgaggcttccccagccatgcggaactgtgaatcaattaaacctctttctttctaaattacccagtctcaggtattccttatggcagtgtgaaaatggactaatacataagtatactaagtgatagaactacctagaaagaataaatccagattaacttaagatgctcttggaatcagtgtttcagtgtaattgactgtggacttaaacagctttaatggagaagttgcatcttacgaattgtttctttccctccggtcttagtcccattacttgaaagaaggggtacttggtaaatgttgattacgttattaaaaatattttaacttatttttagtaaaattgaataactctcttatattacaatcgtggaacccttgccctttagcaggccatttctcctaaggaatttcagacatccctaatcttaacatctttatataatgtacatactgttgtgcgagtgtatctttctaggggcccatttatcttaaaccgactttcctatgttcctatcatttaatgtgtttttccattggtaatgatatatttcttctgttccaggatgggccagatatcagatatcacacattgcaagtgtaaactaaagcccagagcagaaattcaaatggaattaaagtataaataaaaatataggtcagacagaatatggataggttgtaggaatagatcagatgccagatgtagattttaaaaaacatgttcagaaaatatagtattgaaaactaagaaagagcactccagaggagctttaaaaaaggagagcgagagaaagaaaaataatagaaaataaaactggaggacattgttaagtgaaatcaaccaggcacagagacacaaatattgcaagttctcactcatatgtgggagctaaagtaaattgaactcatggagatagagagtgggatgatggttaccagatgctgagaagggtaagtggggaggacaggataaggagggagtggtaaataggtaaaaaaaaaaaaaaaaataaaaagtatatagttagatagaaggaatcagatctagtgtttggtagcaccctagagtgattatagttaccaataatttatatttcaaaataatagttaaattggaatttagctaacataaatgataaatgcttgaggtgatggatgccctaatttccctgatttatcattacatgttgtattcatgtatcaaaatatcccatgcaccccaaatgtacaactattatgtagtcataataactaaaataattaacgaaaatgaacctcatctaataattggacatttctctcgctagctataaataccaggctttcagtcagctctacttttagtttatgaatgaataccatagaaacacctgtaatgtcctccagtcaaaggtgttgatcacccaaagctgagcttgttaaatttacagggaaagggtaagcaccaccttcagggaatagtcatagcctctcagaagaggagcatgacggaaggatacttaagagttttacacgctgagctggatggttctaagtatgctctcgacagattggtcagaattagcttaccagatgagttgctgtgacagtctgtggtgttatcttggaacacatgagtttgcccgagtttctgtaaatctacttgagcttaaacaatttgatatgtttattttccccaaacgattttatgttagccatcacgggtaattatgcttggcataagggactcttgcttgatataggggggagtctgttgtatccgagttcttagatcatcctatattacatcctatattaactctttaggatacagggattgattagggagtgatatattagttcacttacatagggagaaatgatcaactcagaatatttttgtccctttaaaacgtctacctctatgtaagagtaaagagcataggctcttgagctgcactgtctttgaatcctagctctgctacctaccagatgtgtgaccttaaaaactttacacaagcaattagttcgtcagtttcctcatttgtgcaatgtggttaataataaatgggttaatgtatgttaaatacttcatatagtacagagtaaagactagttattgtaactcatgctattgctgatttttaaatgatgtttattttaattcaattgctgttcccccttgtaaacgtagaaagaaaaggttaggaaagggagatgtagaattctactaacaatgacttatattagtagttgggccaataggccctccaaaggagattcatcttgtgggatgtaagtgcatatagtagaatatgtcatgaattaataacggcattcaaaaatgaagcaaagacctgtttaaatgacctcagggagaaatcagaaacttttacagcagtatctgctttaggaaatagctagtgatttaccatttcaaattatgaatggccaaccaatgccctcatcagttaggcattgacagcccattcttctagttctatcttcttctgtaccggtttcaggtgtttccttctattactccttgaattggctatggcatagtcagagtatcaaaatcactggcttagttaggacctcctagtgctctatataaatatattggtatttttatctttttgacttggaatggtttcatttaacatgtaagatacttagatgttgagcccatccttgagaagaataatgtataaacctcaaagataaaacaaaatcctctcattcttgatcagtgcttttagtttgagcatgtcacttggattactgtgtctctggctctagcattaaaatagtcaacctctgaaatagcaaaagtggtacagaaactcgtatattttggagagtcatcacagggaatactatttagttatatttaaccaattgttgttatgcatctttcaggggtgagacactgaaaatattgcaaagacataatcacagcccttgatataatagtagtttgaaaaaagccgtattggggcacagaaggagtagtggcagagtgtgtgtgtgtgtgtgtgtgtattaacaaaatgggattagggaatttgtcaatgatgagatgacatttatgttttcacttgctgaaaactttagaaatctacttagtttgctaggtttgtagtggcttctgttttcatctgtagtagttacaccttaagtgtgacaaactttcatttacttaatcagtttcagtctttctaaggctggcatgatcactaaatgagaatagactcatcttaattttcacatggcttcaaaattatagaaatattaatccttccaaaaaatgtttagatgtagtccaaaagatttgtctgtggtctctgaaaagtgtttcactggagataaagctaatccagtttaaagtaactttgtaatcaaaattaatattgcatgcgctaatcataggctctccatgccttcacttctagtcagatccaggctcattgggagtcaagtgccagagaggtcctgcctcaggacctttgtacttgctgatcctttaatatggaaatgtgttttctccagagagtcatcacaggattcaactgcttatttcattcaactctatttttaaatgttcctgtagttgaaaggctttccctctctaaatcctctcttaagtagagccaacctctccatgccttttgttccctctctttaccttgctctatttttctttataggacttgccatgacctgattttgtgtagcatatttatttgtccttatttttatttctagtcctagaatttaagcttcataagttaaggactttgtacattttattcactgctatatctcctggtcctaaaacagtaggaacttaaatgtttaatgaaaaacataaatgaatgattaaattactaatagaatctgtattccctctccaaatgtacatttggtattgtactaatgtatataattttatgcaactcataaagtaatcgacatatttatattgctttcaaaattagcgccctcaaatacatttaggttagaaaaactaaaattaatacatcaattgatcatcaagcatagaaaaggaactccaagaacacgtaaacattttacatctaaggtcttactatacttttggtattaatgtatattgtattaaatcattgtaaatgtagttttctattccgaatagcaatactagaggaatttactttaaattctacattctctgctggatgatcccccaaaactgctgcccagataattacagttccctctcttagcttgtcttccagtctctaatttcctcctactttaaatcattgttcacatgccaccacaattagtgtttgaagatgacaggtctaagcatgtcattctcttgttaatacaaccccatgttctttctaaacaaaatccggctttctatgcctgccttttattgcttcccaccatgtgttctgtacccattcttaaactaaccttcagttacaccaaccttgggaatacatgttcctgaaccacaaaagggtttcctccatgtttttatcttacagaagtcacttaccttagtacttcatgcatagtctgtactaagtaagggtttattggtgatgactatgtgttcaatcttttaaaaactttgccactgtcctagaacttaaagatgactattccatgaagctggtttatatttcaaagataaaatgtcatatttattataagcctcctgtttttttttttttctggtttttcctggatagtaatgtttactcaatttactaataaaactagaatatatcacttggctataagctgtagtaccacagaatttgaggtgacacagaaaaattattcatctgctcttatatctttccaagggcatgattagtcttgatggcctggtgcaactgaattctattaattcttatttaaatcatcagaaacaaagtgtgatctcgtgtcactgaattagctaaacaaccttgctgctttaacacataagtgccaaaatagaaaggagcttaaaacaatagtttatatgtagcccaggtataagtccaatgtaggtgttccttattggtgactgatatggtttggctgtgtccccacccaaattgcatcttgaattcccacgtgttctgggagtggcccagtgggaggtaattgaatcatgggggcaggtctttcccgtgctgttttcttgatagtggtaagtctcgtgagatctgatggcttcataagggggagactccttgcacaagttaccttctcgtctgccaccatgtgagacatgcctttcgcattctgccatgattgtgaggccaccccagccacgtggaaccgtaaatgaattaaacgtctttcttttgtaaatcgtccagtctcggcaggtatttatcagcagtgtgaaaatggactaattacagtgactaatatttttctatatttttctgcctttgttgtggctctaccttcttcacagatgatgatgttttttgtttttttgttttttcatatagccattgaagagggggaagcaaatacagaaaagccacagtgacttcttagaagccttgtggtagaggtgatgcatatgtgctcccttcactttccacatgaaggggatgtgtgctcatgaaacatgtatatagccatgcctgtctacaaggataatgcagtggctggctgagtggctgcttctaagtgaaaaatctatactttaaaagctggagaaaggacatggttgtttgacagcctgtctctgccatagttaggaactatcagcttcataaataaaactatctggtggtcttctcaatggggagcttaattacctcaagtcaataagaggaaaatatccattagattcaattctatgttaagaaaatcgtggtcccagtgggattataatttctaaaatgaaggaatgtcagtaaatttaatggaaccttaagtataccatagaaaaaaatgatacattctgacattgaattttgttgatttaaataaatttattgtggtaaccatgctggttcccttcatgacatatgaatggggaattaaataatatacacaatgctttgctgaaaagtgttcaatttgtgttagatcagatacacttgtcttggtgacaaaattggcacaaagctttatgaaacccacgagtgggcaaagattgtatcagaaatatctaacggtataaagcaattttgtttttcattgttacgatattgacacatctccaagaaacacatccagggatgaatagctctattccccaaattctaaagacagcatctgacggaaatctaatttcagtcttgttattaaataagttttcttagtgtctgccatagtagacagtgtttgcaagatagcatattcattttttaacatatttttcttttgtgtgttataaataaaattaataaactgtcatattctactggtatccactgacgtttcttagttttactttaatctcaccattatgtaaattgactttgacagaatatttttagttgaaacattgctggaaattgaataaagttatgtgtgtgtgtaactcctgtgaaacactcaatgttatatctatatctcttatcaatagttaagcctttatgaaaataattgattctttagcatggtgtattgcacctttctcccaaacagagatttacagacacatagtagggtgtgtatatatatagatgagcatcaggtataacacataaatgcttatatatctaattggtgttgaggtctgaattaatgtatttttgaaagcatcggttcttgtgacagtagaatcaaatacttgcataatgttttatagactagttataatccttacaaaaatcctattgacaaaatagcattagcttaatattccagatgagaaaatgggctccaagtaattagatgctttgttcctgatcaaacactaagtggaaaaaaacccacctcattacaaaattttcttgttgaaagacttcagactgcctctaaaatagaggagagaagaaatagtctgacactctaaattggatataaacgtcagaattgggactataagtctagaaaaagtaagtatgtttaatggcacatatagaacttacagtcttaacaaatgaagctttttggtcaattttggagtatgatcttctataacacggaaaatcattttggggttttttttcctgaataattcataaatggagatggactaaagaaaatataaaggaaatagcataggaaaattttgtaaaaacttatttggatattttatgatttttctacatctgttttctaaattttacaccagggttccctttaaatggctacttttttggaaaagaaatctgagtatatacccatatgcaaatgagcctcaaaaaatactaggtgcctttagcttctgttaatatgaaattactaattcatgatgagaatattttattttaatgttagcggtgttgcttttggttggaagccaggtaaatgtaatcctattactatgcctataatgcggagtagttttgtttaatggtatgtattaatgcggcattggacagcttgaattgaatcagagaaatggtgttggcaagcattaaagactttaagagaatgcaaattttatatgcctctttttattgtaaattgacaatatataattgtataaatatatggcatacaaagtgatggtagaatttatgaatacaatgtggagtaattaaatcaagctagttaacatatctatcacctcaaagacttttgtggagagaacatttgaagtgtactctcttagcagcttcgaaatgagcaatactctattaactatattcatgctgtgcaatgcatttcaaattttcatcagaaaaatcagctttgaaagagtgtatgcaaaaattttataagcttctcagatgatatgatcttatatgtagaaaattctagagatttccacacaaaaaacctgctagaactaataaattaagcacaattgcagtaaataaaatcaatatacagaaataagttatattttatgcactaacagtgatgcagtccaaaaaggagattaaggaaacaattttatttaaaatagtaacaaaaagagtaaaatacttaggaattaaccaagaaggtggaagacttatacactgacaactacaaaacaatcctgaaagaaattaaacatttatttttataaataaatgaaaaggaaccccaggtttatgaaatggaacactcaatattgttgttgaggtatccgagttactcaaaacaaactacacattcagtgccatctctaagaaaatcccaattagtttttctgcagaaatagacaactctatcaaaaattcccatgtaatctcatggatccaggaatagttgaaacgatcttgaaaaaagaatgaagttgaagggtcatacgtcctgatttcaaaacttactacaaagctaccataatcaaaacactgtggtattggcttaaaaaaagggaatgtagaacaatagaatataatagccctgaagtaaactctactatatattgtcaaacaattttccataaggttgccaaggttttttaatgattttttaatgaagccacaaatgttgctaagaaactgaatatatacatttaaaataaatgaagttggactcttataaaatacacaaaaattaagtcaaaatggatcaggaagtaaacgtggccaaaagtacagaacttttagaagaaagcgtagacatttggaagaaaacataaacattagattgggcaattaaatatcttggatatgacactaaaagctcaggctacaacagaaaaattaggtaaattgaaatgcatcaacattaaaaacttctgtgcatgaatgaacaccatcagagtgaaaaggcaacttacggaatgggagaagatgtttgcgaatcatatattcaatagggaattaatatccagactgtgccaagaactcctatatgttagtccattcttgcattgctctaaagaaatatctgaaactgggtaaattataaagaaaagaggtttaattggctcacatttctgtaggctgtacaggaagcatgatgctggcatctgctcggcttctggggaggcctcaggaaacataaagcagaaagggaagggtgacctggcaggtcatatggtcagaacaggagcaagaggggtggagggagatgtcatacacttttaaacgaccagatttcataagaactctctatcacgagaatagtaccaagcggacagtactaaaccattcatcagaaatttgccccagtgatccaatcacctcccaccagacaccaactccaacattggggattacaattcaacatgagatttgagtggggacacagttaaattatatcatcgtagaattcaacaacagaaaaacagcaattaaaaaaatgaataaatgagttgatcagaaatttctctaaagtttggccagtaagaccatgagtagataatcgatatcgctgatcattagggaaatgcagataaatcccaaatgagatagcacttcacacccattaggatgatgattattttaaaacaccaaaaaaaaaaaaaaaaacccagaaaataaatatggttgaggatgtggaaaaatttgaacacttgtgaactgctggagggaatgtaaaaccttgcagtcactgtggaaacaaatatgttggtttctcaaaatatagaacgtagaattaccatgtgatccagcaattccacttctgggaatatactcaaaagaattgaaaaaaggaccttcaaaatatatttgtacacccatgtttatagcagcattattcatagtagcaaaagatggagcaactcaaatgtccatctgaagatgaatggataaacaaaatgtggtaaatgtatacagtagaatattattcagccttaagaaagttctgacacacattatagcatggatgaatcttgatgatgatatgctaaggggaaaaagccagatacaaaaggataacatatgattctatttgtatgagctatctagagcagtaaaatgcatagataaagtagaatggtggcctctagaagctgggggagagaaggtatggggagttatttaatggatatgaagttttttgggggaagataatttttggaggtggatggtggggatggtgacacaacaaggtaaatatacttaatgctgataaattgtatgcttataaatgattagaattatatgttttatgttatatatattttaccatgataaaaacctataagctttcttgtaaagttttagaaaatgtttggattcataagtgttggatgattgagttttatagtgtaaatttaatgtagttgtgctcaattgtcaattgtatgcctattgtctgtgagtatatattttccagattgttctctaaacataatttttaaccatttagttggaaaaaaaaaaaacctcaacttaaacccaaatggaattatgtagtccattcagtgcatactgtgaaatatattagtaacattttattcattttaaagattttcgttatcagtttaggaagaatgataattttataaatccatagcatactgttgttgtgtgcgggtaatactcattatttaggctgtttttaatttggggtcttttttaacagataatcaacaaacgttttttatttgcacacagtactcttagtatttcgttttgcttcagtaatagtaaatgaggctggggtttggagagcacgattgcttttggaaaagtcaatagagacatgtttttatcgctactgctttttttctatgttaattggaatttgacgtaaaattgattctgaaagatatcaaggtagacacttgaaatatagattggacaataaggttggtagaccattactgtgctttgaactagagtcattaatgtgattgtgaaaatttttactttgtatgttattcatcacttttctcccttagtggtgtttagagcatgatgagttgttactgtactgacaagtattagtctagtagtaatttctcataggctgacaagtgccaaaattcatcctcacatatgaatacactaaagcagacaaacactgttttcatctctgacactatctacagtttatcgtgatacattattttggcctacagggtcacaggcaaattatatttaatcactgctttaaactaaaacataactataaatatttttgcactctttaaatcagcataacaatccaatagacttcaagatcctgagataatatttaataacattaaaatgatttaaaagtataacgattgtattaaataattctgaataaacaatacttttgaatgaagaagattaattagcatgatcattatagaaatggtcctattaatacaaagatgtcaagagtcatttctggttcaagtcaattaagctacgttttaattgaaaaaagctgttcattgtgtacagcggtagcactcctgacatatcatataaatgaccccattaatgcaggagaaataaggtcaactgagacatttttactgaaaccaattatgttacattttaattgaaaaataaaagctgcttttattcaaaggaagcaccactgacactccatcatattccatagcctcctaatattgcagtaacttcctaagcagtctctcagttcttcgcattatacaaagttatctttttactacattaattaggtcatgtgttccctatttaacaccttctgaagactctacattgtacttagaaaaatgtctggagtctgaaagcagccagcaagaccctgtgtgatctgtcccctgcttgcttcttgatctcacttcacactggttcccttacttcaccaggctccggtcaagcaagaacatacttcttctccctctttatatagctgacaacttcctgccattcagtctgagccgaaaggtctcatcttcagaagaatcctttgcagtctaccatatgtaaaagagctctcctgatgagccctcccagccattcctgtatcctattcacacttcttgctttaaaatcatcatcattatctgaaattaccttgtttgattatctagcttatttcttctctgcttcccctactagaatgtttggtgtcaaggactttgtccgttggcttcagtactgtatagccagtagctaggagaatgccgaagagatggtaggtgaaaaatgtttgtggaatggataaataaatgaatagcaatagtacagaagtatgccatcttatttgttaataggtgaccatcggttgatagagtttcatttctcctgattgcttaactcagtaacactctcctgcaggagagctagtcaggactcagggtttttttgttttttttgattttttttttctttttttttctttttttgagacagagtcttgctctgtcacctagactggagtgcagtggtacgatctggcctcactgcaacctctgcctcctaggttcaaatgattcctcctgtctcagcctcccgagtagctgggattacaggcgcgtgcaactatgcctggctaattttttgtgtttttagtagagactgggtttcactgtgttagccagaatggtctcgatctccttaccttgtgatctgcccatctcggcctcccaaagtgctgggataacaagcatgagccaccatgcccagcccgaggactcaggtttaagtatgtgaacagatagttcagaagacgttataaactgttaatggaaagtctggaaggaacccagagatatgttttgtttgatctacaccttactacagatttgggtttctgttagcagatctagcagctctggggcaacattctgcaatggcaccatcctggtagtactgaggagtgctactctcctccctcaaagcgggcacattactgttcagtctggagctgcactcgccatacacacagtttatgtaactccactgacagactctgccactccagtcatttatggcatctgactttgattccacatggaaatctactgggtggacctgtcacatttaaagataatcatcatcatcattgtgtatgtgtgtgtataagttacattggccatttttctggggactgagtctgtctactccaaaagctgtgaaaatagtaatgattaaaagtcctcagactctatgattgtggaaattctttgtattctagaagcacacaattctaagacttctgagtgtctctcttcagtctcctgtgaagagcatcaccgatttatcactaaatgagcagattatatactggggatttagtgtagaatgtgccatacagtagctgtgcttcttgaagaaatccctggataggccaggtgggtttatggtaagagataaaattaaatagacgctgcaaaaaaaggagacaacattattaaagtcacaggaacaaatgacacttgtaaacatcttggacatgagttgataacatttaagtgtagtccaaagagttcaaataaaaaggcattgcaatcacttgagagagagagagaaataatgcccggagagtacatttgggctatattttagagaaaggccttgataggtagaaatagggaagaatagcattccaggtgaaatagcaaggcaaaagcaccaatgaagaagaaataagaggaaggcatattcaaggtatagaaaatcatgtcattatgtgaggtacaaaaagctatcgagtgtgcatttatatatgaggtatcatgctaggaacccaggatagctagatcaaaaggtatgcattaaagacattttgactaatttccaaatgatcataatgatgcctatatgcaacatcaatatatgaagtattcagtttcccattccttgcaagtaaacctgaatatgtttaacattatatcactctgttcttccctcctgcaaccataattcataagttattttcaccaattcattcaccaagcatttattgaacactatgtatcatgtctctgattggcactggggaaacaaatgtctctaatctcaagggacatacagtagaatgggagagagatacagttcctttaaattctggacctttccatttctcttctattttcaatagagcttgcagtcatggaaaatttattctctgtggcaacaaagtagggcagatatttgccctggaaggtgaagagagatagagaaggctttctgcctaacatttatcatgaggtactaacaaatatgacaattgaataatgctgttaaatactatgtggcatactgattccatttcacatacttatgtctcctctttttaatagaaggtagtgtaaaaagaagtcctgtgttacagtaatgtttcttttattatctaattgatccttgggtacgttacctaataattgggtatgtacatctccacatacatagcagtggaatagtaatagttggggggatttttgtgacatttaagaagaataattacaagagtcaaaagtataatataaacacaaaataggaactttccatttttcaatgcagatttattcagcatctttgcttctgattccatgtatttttctgcttcagaattctttttttatcctctatcttattttacagttaataatttcctgagggactactttctgagtggaaaattgttagaatcctgaagaaatgtatcacatgggcctgcctgggtcttcccccgccccccccccccccccaagaaaaacctgcatctgccttaaacataagatccagtagtcagtatgaaattcatcaagctaaagcttatctcgtctgtagttgtagctctctgaaactttaaaaaaggagttttaaactttgcatatctgaatttctgaggtagcattatatatgaaaccaaaaatatataaaataataagaaaattgctaaagaatcactttgtgaaatgatgaatccatttagcttagttcttctgtttggatatgatagccttattgccatagagaaattgaggtaaggcattaagagaacaagcaaacaattttgcagtaactaactcatctctcccatgttgccaggtgtgccgcatattgctgagcagtgaaaggattaagctaggaaagaaagtggggaaagtgctacctggaaatcagaatgaacattgaatatagaaatgcatctaagggggaatgagaaagagaagagtaaattaggtttttcttgagtcctgtctttgttacttccacattttgtctacaggattaagcattcagtgcctgataagtttagtattgtgccagaggaccccagagaaaaattagaaatgatcctttccttctagcaactttcagtgtaacttgagagtcaggactgaccaaaatagttcaataggtctgaagtaaaattatttgtgaagtagtaaatttcactttatagtgtatgaatgctgtagaaatatatgagagaaatcaacaagggctgtgatggaaaataggaaacatccagaagtagaagttgagctgaaacttaaagatagttagaattggataagataaaatgagtattcccagttgcaaaacaatgtgagagcatgtttcgaaatagagaagagggatgggcataggaaaaacatacagatgaagtaaaagagggcattttatcttttttatttttttcattttacatgtctgttttgtttgtggacgcctatttggtctcattgttctggctttgggagacaggcaggggatgctgcggagcacatggcccctatttgtggtcgttttgctccaggtgaaaataatagccaccctttattgaacacatcctgtgtttcaggcactgtgctaagctcttacactttgttatctcgtaatcttgagaatacctgtgtgagggcaaattgcagtaagagtaaatggggggtttgattccgaagtctgagattcttgcctttatgaccactgacagttaaggggcttgttacataattacaggaactcaagagtcttggtcgttgaataacaatggatcaagtgctgtgctgtgacccattattttatcaagtggatggaataaaacatgactactgtgttcatttggatgagtaggagaatgctgaactttgaaaggttatggaaggcaagcctgtagagaggtaccaaaatggcatgtagcaacacgcagggaggagaaagacctggatttaaatgcagtctctgccatctagagctgcgtgagcttgagaagtctgcatcatcttccctctctggcccctaaagctaaagaattaaaatgtatcaccactgctctctaagagttcagtttaagtgacagcaatagtcaagagtgtcagtttgagttttcccccaaagcaaagcctgacagaaagccatgattggctgattatcaaagaaactagtaagaaaactcaggaacatgtgggacctggaaaagtgagacaaggaagaaggaaaagctaataaagataacattgttgaactgatgaccataataggtaactgtacctcaaccttgcctgggacattatagaaccttatagaactgtcctcagaaatgtccctttgaaggacaatttattttcctccctcctcttcctcctcctcctcctgttgctagagctaggaagtgaaagggtgttaaccctctaacagcagaaacaggaactgcagcaaaaatgagagatgggttgatgggatacagtgcaaaatacaaagaggcatctactgttcaaaataaacctataaaggaatctgtattagtctgttctcatgctgctaataaaggcgtaccaaagactaggtaatttataaaggaaaggtttaattgactcatagttctacatggctggggaggcctcacaatcatggtggagggcaaatgagcagcaaagtcacatcttccatggagacaggcaagaagagaaagcatgttccgggaaactttcttgtataaaaccatcagatctcgtgagacgtattcactatcacgagaacagcatgggaaagacctgccgccatgattcagttacctcctaccaggtccctcccatgacatggtgggaattacgggagctacaattcaagatttgggggaagaaacaaccaaaccatatcagaatcgaaagaaaaattataaagtcaaagtagaggaaattctggagagccttgaaagttgggctaaaactagatagaatgtgtatgtctcaacattttctattatatccctgaatcatataacttgttaagaatggggttacacaaaatttcagttaggttggagagggaaattcaagagaactgttgggtgtatataacaagactatagttaatagcaatgtattgtatgcttgaaaatttcaaaaagaatagactttaaatgttctcacaagcatgtgaggtaatggatatatcaattggcttgattgagccatttttaaatgtatatgcctatcaagatatattgtatactataaatatataaaatttgtcatgttaagtaaattcgaaattagaaaaaaaatggagctaatctctttaagagttaaaccctgaattgtagggaatttcttgctgacgaagactaatttggtcttgaagagaatttcatgtcaccatgaacttatggcctgacttcaaaccagtgatgagctgtggagggatatagggcactttgctttccatcagatcctctcttaagctgttttgcatcacttaattctaactgtaaagttgggaaaatgtagatggggcaagtgacagcatatggtttgatatatacttgattgtatccataagaacatcctcttacctttttaataagtagcttggagtgcttcctgccaaggctttcaccagttatccagaagattaaaggctgaagtagtgattgtccttggaatgtccctctatctatgtgtagatctgtggttttattcatttgtttcccaaattgatccacaaggagattaatcttgtatttttttcctgatgacttttataaactagatgcgtaagacatataatattgacatcatatcaagttgcccatagggttatttaaatatttgaagagatgtgtttgttctcttacactctctgaatgcttttggtttttagcgattttattgtcatcaaaaaccatattcgactacacatttttctgacctactagacattcacatttagctttgggtactttgtcattgtagaagcaagtataaagtaatgaaatttatgattcaatcagaaaacaagtattgaagctgctgaaatatgacgttctcagctttatttcttctacgaaaagtccaggttaatgtttataaaatatttttaaacttttttgtctgttcaggactgaatttcttgttgagccggaatggtgagataattctttcttctgtggaacaaatgcattttaatgatagttacttatatgaaaatgttactaagatttaatttatgcgcttaatgctgcttaaaataaatgtattcaataacaaaacaaagccaatagccatagcacattaattattgaatagactttctgtagttactgcaactgaatgacaggtagtaagaccttaatatttgcaatcacaattgtattcttctttgccctagattaagcttgctgattacagtgcaatgaagaaaaattaattagtttgctccagtggagcagttaatatagcacaagcgaaacccataccctgcttcctcctgtaaccaacttgttttcacttactctgccttttgatacacaaccattttcttgatcacttcccaattgaggaaaagtttaattaagtagctaatactatttagaaaatatagtgctaaggaaaaaacatgttattaaattcaaaccattgatatttttattgctatttaacttatattttatacctggcaagcaaataattgaatattgtttgaaaatatttgtaattaagaactcaagaatatgaaaacatcattgagttataaaacatgtattactcctcaaagagcaaatattcctgtgttgggctgctcttagttggagtaaacacattacctgcccacagggaacttttcatctattagaattcagaatacatttcagggattcttaccaaaaagatttagaatacagctatatgaatttatagaaatattttaacttcagaaggattgtgtgctcacttccgtatcttcctttaagattttagtcatgttccgttttttgtgttttttttccttgtctgaagacaatatttttagaggagagaatttctttgaaattgatactgtaagtaaatttactgtatttacttagaactactcattcacccatacaaaaaaaaagttgagctttcattattgagctctcctcattatgttataaaggaaaaagacattgtccttatcatgggagacaagcagatacatgggcaattcttcagcaatgtgatgagtagggaaagacatacatgatgtgggaaatagtgttttacagtcaggtcatgcattgaaccaaaactcaggccgtaaggaaaggctttgaaggggcagtggtaacttacctgacatgtaaaggagccagatgaaaaggatgttgcaggcagagaagctgtaatgtacagagaactgaaggtaaaataaaatatcagcttatggcttggcaaacactatggggaaagaggcacagaagtcacaatgatagtgggagccatctgcacaatgatttaatggctagggtgttatgtacagttatgtgtcttgtatattgcatcatttctataacagtataaatgctattgagtataaattagatatttattgacctcatattttacagatttgccgtgaaaatttctgtatgtttaaatctgcgataagtttgttattgactcattcatctaaattaatagcttgttcttcagaaaagaagttttgagactggttgtgatggtctcatcaggttgaagagatcatacttttactgtggcacctattttttttttttaatggtttatttctatttgagtaaaacagtggctaaggttctatggtatcgggataagatggtgataagtgatctatatgacagagttggcagaggaattaataaccatattgacttgggagagtgagctctgtatatagaatacacattttagtcaggagggcagagtggtaaaagtctgagatcttgagatgcactgcttgggtttgaatcctagctgtattacttaaaagctgtgtggccctcagaaagttagtcatactgtgtttcagtttcctcatctgtaaaatggcgataattgtatccatctgataagattgttttgaaaatatttaagtttaacatgtatgtatgtagttacatacatgtaaaagtatttaaaaaggtgcttggtagatattaagtgaccagcaactctaaatattgttttattataattagtaagctaccacaggttctgtgctgctgaataattgatcaataccttacataacatcagcaaaggggtaattttcaattttgcagatggcacaaatctgggtggggggtcaaaatgaagatgagaatttttcatgataggctaaatcacggggtcaaaacccacaaaatagaattgagcagggtttggtaccttcttaattgcttgcttgctttattttcaatggcttgttatgtaacaccaaccatgtggtcaacttgctaggttatataaaggtgaataaggctcggttccttccctcaagaacatattaacatgtagacgcaagtacagaaagggagaactaacattgtattataaatattctaaaaatgctaaattaacagaaatatgatacaaagtatagtataatgtagtatttagaggagataatggtttcacactcctttgctctgacaaagcatcaagagtctttagttatttgtgtcagattttaagaaagccaattaaatgttatagaacacccacagctgagggaagaatttgtactgaagcttggttggagtatactccctgtgtggcttactatgagtggcagtgcagagggtttgtggtggtcaaataggaaatctttatgagtatgaaaaacaaatttctaaggtagactcaatgcaaagtcgaaccacatctggaagaactataaattccataaatgttcattaagcacctcctatgggcaaagtgttctgttaggcctgaatgaatttattgaagacataagaaaaggctcatgtcttggaatatattgtcttttgaggaataccagcataattatgattgtataatagtttaattttatttttgatgtgtactatttaaaattcagagtgctataaaaatagtaaatcagggaatctgtatctggaggaataagaaatgaagtctttttgaaggaagtgatatttagatggaagtctgggtactagcttgttgtggagaaggaagagggtaaaggcatgagggaggaaaatacaggtggggatggaaaggtgttctaagcagggagaagtcagtgcttgtgtattagtccgttttcatgctgctgataaagagatacctgagattgggtaatttatacagcaaaaagggtttaatagacttgcaattctatgtggatggggaagcctcacaatcatggtggaaggcaaggaggagtaagtcacattttacaggaatgacagagggcaaagaaagcttgtgcagggaaactccacttacaaagccatcagatctcgtgagactttcactaccacaagaacagcatgggaaagacctgtccccatgattcaattacctcccacagggatcctctgacaacatgtgggaattcaagatgagatttgggtggggactcagccaaaccatatcattccacccccggcccctcccaaatctcatatcctcacatttgaaaaccaatcttgccttcccaacagtgcaccaaagtctttactcattccctcattaactcaaaactccacagtccaaagtgtcatcctagataaggcaatttccttctgcctgtgagcctataaaatcaaaagcagattagttacttcctagatacagtggggttacaggcattgggtaaatatagcccttccaaataggagaaattgtccaaaacaaaggggcttcagggcacatgcaagtctgaaatccagcagggctgtcaaatcttaaagctccaaaatgatctcctttgactgcgtatctcacatccaggtcatgctgatgcaagagaggggttcacgtggtcttgggccactctgcccctgcggcttttcagggtacagcctccctcctggatgctttcatgagctggcattgattgtggctttcctcggtgtgtgttgcaagctgccagtggatctaccattctggggtctggaggacagtggccctcttttcatggctctaatagacagtgctctagtagggtctctgtgtgagggctctaaccccacatttttcttttgcactgccctagcagaggttctccatgagggccctgcccctacagcaaacttctacctgggcatccaggtttttccatacatcctctgaaatctaggcagaggttcccaaaccgcagttcttgacttctgtgcacctgcgggctcaacacgacgtggaagctgccaaggcttgggcttccgccctctgaagtaacagcccaagctgtacctcggccccttttagtcacagctggagtggctgggacacagggcaccaagtctctaggctgcacaccacagagggaccctgggcctagcccacaaaaccattttttcctcctaaactccagacatgtgatgggaggggctgccacaaaggtctctgacgtgccctggagacatttttctcattgtcttggtgattaacattcagttccttgttacttatacaaatttctgcagtgggcgtgaatttcttctcagaaagtgtgattttcttttttatcacattgtcaggctgtaatttttccaaacttttatgctctgtttcccttttaaaactgaatgccttaacaggacccaagtcacctcacgaatgctttgctgcttagaagtttctcccaccagataacgctaaatcacccctctcaagctcaaagttccctataactctagggcaggagcaaaatgctcccagtctctttgctaaaatataatgagtcacttttgttcgggctcccaacaagttgctcatctctatctgagaccatctcagcttggatttcattctctacatcattatcagcatcttggtcaaagctattcaagtctctaggaagtcccaaactttcccacattttcctgtcttctgagctctcaaactgttgcaacctctgcctgttacccagttccaaagttgcttccacattttcacgtgtcttttcagcagcaccccactctactggtaccaattcactgtattaatttgtttttatactgctgataaagtcatgccagagaatggataatttatacaggaaaaagagtttaatggacttagagttccacgtagctagggaagcttcacaatcatgctggaaggcaaggaagagcaagtcacgtcttacatggatggcagcagacagagagcttgtgtggggaaactcccccttacaaagccatcagattttgtgaaacttattcactatcatgagaacagcacgggaaatacctgaccccatgatccagttacctcccactgggtccttcctacaacatgtgggaattcatgatgatatttgggtgagggcacagccaaaccatatcagtaggtataagtaaaataggtgaagggtggagatcaatcagaggaaagcacaccaaataggaggacaagttctcaatccactgcaaggatttgatttgtagtttggctttcaggcctttaactgtcttcagcttggaagtggggtttcactgggtacccacccctatctgcctaggagtttggctctgcttcctgtcactgtcatatgcacttctctgtggtttccaaaacctgacacagggaagaaatacaatacaggtatctgatttatagcaatctgttataaattattgaatgaatatcatattttaaattcatacctgatagatattttgcacatttcttgatttacttctaaaataagtggatttctcttctttccaaatgtaaatcaaatttcgcctaacttcatatgaaacacgggaagtttttctcccttttgtcagaatttttaaatgtatttatattttaatctgaagaaactagctttctcaaggatggatagagtttgaaaatgatagacatgattcagttttctaactctaatgctatgctagttttcatagagtttatgattaacataaatgtagcaatatacatgattttccgttagggaaaaatctctgtttattcttaatgttgtaaatcacaagtcaataaacacttatgagtgtcttctatatatgtagaaatgtactaggtttcatgggtaaaagtgacaaataaggcaaggcgtctgttttttcatccaatggaaatggctcacaatcacatttcaaaaaagatcagtgaactgtatataactacctatgtcttaatatgaacaaattgtgattcattggttcatataacagctgcaattcctaatacctaacatcaaatcttttttgctatgtgtggtgttagccacataaattctcactattgattcaataatgagttttttggcttttaattgtgtgtcatttttttgttgtttacagacatgataattttacgtagttctgccttggtgtctacctcaattatcagagtcttaaagagattatagcaactgggaaccctaaaagccttcagcaaatcttggctttagccaggatcctcaaataatgtccaaacgtgttaagaacttgaaatattgaacatttccacttcatttccattcattctttccatttccttaggaaaattctaataagaaatgtaattcttaggagcagagagcaggggaagaaaacaggataatttataaactgtttaataaccttgtgagcaattgaatgttgaccatataaattctggataatatcattattgtactcaggttggctgttaaaaagtcataaaggaaagaattttaggcatctatttctagataactattaaaatggtgatcttatcattgcataccatttagctggggagacagaattgtatttaatgaaatgactcatttgttgtattggattcctgccaaattatttcatggtttgtcaaatgataatttcacaagtgtcagtgacaagatgttggacattagttttctcttttcctatctgctgagtcacagttctcaagggatggatattatagtgattcaatcacaccttagattttggcttacatttactaatcagtctagtaaatttggtaggggggaaatcgtgccatagcatataaaataatgagttccatttcctccccacattggcttctattttttgggttctgtatgtacctaggacctaatggggcacttgccacgtaggtccccaatgggagaaaaggttctgttaattactccatcacattaaacagtccagttagtacccatagaggtgaggaagaatgtgcttatgttttatgcttcaggcaaagtagctaatcagagagctgtgaacaattgtaaggaagtgacttgctgcctggttctctgcaatgactgatgacacagtctttttacatcacagaatgtgtaaaatttgttcacatgtataagctcttgttactttgagagggcaattctgggataatttggttgccatattatacttagtcaatccctatgtattgataatctgttttaatttgcatgttgatatacttactgacttacctaataccatcatttatggtttgagatatcattcttaatttccctttaataatacatgtaatgcatgggtttacctagccctaagactcatttcaaaatatattttctgaagttctgtagatgtaattattaaaatcacaaactttcaaactggactcataccccagctggctatggtacttaatgaaaattaaactttttgctcctcagttttcttatctgtataacaggattaaatgccccaccctcgcagttttccttttttctttttcttttcttttcttttcttttttttttttttgagacggagtcttgttctgtcacccagtctggagagtgcagtggcatgatcttggctcactgctaccgctgcctcccgggttcaagcaattctcctgcctcagcctccccgagtagctgggactacaggcatccgcaaccacacctggctaattcgtgtatttttagtagaaacggggttttgccatgttggccaggctggtctcgtacttctgtcctcaggtgatctgcctgcctcagcctcccaaagtgctgggattacaggtgtaagccaccacacctggcctacactttttctttaaggataaaagggaaatacgtgtattaccattgtgcttgtcatatagtaagtaccaaataaagagtagcttctaccattattaaaagctatcctggcttttttactattattaaaagttattcaaagcctacatatagaaggcatagctatatgcctttgtgtcacatgaatagtcaacttttctaattttttctgtggctgtgctttgctctcaaagtgtggcctgcatcagagtcatcagggaaggtggtggttaaaacggattcctccccggcatgttggctcacacctgtagtcccagcactttgggaggccaaggcaggcagatcccttcagcccaggagttccagacaagactgagaaacacagcaaaaaatacttaaaaaaaaaattagcgaggtgtggtagtgcaaacctgtagtcctaactattcgggacgctgaggcgggaggatcaggattgcttaaacacaggagtttgatgctacagtgagtgcatgatcatgccactgcactcgagcctggacaacagagtgagatcttgtttcaaatacagtaagtaagtaaataaataaacccagcaaaacacagatccctaggtctcactctcacgcttgattgagtatgtctaaggatgtgggcaagattctgcagccacaactgtctcccaggtgaggctgatggtactcgttctccaactaaagtttgagtagctttgccctggagtagctgtcccaaacaggttaatcctcagaattgcctgggaagatttaaaatatatttcccaaacataactgaatcaaaatttgaggagacattgtaaaaaatccatttgaaaattgttgcgcaaattagaggttctcaaacttgagtgcacatcagaattttctggaggccttgttaaaacagattgttgagatacggaatcaacctaagtgtccattaacagataaatgaatttaaaaatatggcatataaacacaatggaatattattcagccataaaaagaatgaaatcctgtaattggtggtaacatggatgagcctggatactgttaagtgaaataagtcgggcacgaagagataaatatcacaagttttcatatgttagagctaaaaagtttgatttcatagaagcaggcagtagaatagtggttagcagaagccggggagggtaagagggaggagagggaggaaagggacaagctagttaacagatacaaaatgataagctaaataggacggatatgtactagtgttctaaagcactgtaaggtaacttcagttaacagtaatttattgtgcatgtttaaatagctagaagagaggattttgaaacttcccaacacaaagaaatgacaaatatttgaggtaatggatatgataattagcctgatttgattattacatgttatattcatataggaaaatatcactctgtacctcctaaatatgcataattatgtgtcgattaaacattaaaaagaaaacacagatttctgggtctcactccctgagatactaaccaagtaagtctgggagagtcctgaaattcggtatttctaaaaaggtcccaggtgacgctgatgctggtctggatccacactttgagaaccatagcctgccctagaccactgcttcttaactcattttaaaattaaggatctgtgtgagattctgctggatggtgtagattttcttgaaaaataaaaaacgtgaacatagtttccatatactttccagtgttcatggatcccttgaagtatgtctatgattcttgtatgaaagcttgactccagatagaacgtctttgagtaacatatcccaggttaggaatggaattctctggggctatttgcaaatctgtctaaacatgggaatatgccagtaacattttactccattacccagagaacaggaccaagtcatgttattacctgtagaatgataagagactttcaattctaagaattatggcttatttttacaacttgttggaatatgatttgcagatttggtgaaaatggtagttacttccacaaagatgtttaacaatttaaaagttctagaagtttgtgtttcctactggctttattctttatttttactcttcaaatctagctgttcgctgtctttttcctgaaacatttttattaaggaaaatacagaattttgcagcttatcagtttaaacagaaaacatccctgaaaagtcttcgactatatgactacattacttatacaaatcgtgatcatagtgaaactgaattactttgtaaataaccatgattcattactataagcagggttttgaaattatgactacctcgagaaaacttttattaagaataaaaaagcaactatctcagctggaccaataatagaaacaccagtatattcactcgctttttatttctcaaagcacatttgtggcttgtagccaagaattcattgcattgaaggagtgtttgacaagcagtattgaagctgtaaacactttgaactcattacagtgtctcaccataggaacttaactgtcactgaagacaccctgtctgtgaaaccatcattcctacaattatttttacctttgcctgaaaatatgcttttgtgctttaaggtatttcaaaagacaagagaaagatggaagctaaggaggctatagggatttcctgagttctgtgagtgctgtgttgatacagaacaagatcagaaacttggatatatatgtttcaacttaaaatgctgattgatcatcatgacaatagttttatagagcatttgtatgggggtgaatgtttgaagttataaaaagcattgtaatgttactcattcatgggctgaacaaacatttcctctttctctttctctggctttcttgccaattacttttttcttgccaattacttttttcttgccaaaaacaactgagatcacccccttaagtccattttgaaacaaacttagcaaggagtggttgttagtctgcaataacaatctacatctcaaactcacatccttacagttgttgtgtaggtatcatagctgcgtgaaacagtgaagtgtaagattgtgtctacagtggtctggaaaatttgactcataatcacatgtagaatacagtcctttaagaactctcccaccccgcatcactgccctgaagataatgagccaatgatcctgatggtaatctcttctaaaatcatacgtatttgagaaaaattgtatcttttcggagactggtaatagtccagatgaaaagtgtttatatcctgaacctagagtattgacaaagcagatgaagaggattgattgggatggagaagattcattgatgggacttaaggaatgactagatatgacaggatagggaggtgaagtatgctaggatgatctgtatgataatgtcttacacaagtgaacagaagtccagtttaaataacgaggtttggagggagggagtaaagaagatggatttcatttttcttaggtctaatttaatgtgcttttggtaaaatgtctactaggccaccatgtatatgaatctgaaccttaaaaaggaggtttgagcagataggtgcacagtttttaatcattagcatatttaacagttgaaaccatgagagaatatgccttatgagaagaagacaccaagatcacacaatgctaggaagaccaaaaaggttgtggcagagaggtgggagggttgatcatgagaggaataattaagtactaaattccactgaaaacattaagtaagatgtgggttaaaatagtttattagatttggcaaattggaagttttgataatattcaaaagagcaactttggaggaatggcaaaaaaaaaaaaaattgtaagaatggttatccttcctagaagatggttgcagaaatgattcagaaatagcttgtaagtagagggtaactgaaaagccctgagtgtgcttactagctggtgagagagggtttaaagatgaatatgtgttccttaaatccattttgtgtgtttatgaggacagggtaaatagtctagctaaatcaccacaccctgccctgtgcctagcatagtttctatatatttattaggcaccaaatattttaggtatatatttttttatgtaaaatatatagggaactgtgtgaggccctggaagaaacacaatgtctattttcattgaaaaagagctacattggagagactaaccacccatcactcaatactattttatttagttgtataagtaatgggtgctatggcagtttatgacagacagacctgcccttatcttgggggaaccacagaatgctttacagaggaagccatttttaatgttctactgagagcaaaatagaacttcctcccattcctcacccactgaacacattccacagagttaaaaactctgctttccttccacggtcacttttcttggcattcagaaattattggaaactgtaactatgggttcagtgccaacaacattctaacactcatggttagaatcctaaccagaaagagtacaaataagggtcctttcttttttgattttggctcagatatcgatgttactaataatgataataaaataatagtttaaatttaccctgtctttatgattttcagaatacttcccccttctagtttatttgggatgagatgctagggaatatgagtaggaaaatgataaagtgagacaaagaaggaaggaaagtcaatgaagactacatttcaagagtttaaactgtggtggacaactggcgctcaatttgactggggacttgaagaaaattatgtggaacacacacctcagacttatcctttgaagagatgagaatgctaaggtatttatacaccaactcctgctggtcatctgttggcagatcccgggaggggctgtgcattcactccctagcatttttgatctattgcatgcactccggaagaacagactccagtaggcaaagagatgcaggagctggcaggtggaagttggaacaatgtccactgaaatgcgaaggactcagaggaagagacagggtatcatcagcaccagcctaatggggtttgaatctccattttgccatttactagcagtgtgatctctggcaacttacttatcctctcttggccttcgtttcttcatctgtaaaatggggatcataatagtatctacatcgtaggattgcagtgaggattaaataaattattcatgtaacaattttacagaagagaacatgaaaatttcgaaaagattacttacttgtcaaatatcacacatatgggaagcaggccaaagccttgattcttggccccagcctttttccttatacctactgcccaatgtctgtgttgccttgtatcttcataatttacttcccattttctcattgcttaggtctcattcctgattcttttgtcccatttactctcctctaaacccttgtgattgtccagatgagctttagcttgggtgtctgtgtatcccttctgaatatttcatgcttcggccttgcccagcagcttaaacttacactattaactcccggtcttctctacctcgcatttttcctcttacctatgaggcatcttgacctataatattttcacttccaccagctgagtctatctgtggcacatgattacttgtctgattccttgttctcatggaatccttaggcttctctgatgtattttatcctattggcattcacatcccagtgggcacgaagaatatttaataaaaacattggctttattttagaacggaataaacacatcattctttcctcctaaaaataaaagacatattagttggattgtgtcattactgtagagtgatacaagccagaagatgcagtgacaatatcagaatggtgtgttatctgttaccaaagggaatgggtggtagctgtgtaaccaggtcatcatagtggcatgaccatagccaagtgtacggcaccatagtcaagggcactgaacaggtcattagttgggattgagtcaagagttggaccatttgacatggaacacacattctaaaaatatattaagttggtgcaaaagtaatcacggtttttgccattactttcaatggcaagaaaatgcaattactgttgcaccaatctaatagtaacataaacatcaagcggcttcaacttttgcctaacaagtttatttaaaaggttctaggctagtcatgtttaaaatggaacagctttattgagatataatttatatgccatacaatcatctgtttaaagtatacaactcaatgtttttagtatattcacaggactatgcaaccaaatattgtgttggtattataccaattagagatatgacaaaagctttggaccctctcatgcacatttgtacaaacacaaaagaatttgcatatgataccagaaaattcatggacttctctgaagtccatttatatgcccagaagtactactcgttcagccaaactctatcttaaggcagctattaattctgtttgtacaatccagcagacagataaggttgttgatcgtcttatggactcatggatatcaccttaacgacaacaatatatgtgccaagtctggctcctaaagttttaggattttgtgtttaaaaagggggagaaaagctttagtatgtttcgaatcctaactgacagtgagtgacaaaggtttgaaaaaatatattgcagatgtgtgaacatctggaggctaattgtacatgtttaggtactccataatctcatgaaaacttttgacctagaaatgtcagcgctgttgccctctcaaagagtcatgattctttatcacatcgctttattgtaaaatggaagtacatttagtggcaatatccgtgtgattagctatgtccagtcatcagatttttcttgcgttattatgattattacagattctattacactatgacattgagcataaatcaccagcctccttctcggcacatacaagagtcacttattttctaaaggttaccaaatatactaacttgtttaaacaaacgtacacacacaccttcctatatctgggtaggtacagactcagataaatcttcatacaacagcatgctataatgaaaagaacttaagttttagagtcataaataacttgatttgaatccatgagtatatatttacttactgtataatctagggcatgttatgtaaacacttgagaattcaatgccaaccttgggataacaaattttacccagcaagtctatgagaaagatcatagaaataacgcatgggaagtacttaaaacagtgtcctacacatggatacagatcaagaggtagtaaatacactcacaaaatggtctaattaagaaagtcttccatgagtttatgccctccaaaagatgagattcgaggccaattttgtgtcataaactttatgcttttataatattcatttctattttatgattatataatgcttaaataataatatagtaaatattcatgtaaaattcttacaccgaaagataaatattgttaatatgttggtggtcattaacttctccttctctctgttctttctcctctcttatttatgtgacaatatatgatccttttttctgaggtttaatagtgattcccatgttttcctcttccatagataccataaatctgttgatacacatgttctctttaccatgaaatagatcccttctctgtaccatggcccctataaatcaggatacactacattatgcatctataagaataattctgatatctcagcgactcaaaagaatagaattttcttcccgccaaacttcatgtcactatagattggtaggcgtctcaactcattgtactcagctgaaggacctgggctgagagaagggtcatctcaatataaactttaagaacgcaagagaacatgtgaaagcacacgataacccgtaaagcttctgcttggaaatggcgcacatcacttctgttcacatttaatttgatgaagtaagtcacatggccatatcaaagtacaagtaggcagagtaaaagatactatcaggagcctggaataaaagaatggaactttggtgaatagacttaatggcaaccacatcccttaaaacaagggttctcaaacttgaacatgcatcagaataacctagaggtttgttaaaacagggagtgttgggatccaccccctgagtttctcatcctgtaggtctagagtacagccagagcggttgcacttctcacaaattcccagttgctgttgattctgatgtctgagaaccacactatgagaactgctgccctaaagtataaaagctcttctcttaagattccacaatggaaaacacttcaacagtggtactttcgactgtccatggtcacatttcaaccacatacttctcaagtttccaaatttatctcaatctccaaccactggtctgttaataatttcccaaaattgctgtattatttcttttcctctggtggaatttaattaaaatatctttcctacaaaccttttccaaatcattctaactagaagtattgcctataccttttccatagtagtatacacctttccaaagtgatcacatgctttgtattatggtaatcttacacttgtgtttttctcagtttcatgaactgttttcaagcgcactcatagaaatttacccaaaatgaatactaaaacacttaattttttattcctgattttgccacattagggtaaaagacttggccacatgttctaaatttaaatcactactcttgtctcagaagccatgtgaacagtagggaggacagcataggttctggagctggactgcctgggtcaaaactaaccttgccactttttagctgtgtaaacttgtgcaaatttcttaagatccctgagccttttcctcatctagaaaatgaaagtgagaattgtattcataccataggactgttacaagaattaaatgaattagttgatttgaaacatttagtgcaggacttggcaagttttgagccattataaccattataattgcaaaacatcctgaagttattctctatgcctgaagttacattttcttaatatccattttctccttaatcccttaaaagctgtcttctgcctcatttattctatcaaaactgtattctcaacagtcactaattatattctaattgaatttcagagtgaatttcacacctctccttttgaaagattcatttctatgaatttgggacagcttcctagtatgatattccatctataagtatatccatatcatctatatcgtataccttatctgctctgctaactctttccttgtgttattatggatgttctccaattctgttctgcagacgggtgacaagtgaacatgtagaagaagttttcagtctcctagttttacctccattcaattaactttaaaatctacattactagttctgctgtgtcaccggcagtccaagaaaagaaacctgatcagtttgtgaaaatagctaatatttaatatgagcttattatgtgccagctactttacctggagtttcttatttaagccttacaattgctttattaagggctaggaacttcacatgtacattaaaatgtagaagcaaactgttgaggagagaaaggaatttacccatattatacagataactaataggaagtagagattggatttgaatgaatccaggactgatgtcgaagcccagtgtcttaatgttattttgggatgtctgcatagatttttttttctttataagggagtgatgattttaaaagcaacaagacccaccttaggtaaagtccatcatccaaaaccaaactcagttttattcctgtgcctacgcaaccacattattggatgcctagaaaatgttcaaacttctaaccaagtcactggtaaccctctgtgattttggcttaatcaggtttattcatcagttttgcccatatttcacttgagctctagtctcattaccttaattacagcttcctgtatgtctataggcttttgcttctatagacccaatttatatggtatcaactctatatgaagccgtttttgaatctcctagtaatgctttaattttcctaaaattcctgttatatcaaatcagatttcttttttatttttttgtcagttataagtttattttttgtgagggcaaaaataaatttgttggataatgagtttgtgagtagtagatcaatttgttcacatattttgcaaaagttagagcttattactcattcatgtactattgatgtaacgcattagaagacagttaacattagttcctaattgcacctgaccaaaaggagctgtgggcctggcctatacaccttattgcgtgttcagcatcaactgatttagtgaagcagcaaaaagaaaaatggtgtgtgcagtattatctttctgccacagatacatgtttttaatttccaagtttccaatgcatcattcagttttatctaatgggaatgcagctgagagaagtttgtatcaacccaaaactacatgctaatatagtttagttttcaagacttgtggagtctttttttttaatggaataagatcatcagaaatcctggagcaagacagactggctgtggtctaccagcattgtagtaaaaacattggggaagttttataagacctaattattagaaaataccataaaatagtcattttcatagaaaaagctttcctttctttcctcacactaaatcacattactttgtgttcaaggtaaaatggagtttgaaatctggatgtaaataagaaaagatattattttattccaagtgaaacatgtattcacacttcacgtcttgaagcaccaggtggccatttgggctgagttttcaagaaaaaaaaaattatatagattttatgtccccccccttttgttgttgctgttggtggtggtggtggtgatttttattttttggtaaagataataacatatgaaacaattttcctgttaattaaaacttactctatttatgagcatgatattttaaagaaattttttatatataatgaatatttggatatatatgtggttaatggttattttaacaaacattttggtttgctgaaatttttaagtttttttttcttttattattatactttaagctttagggtacatgtgcacattgtgcaggttagttacatacgtatacatgtgccatgctggtgcgctgcacccactaactcgtcatctagcattagataaatctcccagtgctatccctaccccctccccccaccccaccacagtccccagagtgtggtgttccccttcctgtgtccatgtgttctcattgttcaattcccacctatgagtgagaatatgtggtgtttggttttttgttcttgcgatagtttactgagaatgatgatttccaatttcatccatgtccctacaaaggacatgaactcatcattttttatggccgcatagcattccatggtgtatatgtgccacattttcttaatccactctatcattgttggacatttgggttggttccaagtctttgctatcgtgaataatgccgcaataaacatacgtgtgcatgtgtctttatagcagcatgatttatagtcctatgggtatatacccagtaacgggatggctgggtcaaatgcgatttctagttctagatccctgaggaatggccacactgacttccacaatggttgaactagtttacagtcccaccaacagtgaaaaagtgttcctatttctccacatcctctccagcacctgttgtttcctgactttttaatgatcgccattctaactggtgtgagatggtatctcattgtggttttgatttgcatttctctgatgcccagtgatgatgagcattttttcatgtgtcttttggctgcataaatgtcttcttttgagaattgtctgttcatgtccttcgcccactttttgatggggttgtttgttttttcttgtaaatttgtttgagttcattgtagattctggatattagccctttgtcagatgagtaggttgcaaaaattttctcccattttgtaggttgcctgttcactctgatggtagtttcttttgttgtgcagaagctctttagtttaacgagatcccatttgtcagttctggcttttgttgccattgcttttggtgttttagacatgaagtccttgcccatgcctatgtcctgaatggtaatgcctaggttttcttccagggtttttatggttttaggtctaacgtttaagtttttaatccatgttgaattgatttttgtataaggtgtgaggaagggatccagtttcagctttctacatatggctagccagttttcctagcaccatttattaaatagggaatcctttccccattgcttgtttttctcaggtttgtcaaagatcagatagtggtagatatgcggcgttatttctgagggctctgttctgttccattgatctatatctctgttttggtaccagtaccatgctgttttggttactgcagccttgtagtatagtttgaagtcaggtagtgtgatgcctccagctttgttcttttggcttaggagtgacttggtgatgcgggctcttttttggttccatatcaactttaaagtagttttttccaattctgtgaagaaaggcattggtagcttgatggggatgacattgaatctgtaaattaccttgggcagtatggccattttcacgatattgattcttcctacccatgagcatggaatgttcttccatttgtttgtatcctcttttatttcattgagcagtggtttgtagttctcctcgaagaggtccttcacatcccttgtaagttggattcctaggtattttattctctttgaagcaattgtgaatgggagttcactcatgatttggctctctgcttgtctgttgttggtgtataagaatgcttgtgatttttgtacattgattttgtatcctgagactttgctgaagttccctatcagcttaaggagattttaggctgagacagtggggttttctagatatacaatcatgtcatctgcaaacagggtcaatttgactttctcttttcctaattgaataccctttatttccttctcctgcctaattgccctggccagaacttccaacactatgttgaataggagtggtgagagagggcatccctgtcttgtgccagttttcaaagggaatgcttccagtttttgcccattcagtatgatattggctgtgggtttgtcatagatagctcttattattttgaaatatgtcccgtcaatacctaatttactgagagtttttagcatgaagggttgttgaattttgtcaaaggccttttctgcatctatggagataatcatgtggtttttgtctttggctctgtttatatgctggattacatttattgatttgtgtatattgaaccagccttgcatcccagggatgaagcccacttgatcatggtggataagctttttgatgtgctgctggattcgttttgccagtattttattgaggatttttgcatcagtgttcatcaaggatattggtctaaaattctcttttttggttgtgtctctgccaggctttcgtatcaggatgatgctggcctcataaaatgagttagggaggattccctctttttctattgattggaatagtttcagaaggaatggtaccagttcctccttgtacctctggtcgaattcggctgtgaatccatctggtcctggactctttttggttggtaagctattgattattgccacaatttcagatcctgttattggtctattcagagattcaacttcttcctggtttagtcttgggagagtgtatgtgtgcaggaatttatccatttcttctagattttctagtttatttgcgtagaggtgtttgtagtattctctgatggtagtttgtatttctgtgggatcagtggtgatatcccctttatcattttttattgcatctatttgattcttctctctttttttctttattagtcttgctagcagtctatctattttgttgatcctttcaaaaaaccagctcctggattcattaattttttgaagggttttttgtgtctctatttccttcagttctgctctgattttagttatttcttgtcttctgctagcttttgaatgtgtttgctcttgcttttctagttcttttaattgtgatgttagggtgtcaattttggatctttcctgctttctcttgtgggcatttagtgctataaatttccctctacacactgctttgaatgtgtcccagagattctggtatgttgtgtctttgttctcattggtttcaaagaacatctttatttctgccttcatttcattatgcaccccgtagtcattcaggaggaggttgttcagtttccatgtagttgagcggttttgagtgagattcttaattctgagttctagtttgattgcactgtggtctgagagatagtttgttataatttctgttcttctacatttgctgaggagagctttacttccaagtatgtggtcagttgtggaataggtgtggtgtggtgctgaaaagaatgtatattctgttgatttggggtggagagttctgtagatgtctattaggtccacttggtgcagagctgagttcaattcctgggtatccttgttggctttctgtctcgttgatctgtctaatgttgacagtggggtgttaaagtctcccattattaatgtgtgggagtctaagtctctttgtaggtcactcaggacttgctttatgaatctgggtgctcctttgttgggtgcatatatatttaggatagttagctcttcctgttgaattgattcctttaccattatgtaatggccttctttgtctcttttgatctttgttggtttaaagtctgttttatcagagactaggattgcaacccctgcctttttttgttttccatttgcttggtagatcttcctccatccttttattttgagcctatgtgtgtctctgcacatgagatgggtttcctgaatacagctcactgatgggtcttgactctttatccaagttgccagtctgtgtcttttagttggagcatttagcccatttacatttaaggttaatattgttatgtgtgaatttgatcctgtcattatgatgttagctggtgattttgctcgttagttgatgcagtttcttcctagtctcaatggtctttacattttggcatgattttgcagcggctggtaccggttgttcctttccatgtttagcgcttccttcaggagctcttttagggcaggcctggtggtgacaaaatctctcagcatttgcttgtctgtagagtattttatttctcctttacttatgaagcttagtttgcctggatgtgaaattctgggttgaaaattcttttctttaagaatgttgaatattggcccccactctcttctggcttgtagggtgtctgccgagagatccgctgttagtgtgatgggcttccctttgagggtaacccgacctttctctctggctgcccttaacactttttccttcatttcaactttggtgaatctgacaattatgtgtcttggagttgctcttctcgaggagtatctttgtggcattctctgtatttcctgaatctgaatgttggcctgccttgctagattggggaagttctcctggataatatcctgcagagtgttttccaaattggttccattctccccatcactttcaggtacaccaatcagacgtagatttggtcttttcacatagtcccatatttcttggaggctttgctcatttctttttattctttttcctctaaacttcccttctcggttcatttcattaatttcatcttccatcactgataccctttcttccagttgatcgcatcggctcctgaggcttctgcattcttcacgtacttctctagccttggttttcagctccatcagctcctttaagcacttctctgtaatggttattctacttatacattcttctaaatgtttttcaaagttttcaacttctttgcctttggtttgaatgtcctcccgtagctcagagtaatttgatcgtctgaagccttcttctctcagctcgtcaaagtcatcctctctccagctttgttccgttgctagtgaggaactgtgttcctttggaggaggagaggtgctctgctttttagagtttccagtttttctgctctgtttcttccccatctttgtggttttatctacttttggactttgatgatggtgacgtccagatgggttttttgtgtggatgtcctttctgtttgttagttttccttctaacagacaggaccctcagctgcaggtctgttggagtaccctgccgtgtgaggtgtcagtatgccccttttggggagtgcctcccagttagggtgctcgggggtcaggggtcaggcacccacttgaggaggcagtctgccccttctcagatctccagctgcgtactgggagaaccactgctctcttcaaagctgtcagacagggatatttaaatctgcagaggttactgctgtctttttgtttgtctgtgccctgccctcagaggtggagcctacagaggcaggcaggcctccttgagttgtggtgggctccacccagttcaagcttcccagctgctttgtttacctaatcaagcctaggcaatggcgggtgcccctcccccagccttgctgccaccttgcagtttgatctcagactgctgtgctagcaatcagcgagattccgttggggtaggaccctccgagccagatgcaggatataatctcctggtgtgccgttttttaagcccgtcggaaacacgcagtattcgggtgggtgtgacccgattttccaggtgctgtccgtcacccctttctttgactaggaaagggaactccctgaccccttgcacttcccgagtgaggcaatgcctcaccctgcttcgggtcgcgcacggtgcacgcacccactgagctgcgcccactgtctggcactccctagtgagatgaacctggtacctcagatggaaatgcagaaatcacccgtcttctgcgtcgctcactctgggagctgtagaccggagctgttcctattcggccatcttggctcctcctctcaaatcagatttctgatccaatatttcaagttttaattttcccactggtaggctctattcctactctttttctgctcatggctgaaaattttctgtatctcccatctctttcatatttgaatctattgaatacatagcctccacactcttaataaaatactaatttcatcatgtaacttcattattcaaaatatttagtggctcccactacctatattaaagattccaaactcagtagttactaatatttttcataggctttctagtcctgtcctttcttttagtcttatctcttactactttaagcttattcctagggcaaacatcttactatttccaaaatgtgattcaacgtcattcctattgcctaggaagacactcttctgtcctatggctctctaagtctacttcctgttgaagtactctttttcataaacattcaaattgtttttgtgtcctactttggtgttacctgacatattttaaaactcatggattggatcacatatctatgcatttacttatggcaccattacattttatttattttaagagacaagatattactcttttgcccaggctggagtgcactagcacagtcgtagcttaccacaggcctccaactcctgagtcaagtgatccttctagctcagcctcctgagtaactagaattgcaggtgtacaacacaatgcagaggtacatttaaacaattttttattgttattttgtagagacagggtcttgcttcattgccccggttggtctcaaactcctggcctcaagcgatcctcctgcctcagcctccgaaaatgctgagattaggaatgtgaaccattgtgcctggcccacgttacattttaacagtggggatctgaacactgcagtttcccaaagccaaaaacatgactaactcagctataaatatttaaccaactcttaagtatacctcctggaccatggtcatatagagcagaggctgtgctactatatatgctttagttttgctagtacatttagaaaattgtttattacatagtcagtactatggtgaatggttaagatatgttgaatgccctgctgagacaacgtttttactttgataggaaagtcaaaagaataacacacatatttaattattaaagaaccagaacatgtagttttctgaatttcttagtataaaaagctccttaagagacataagtatacaaatatacacttcttcatctatgatactctattaaatttggcatatttctttttaacaaaaacttacaagggtagaaatctgctgagatgatatatgaaatgtggaaatgttaaagatagattgggggggtggttaagataagacattgaagcatataatactcctcttggagaatcattcagcttgccaagctaccatgaatcagtgtttgaaaagaggcagaagatacatacatagaaaaatcagccaaaatattcattaacatgaaatgtttccaaagctgaagtgctacattaatggttgactttgtgcctcaagactaaatattgggcaatgttagctttccctataataaaacttgccccaaaatatatgttgagtatcccttatccaaaatgcttgggaccagaagtgttttggattttggatattttcagtttggaatatctttattatacatacgagttgagcatccataatctgaaaatctgaaatccgaaatgattcaataaggatttcccttaaaaatgatcgtgtagttactcaaaaaattacagattttgtagcatttcagatttcaaattttcctattagggatgttcaacctgtattgaacttacttgcttacacgtgttgcccgtttgctgtactgtaagctctgtgaaaaaagtatctgctgacttctttgttcataattgcgccctagcaccttttgtggtagttggaaaatggtagacactgagtaaatatttactaaatgagtggataggtaaaagtatttcagtttggcatggcaagatggaaagactaacagtgtttaagtggctatggccaacgtcaggccttcttcagtttaagaactgtggaaagaagaaaattaaacaattaaggaaagataagaataaatccaacaggaagttctcactgaagccaagagattcaaaaaaatacaggaagaagaagaggaagaaaatactattttctatgcattatattcccaaagatatctgccttactgattaatatcaattaataccataactatcacattttctcataggccaaggtgaaatgtctgataagacaagctttgttgctaacacaatttaactcactttagaatattaacatgacatttatgtggtctactcctctctaagctcaaataaagcagctgcgtataaaaagcagccatggattaaatgacttcagcctgctttgtggaaactactgctgttaaacctgctcttgataaactacaaagagtgcctggactccatttatgaaaagacatttgaatatagacctcacatggtgatcatttaaaaatattatattttgcctgtattacaacattgggttgtatttttgtttaaatctctacttcatttacttatgcgtgtaatactgacttgcttcacaaaatgttactctggagtgtctggcaagcttcctaacaagaaatttgaaagcagttttacatgaaaatcacatttttgaattttatatttctagacaagttttagtacaagcagtgtaagagcataagagtagtctatgtcatatgctatttgtcagtctccaatgaagagtaaacatttatcagcttcagtaacaatccctgcctaactgaggagtgtcattttctgaaaatattgattgatagaggccttgcctaaaaaatataaaatgcatgtaatttacacacagctgagaaatacaagctcattttttcctgacaagcagtaatgccctttataaactatggagattaaattacaaaaaaagttaaattaaaaacaaaagtatgatcagagtgatcagagttttgtgtggtacattttctagtaatcatgttttacagcagtctaatttggtaaataaaagtgaattggaatatattttaaaggctaatatgtatatgtgtgtatgtgtatgtatatacatgtatatgtgtgtatatatacatcatagaaacctttatatttaagagaaaatcatcaacaaatacttttaacacatttgttgttatgacgcagtaacatgtatcctaaattaggaaagtcatgtttccggatattttcctaaggaaatattggttctaaaaattcagcataggaacgtcaagtattttattattcactgaagggaccaataatatcaatgcaagcagaggcctgatatagaaaaattaattaaggtgattatagaggtgtaagcaggactctagtaaatgaatttagaaggtggtctagtcagttgcttgaacattaatcagaatttagagttctgctctgttataaactcaatggtctcgtgaaaccatttttatacaagtctcaatgaattcatctctatatagttcttgttccacctactttagtattttttgaggagcaaatgagataatgtgtgcgaacataagacacaatgtgtaatctaagccaatctgggcagattaccttctctagtgcagattagagatatctatgcattcactaactgaatttttgtaccagttggaagtgtttctgaagcagatcttttttttgctagtctattataattattaaagatgatatcatgcctaaaatttgtcacattaaagaagcatcagtatctttgtaacattcacacattgattttacttcaacctagaggaaccatgactgcctttaaccatttgaaaaggtctttatgaatctaccatctccaagatgaatacccacagcctttattattgggctcacttttggtgtcctttatcgtcatggtagtcatagctcctacatctagtaaacgttaggcctagaatttgaattgccttgattctcaaataatatctgaatccatcatcttatatatttataatttctttgaatatgtgataattaattcagggtaattagcacatccaatgtctgtgtgtagaaacattgtgttggaccccataaatatgtataattatcatgtcagtcataaataataaaaaaaacttcccacaaataatttataaacccatgcagtccttataactgctctttccaatattaatttcagacttaaaggtgatctgttaaattttatcttactggtttcgatattattatagctaagacatccatagctgaattttattacaaagagtaaaagctaccctttccaggagagtaaaatattttattataatagctgtatttttatgccttaagatccaagatcattggcaaggtatatttggtggaagcagtccaaatgagagtcacatgaccatcaagtagatataactttaaactgacacaaggccatttgccatcactttttggatagggtgtgctgccacatgtgtgtttttaaaatactatattttagtacagattcaaaattttgtctgtgaatttattatgggagacattgataagctacattgtgaatatgaccttatctatcgaactaataatatgatcaaaagagaaaatgacatttgttcatgggttgatttgctaaccccgcagtgtcataaatagtttatagtagtgtcattgcctccatagaaagttaagattgcgtagattcttcagctgtaataaatttgtaacatatatattggataaaagtatatgagaatgttcaaaacattatttagattaagagatatacctattagaaattgcatatattccaggggaattttttaaatttttgtgggtacatagtttgtatgtgtatatatgtatagaaagagagagacagtacatgagatactttgataaaggcatgcagtaaataataatcacatggagaatggggtatccatccactcaagcatttatcctttgtgttataaacaatccaatgatactgagttattataaaatgtacagttaaattattgagtatagtcaccttgctgtgctcgcaaatactatgttttattctttctaaggaatttttgtacccattaaccaaccccagcttacctccaccccctagtaccctactcagcctttgagttgagatctctctctctctttagctctaataatatttgctttatttatctgggtgctccagtgttgggtgcctaaatatttgcaattgttgtatccttttgctgaattgacccctttctcattatataatgaccttttttgactctttgtttttgtcttgaaatctgttctgtctgaaaaaagtacagccactcctgctgttttttggtttccattggcatggaatatcttttttcatccattttcagcccatgtgtatctttataggcggtcattaaagatgtcaagtattttgtagaatcatagcatgtatataaacacatgcatgcatatacatatatatacctatggactacaatattatagataaaatttcataagtgactatgatccatgatatgagaggcagagaatgctcagcagtgggatccctctctcaagccatactgtcaaatctagtatattgaaatttctggaacacccttatatattagagtctttaccagaaatgctggtacgtttattttaactgttattgcagaaatggctaagaaaacaatgtctagattctaaagcaaggattaggattgtatactttcttctgttgtgttacacagatacaaccaaacaatgactatttattaagtactatctgtggctaaggtgttgtacttgaggctgtgttatttacgcactaagctgttaaagtttatttgatgtttactagagctttctgatgccaagaacacaactctggttttggtagctctcttttttccattgtttaaaaatgctaaagatcatgcaaataattaacatatgataaacattttttaatctcagtaacattgtaaatttataatatgatgagaaaaagagctgaaagattactgatgtaatttataacaggttagtatttttagttcatcattataaacccagaagagaagagctaataaagttattcagttgtgcttatgtaaatcttttggatcttgagacttatttaatgactggatgaagattttaagtgccatgggatatgtgagctacatggttcaactgtacaattggatcactgttcattttatgggctgtgatatacttcacattgggttgatttattgtttcagagtaaaattagctttaacatgttttcttcctaactgaattgtaaatcaattatgttaacagctcctcttggtaagggcctagacaaaatacatatggtcaataaccattttgtgtgaaataagcatataaaaagcagactttagtagactactctagatttgcatagttcctcataaatcaactttatgaaaatgataagaactgaacagaaatttatttgaagaatttgagccataacagccttataaattaggttcacttcacctattttattcacctcgtttagtttcagcaaaaaagtctgatttaatttagagtttattattacttttgattttaaatgcacaattcttaattgtatatttatacattccagttggaccaattttttgaaaggatttcctcaagaagtagaattgcaccatttaaatgtattatatttgacttgtcaactgtcgaatctaattgtcatcatttgaaatacaacaatatgtgctaattattttagttttagtttttattcttttactggatgtacttaaggcaaccttgtccaactcacagcccatgggctacatgtggcccaggacagctttgaatgcagcctaactgtaattcacccactttcttaaaacattatgagatttttttgcaggtttttttttttagttgattagctattgttagtgttagtgtattttaggtgtggcctaagataattattcttcaaatggagcctaaggaagccaaaagattacatacccctgatttaaggggtacaagatgttacgatatacatagacataatgaaatgattactgaattcaaccaaattatcctatccattatcttccataataactgttttggtatggtaagaatacctaaagtctcttttcttagctaatgttcagtgtacaatacaatgccattaactgtagtcatcatactaagcagttatcgagatttatttatccaatataacttcaagtttgtgtcctttgacctacttctcctcatttcttccaaacatttaaagagtaatttataccatttgttcttaaaatcttctaaataatagaagaggaaatacctccaaagccatttatgacttcagcatcaccctaaatacgaaagtcaaacagacaccgcaagagaagaaaatatatatatgccaatatctaggaggaatatagatgtgaaagtcctcaataaagtattagcaagacaaataacacattggattataaaccgtgaccaggtgggtttagccctaggacacaaggttggtttaacatacacaaatcaatcaatgcgacatactacattaacagaaagatgaaaaaccacatgattatctcaatacatgcagaaaaagcatttgataaagctaaacatccttttattattataactcttcgcaaaatatgtatggaaggaaatttcctcaacatcaaggctatttatgaaaagcctatagctaatatgatcaacggtggttgtggggtggttgtactgaaagctttccccttaagatttgctaaaaagcaaggatgcccactcttaccacttccatttgtcatagtaccaaaaatactagcaggagcagtgagacaaaattaataaaaggctttcacatctgaaaggaagaagtaatattatttctgtttgcaaatggtatgatcgtatatgtagaaacccctaaggactccacaagaaaaatgttagaactaataaatgagttcagtaagtagtggaatacaaaatcaacataaaattagttgcatttttatgcaaaagatatccaaaaaattttaaaaaattctatttatgataacatagaataaaatatttaagacccaatttaaagaagaaagtgaaaaatacgtacaaccaaaactataaaacattgaggaacaaattaaaaggtaaatatatgggaaaatatcccatgtttgtagactggaagaagtaatattgttaaaatttccatactacccaaatggatatatagctgtcccttggtatccacgggacatgggttccaggatgccagtggataccaaaatccaaagatgcttaaatcccttatacaaaatggcatagtatttgcatatacctatgcacacccccctatatactttaaaacatctatcgattatttgttattacacctaatacaatgtaaatgctatagaaatagttgttaccatatattatttttacttgtattaatattttttgttgttgtattgagttttttgttctatttttgattatttctggtctacagttgcatccgtggaaatagaaggttgactgtacaaatttaatgtaatccctgtgaaaatctaaatggcattttttttcacagaaataaaagagcattataaaacttacatgaaatcccaaatagccagaacaatcttgaggaaaaaaaagttggaaatactgctctttggatttgaaattatatcataaatctacagtattaaaaagagtattgtaatgccataaaaacagacacataaactgatggaacagaatagagatctcacaaataaacctaagcctatataatcaactaattttggacaggaccaccaagaagatatgtggggaaaggacagtctcttcaataaatggtgttgtaaattgtacccttgtcttatactgtacacaaaaattaagtgaaaatggactaaagacttaaatataagacctaaaatcataagactcctagaagaaaacagagaggaaaaagctctctgacagtcgcctttgcaaggattttttgaatatcacatcaaaatttcaggcaagaaaacaaaaataaactagtggaactacattaatctaaaaagcttctggaaagcaaaagaaaaacacagcctacagattatgagtagatatttgcaaaacatatatctgataagggtttaatatccaaaatatataaggaacttgcacaattccatagtgacaaactaaataacccaattaaaaaattgggaaagaacttgaacattttttttttcaaagaagatgtgcaaacggccaacagggaaattaaaacgtgctcaatatcactattagggaaatgcaaatcaaaatcataataaggtattacttcatacctgttaggatgagtattatctaaaagatgagataacaagtgccagtaaaggcaaggaggaaagggaaccctgacatactgctggtgtcggtgtaaattagagcagacattatggaaaattgtctgggagtgtttcctcaaaaagttaaaaatagaactaccatatgacccaacaatcccactcctgggtatagacccacagaaaatgaaatcagaaccttgtggagatagccttactctcatgttcattgcgttatgattcataatagccaagatatgaaaataacctgagtgtccactgacagataaagaaattgtgacacacacacacacacacacaaatattcagcctcacaaaagatagtgccatttgtaacaacataggtgagcctgaaggaaattacactaagtgaaataagcaagacacagaaaaaaatatgctacgttatctaacatctgaaatctgaagaaaatgtataagttgaatacatagacagtagaatggtgattaccaggagtagtgagggtgaggaaataagtcaatgtgtacatggaaacttgcagttatgtgggataaataaatttagagtttcgatatacagctaacccttttttaaaaaaatataaaagcagataataatggggtaaaatgtagtgttttgatctatgcatacattatgagaaagatttgatctagctagttaaaatgtctatcgcctcagctacttaaccctttctaatatttatctaaaatatgtcagatccagagatgtatgaccagattttaacatcatttttaatgtagaattgacagttgtaacaatgattttctcagtttgcttattcaacacccatggaccaagataataaatttaggacctatttaagtagtttctaaaaaggcgttaaaaaaatccccatgggggcaaacaatgtgaatcgaataacatttccaaatgaatgtaatttgctcatttggatgtgagctaagtaaaaaaacgattgtaaaagaaaatgtaagtaatagaaattatctaagaagagcaatgagatgtgttccatctgtgaccaattttggtcaattttttcacaggcatttaatgggtgcaaaatgagccagtcttggtattagaccgttaaaatgcattgtcttctaggagttcatattgtttcccctcccattctgaaaaaaattagaaaaggtaacaacaataaagaattgtggtagacaaaaactcttttgtaaggtatgatttgactcgtataataggtgttacgagtgttgagtggctctgtcagatagaaacagtcaaagaaatgctagtaatgttgtcttgtttgctttacttgtaagtatcttgtgtattttatttacttaatatatttaatttactttaatattaaaacgtgtgtgtgtgtatatatatatatatatatgaatgaatgaattctaatgggtcaggtcatatagtatgtgtgtgcacgtgtgcacatgcaagctgggataacaacgtattatatgatagagtctatctggtgataaacgttcagaggttggaaaagggcattgtgtaccaagctcttgaggtattctgggaaataactgcacaccaagcatttggatattgactgactgataacagtaaatgtacatttattcagctaaataaatgaaaaaaaaagtatcaggcattccaagcagtgaaaataacttaaataagaacacaaaagtaagtctacatttaatatgctcaaagcatcatgtgcatctgtacaatatccaaaatatttccaccagaattaaattttgttattccattattttactataatatttggaggcaaatgcatattaacataatcagtttaaactttgcaatactaaggtttctcttttatttagtacaatgacccaaagttatagaattatttgcctctgatttcttggcaacatatgtatactttactgaaaatttcatctacttcattcttcatcaccctacactcacacagagaaacaaattgataatgagaaattgaaaaggaatatgaaagctcagtgctgatttttatttggttcatgtaaacctctagaagcttagctctattaagattatctgaacctttgtaatactttctatttgaagctatttgcttccaaccagtctatcttatattaattattattttcaattcatcagattatgtggatgcaatggctgataagttgagatatactttgaggaacactgctatgataatcatgatagaggatgcatgggtgattcatagtatttccaactatgtccagttatgtttagtgtttgtgaatcacctatttgcctaccttctctagttgagtaactatatatgtaggtaattgaatcagactattttgctaccaagaatatagcctcttccccgatataaagaggcaccaattacagattatttacctaatggagcattttaaatatggaaggttattaactatttacacttgagtcaacattggaataaaaagttttagctgacaaaattatttgctaagtgtgtacttccatccacatttgccatatattttaaagagcaataaggaaagtcttttaaagtgatgaaattcagggctttcatttaattgatgtttttatgtgacatatttatattaataataaaatgcaaaacagtgaacaggtaatatttaatctttgttcttccttttcttaaagtcaggaagccagaactagtcagtcctatcagtaaaagcaaaagtaatatatccaatgacatttgcttaaatacattaccaagtcctgagaaaggttcttactaatctgggaataaatgtccttatcttgatatgtgtattagtccgttctcacattgctataaacaactacctgtgactgggtaatttataaagaaaagaggcttaattgacttgcagttccacaggctgtatgggaagcatggctggggaggtctcaggaaatcactgtggaaggtgaaggggaagtaggcacggcttacatggccagagaaggaggaagagagagcaggcagagatgctacacgctttcacacaaccagatatcatgagaactcactatcattggaacagtaagagggaaatctgcccctatgattcagtcacctcccaccaggcgcctcattcaatattggggatcacaatacaacatgagatttgggcagggacacagtgccaaactatatcgttctgccccaacccctcccaaatctcatattgttctcacatttcaaaatacaatcatgctttcccaacagttccccaaagtcttaactcattccagtattagttcaaaagtccacagtccaaagtctcatctgagactaaggcaagtcccttcaacctatgatcctgtaaaatcaaaatgagttacttccaagatacaatgagggtacaggcattagctcaaaagagttaaatcgatcagaagaaaggggttacaggccctgtgcaagtccaaaacccagcagggtagtcattaaatcttaaagctccaaaataatttcctttgactccacatctcatccaagccacagtgatgcaagggacaggctcccaaggccttgggcatctccatccctgtggctcagcagggtgtacagcacccttagttgttttcatgggctggcattgagtgactggggcttttccaggtgtatggtgcaaactgtcactggagagaccattctaggctctggaggacagtggccctcttctcaaagctcaagtaggcagtgccccagtggggactctgtgtgagagctctaaccccacattacccttctgcactgccctagtagaggttctctatgcaggctcccccgctgcagcagacttctacctggacatgcaggtgtttccacacattctctgaaatctaggtggatgctctcaagcctcaactctcacactctgcacacttgcaggattaacaccacatggaagccaccaatgcttatggcttgcaccctctgaagcaacaccccaagacacatctggggcctttttagtaacagctggagctggagtgtctgggacatagggagcagtgtcttgaggttgtgcagagcagtgaggccctaggcctggcctccgaaatcatttttccttcctagacctccagacctgtgataggaggggctgctgcaaagggttctgaaatgcctttgggcattttcccctttgtcttggttattaacattcagttcctttttacttatgcaaatttccgcagacagcttgaatttcccccaccaccccgagaaaataggcttttgttttctaccacatggtcaggctgcaaattttctaaacttttatgctctgcttcccttttaaatataagttccagtttcagataatctctttgctcatacatatgaccgtatactgttagaagaagccaggtcacatcttaaatgttttgctggttagaaatttcttctaccatataccctaaatcatcagtctcaagttaaaagttccacacatacctagagcaggggcacaatgctgccaatctctttttgttaaagcattgcgagagtgacctttattgcagttcccaataagttcctcatcttcatctgagaccacctcagcctggatctcattgtccatatcaatatcagcattttggtccaagcagttcaagtctctaggaagttacaaactttccctcatcttcctgtcttctgagcgctccacactgttccaacgtgtgcttcttactctgttccaaagttagttccacgttctcatgtatcttcgtagcagtgccctacctctcggtaccaattttctgtattagtcctttctcgcattgctataaactacctgagattgagtaatttgtaaagataagaggtttacttaactcaaagttcttcaggctgtacaggaagtatggctggggatacctcaggaaatttccaccttcttgtggaaggcgaaggggaagcaggcacatcttataccttacatggccagagaaggaggagaaagcagggggcagtactacacacttttaaacaaccagatctcatgagaactcattatcatgagaacagcaactgggaaattcaccctcatgatcctatcatctcccaccaggcccctcctccaacactggggaacacaactcaacatgagatttgggcaaggaaacaaatccaaatcatatcaatatgctagaatgactcaaacaataaatacgacaagaatattcctcctctgtattgacgctgttcagtatttttctggagaacctagccaatattatatgacgagagaaagttacatgaaatatatattggaaagcacaagataaattatttgaaaataatatgattttctcattatgtaaaatgatctcaaaattaggaaatgtacagtggtaataaaatgatactcagcatagttactttttgtttttcagtttccacaaacaagtgagatcatgcaatatttttctttctgtgtcttgcttatttcacttagcctaatgttcttcggctccatctgtcctgtggcaaataagaagatctcctttttttgtgtttctgttttgagatgaagtctcactctgccactcaagctggagtgcagtggctcactgcaacctccacctccccggttcaagtgattatcctacctcagcctcccaagtagctgggatttacaggcgcccaccaccacacccagctaatttttgcatttttagtagagatggggtttcaccatgttggccagggtctcaaactcctgacctcaggtgatctgcgtatctgcctgccatggcctccctaagtccctaagtgctaggattataggcataagccaccacacctggtcaagatctccttttttttttttttttttttttttttgatggaatctctgtcaccaggctgatgtgcagtggcacaatctcggctcactgcaacctccacttcctggctttaagagattctcctgcctcagcctcctgaatagctgggattacaggcgcacaccaccaagccaaactaatttttgaatttttagtagtgattggcttttaccatgttggccaggatggtctcaatctcttgaccttgtgatcctcctgccttggcctcccaaagtgctgggattacaggcatgagccaccacgcctggcccaagatctcctttttaaaggccaagtaatattccattgtgtataactatatagagagaataaaacagtggttaccaggttgggggtggaaggaggaaatggggagatgtaggtcaaagtctataaagtagcaaatatgtgggataaacaagttgaaagatctaatataaaacatgaggattatagttaatagtgtgttgtattcagaatttttactaaatgagtagattatagcttctcgtggtcagagggtgggggaacgattatgtgagatgatggatatgttaatttctttcattatggtttcattatggtaaccatttacatgtgtatcttatagcatcatgtgtataccttaaaacacacaataaaattatttttaaaaaagagaagttccaaaatctatgtagttttcttagaagtaaaccgcacaagaaagtataagcttttttttataggaagtttaaagttgtatataagtacataaataaagacatgaggaaaggaagtcacatatgatgaaaatgctagttctccctaagttagtttgtacattgaaagtaacttcagtcacactcgcatgttcactggagcactatgcgtaatagcaaaatcgtggaatcaagttgtgtccatgagtagataaagataatgtggtgtgtatatataatggaatactaacgagccacaaaggaataaaattatgtcttttgcagcaacatggatgaaactggaggctatcatcctaagtgaaataagtcagaaacagaaaatcaaatactgtattttcctataagtggtaactaatcaatgggtacacatggacatacagaattgaatactcaacattggagactccaaaagatgggagagtgggaagggggtgagagatgaaaaattacctattaggtacattgtagactatttgtgtgatgggtacactaaaagccgagacttgatcactacacaacatatccatgtaacaaaattgcacttgtaccccttaaatctaaagttcctgaagttacttcaatcaagatctagatggtccctgacttaagatggtttgactaatgatttttcaactttatgatggtgtgaaagcagtgtgcgttcagtagaaaccgtactttgagtacccatttaatcatgccatttttcactgtcactactgtgctcaatgcattacacgatatattcagtactttagtttttatagaacaggctttgtgttagatggttttgccaaagtataggctaatgtaagtgttcttgcatgtttaaggaaggctaggctaagctataatatttgacaggttcagtgtattaaatgcaattttgactcactatattttctatggacaatgggtttattggaatgtaaccctgtcataagtcgaggagcatctgtataattacacactcacatgcccacaaacatgtatgtatgcgactctctgtgtatctatatttgtattattttagaggatataacagaaccctagcaataaatagaatttatctcagatggtaaaatgaagataattgtattttaaaagttacagaagtatatattaacaaataggtgacaagaaataatctagagaggagcaatagtaggaagtagttactatttctactattcctactatatagtagctgaaaggaaagggggaacggagttcagtgaaagctgcaccaatggagggaatgtagttgttggtagaactcagatactacattatgcagctctggagcagggaaataatagagaaatttccccagctttctctttccctcttctttcaatctccagctggtacttcccaccagcttaatgcaactggaatctagccagctaatgatcacaggagatacagtgtgaaagggtcagccacttagagaataagcagagaagaaagggtgtttatgttcagggtgagcacactgaacataaatcacatgaatggtaagagggattcagttttctagataattctaaaatttgtttaaatgtaaatgcgtgagtacagttaagaaattattttcaaacaggtgatttgctttagtagattttataacatacttaacatagtatgacatgatagagaaataatttaatggtgtggaatagatattttgacaacattcccttttatttaggtaaatttagtacacaattagggtgacatttcatgtctctagagatagaataggttagctaataaagccttcaactgtggaaacccaaggcacaacaaatactaagataactttcagataatgattgaatgtgaataaacatttaaatactttattacaatgtagaagaatattacaataatattaaggtgatataaaacctagaggctgtaaaataccgacaaatttaccaacacaaaattaaaatattttccattgtgaaagaccattaaacagtaataaaacctatgatggactgcagaatgacactagtaataaaaaatcaataacctcagtatgataacactcctacaatgaatatacaaagtataatattttaaaagtggctacatattatggtcaggacattcacttgggaaaattagaaatagcccatcaaaataaaattaagcttaactaataaataaatgcatagtacaaatatcttcttattatgagggttcatgtaaataggccctgtgtttcttttggaggaaacacaacttgtaatattttaatcagacaatttagtattatctttcaaaatatgtaattttacatatatttgatcctgaggtttcacatttaagaattagatatatagtaatactcatacatatctacgacaaatgtgtaaggatgttcattgcagcgttgtacacagtagctccagtatttttcatgctatggactgttaggcagatatatctctaccattggactataggcaccataaaatcagggtctaggtttgtttgtgtttgtttttatttttgctcactatttcagctgcagtgtccagcataatcctcgacttatggcaagtgtccaataaatagttacagaataaataaatggataaatgaatacatgcattactgaaattaattttgaagttcacattgtatatatacatgtgtatatacattttaaacttgaaatttgctgaaaacatactttatgccaggcattgctctaaatgccttacttgcacttaccttcttggaaaagtctttgcctcattttaccaatgagggtatgaagaaatgaagaaattaagtttcttatccaaattcataataccagtgagtggtaaagctaaattttgaatctttactaattgagcacatcttaagaaagtacatgcatagacagtgtatatgtttaatctcattagacaggcagatgagtatgataaatggatagctaaaagaatggctgaatggatagatgcatggatgtatggatgacatagcatctggtgacaagtattacttctagctaatgggactgtggtgctgtagagatatggggtactttcactattaactttaaatgcgtctgtactgttttagttttccactacaataagcatgtatggcttttgtaataaaatgtttaaaagtgagagattaaatccagacttatgaaattaaaatatcaaagacaactaacggttgaactcttggggccaaaaccgtcaatgggatgtgttttctctgagggaaagctttcctaatcaaggggcacgttcccattgagataagagtggaaatgacccatctggtcaatccaagatcagagcccatatggggactggagctatgataaggagtcaggctccataggatatagtaattgagatagttataccaagcccctgggtttctggtcatcaggaaagacaggcccctgctagtagagctctacctgagggagaggtatttgagagaggccgacatttcagagtcaagaagaactggaagctataccaagaaaatgggttatgtggtatttagcatatcagttttaaccctcatccagccactgagaaaaggaaagaagaaattttaaaattgcaaatggacaaaaggaacattcagtaattaaaatagcagtaagattctacgcaaagcctttccttttctctatttagtctttgaagttgctaatatctagtcaaagggagttgctttccaaatatgtaatgtttgcatgcatattatagttatatattagtgatcatattgtttataaatgtgtgtataccatcctaggtttttgtttctttattgaatccctttctcatatatctgagcttaaaaagcattttttacaattatcattatttggtagaatcctacccaccgctgactcatagttttagtgagatgacaaggaattcacacacttgaatctttcaaacccccaggtatgcagacgcttagcacaaaatttttggaagctatgcttccaaagttctaaggagtctgcttttcctatcctcagtctgagagcacttgagtacatttttttttctgtagatatcagtcaatattatttttgaaaatacgtttttgtaaagcacggtgctattttgtagtgtgtatgccaaagtttagaacaatgaataaaacattagttttcctgtgtcttgagtattttcaatctgaatttaaaatgtactaactttgtcatcatcactcataggcttcttgattaacctgctaatgctctctaatttggaaattaatgcttctttccctatcacttaaaaataatctgatacagtttctagagcatgagatgttcttcaaatcaagtcttatttttggaaatgtgatcaataagaaaaacttcttgcaatacaataggaagctgaggtgcattatgcttaactttatccaaggtcacaaaatgaaagaactgggagccaaaccaaggactctacttttttttttccactttaatcagactgtcacttattggttgtatgaccttgggctgtattcttaactcacaagagagtggtgaatttaaatgaaaaaaaaacataataaaagttcttgtatataattgatacttgataaaaactaattctataccaaactgaatctcttttgcagaattttgtagggagaaaaatacaggctgctcctgttccttgctatgtgctttctgccccttcaagcagtgctcaattttcaacatgtgtcttactctacattcagggggtgtagaccatgaaaatgaacctttattcccaaaaggttctctctccattcatttactgatttaacaaatactgagtacctactacttctcagtcattggtaaaacaatctaaaggaagttcctgcctttgtggtttttatattcttatataaaaaataaacataataatgacagtttgtgacaagcaatgtaaaggaaatcaatgtaaaataaagggaaaggggttgggcttctttaaatgggataggaaatgcatctctgaagaggtgccatatgagttaagacctaatgggtgagaatgaatcaaaaatgcaaaaagagaaattattttaggtaaaagagcaccaaatatgaagatcaagaggtgtaaaatggccttcggtatttgagatgcaaaaacaaaacaagaccaatgtgtgaaagagaaagagggatgacattagagtgcttttagctaagtgtgaaggattgggtcatgctgtactttacaggcatggaaggcagtgtcttttaacacatacatcaaattctattcactattcaaaaaatatactttagtatatacattttaatgaaaatcaatctcagctatgttttacgcattcttaacatcatttattacattctcttttataaagttatcccttatcatcatcatatttgtgttacatggttttggatgcttactctctttttcacttgtacctttctccatcaatgcttcacatttgattatcttcacttctgtaaatttctaaattgcatttttttcacattggaaattacttgacatccatggatattattgtatttgtagttgggaggtcctaattacaatggtggaagccagaaactccaaactcaaatgaaatttcataagtactgtcaaaaggaaaatgtatctttgtaatttgaaaatgggttaaagtttgctacttcttgattgggtgtgtttcatcagcatgcctccagtagtgcttagaaaatacacaaatgcgtgatgttcgtccactggtttcagttttcagttagagtactactgaaaactttggattagttcaggaaaacttaattcgccatcagttattttgtcagttgttgaagtttgtgtgtgatggtgttttgctcaacactgaaccccttattctgatgttgcgtatgacatatgataccaccatgacaccatcccacataaatgttttgtgctgagagagtcacatcagtgttgtatgccatctggtttgtccaatggtccactcgtttcttccttaggaattaggaaatggagccattctaattataaaacgtgattaattgcttggtgaattggtatcatgtctgacacatggtaggcattccacaaatacttaatgaaggcatgaatgcaagcaaacctatgaattacaattatgtgccaattggaaggaaatcaggaaaaataatagatcgtatatattgagcatttactttgcattcattttctctgttaacatcatccctaattatttgcaagatactaatatgactcattttatagataaaaactgggacagggaaattagtgaattttaccacagtcccttacctattagtgatagggtcaggatttgatcaaggtatttttgcctcaacaggctaagctcttttatatgtagtgggtccatttttaccatatttttttcaaaaaaaaaaaaacctgatcattttgtacaatatctgcgttaagctagtcatcattgagtaatttgccccaggactgcccttataccatcaggcatattttgaaatcccaaaatataccagaaagaataataaccaattaaatttatgtcacatgaaataaacatctttattctggcctcactgtgtatcaagtataacttctaacactgtaaacaattaaggttcacaaatagactattttatgttagcgaggaagataaggggtggagttacttctgaaactgactatactttttctagcagcagaggaaagaaaaagtcaatttggttaggtcaaaagcaaagcacgaaaaccgcaggtgacaatcacttaagcagagttaaatgtcactgagtcaaaatactttcatctcaaatgtaaaccctaatagttcttcccacaacaggcatgtcgagagaattgtaagaaagtacagatgtttttctatctgtagtctcccatgctgactgagtagcttccatttgttatgtcaagttagtgtctgttctcctgggtttagaagttacataccaaatatttgttctaaggatttaaatagtcaaggatgtatttttcaaataaaatatatttaacatatgtaaacttaggacaattgtgacggaagagacaattttgaaaatttcctgcatttggaaattgaaaatttaaagatagaacttttcctgttgattagggcacacggcagaaatttgatttttgaaaaacttttcaactgaaacacgtcttatttaaaactcctaaagtcacagttggttgcgaattttcatttaactgacttttccccaccagcttctgtgcatttgctctgaggcactctcaggatgtttggtattaacactgcagagcttccattctgatttaatttccaaaaactatcccagcgaagagggcttttatggaaggcaattcaatgaagcagggatacagtggcaagtggtaaactgagaattttgaaattatttattcgtaacttcctttcccattacagtcattctttcatgagaacatatctctgggatcatttatttaccattgtattattaaagtctaaaatatagcctggcacaaagtaactcaataaacgtttgtggagtatatttttctgtgtctcatattttcaatatagatttttttttaccccctccgagacggagtcttgctctgtttcccaggctggagtacagtggcgtgatctcggctcaccgtcatctctgcctcccgggttcaagcaattctcctgcctcagcctcccgagtaggtgggattacaggcatgcaccaccatacccggctgatttttgtatttttaatagagacggggtttcaccatcttggccaggctggtctctgaactcctgacctcaggtgatccgcccacctcagcctcccaaagtgctcggattacaggcatgagccaccatgcccagccatagtttttacaatcactatcattacttccagctaccattatttactggattggctgcatgataagttccatttgtattggtaggtttaggatttattgattaacagaacgctcaaatagttttcagtgtatcagtcttctaaaagcatctgattttccttttttccctgttatgctctaggcaagcattatgcattttgagccactgtttttttcttttttaattttttgtttgtttgttttttgagatggagtctcactctctcacccagggtggagtgcagtggcccgatctcagcttgctgcaacctcctcctccctggttcaagcgattctctaacctcagcctcccgaatagctgggatcacctgggattagaggcgtgtatcaccatgcccagctaatttttacattttttttttattattatactttaagttttagggtacatgtgcacaacgtgcaggtttgttacatatgtatacatgtgccatgttggtgtgctgcacccattaactcgtcatttcgcattaggtatatctcctaatgctatccctcccccctccccactccccccaccccacaacaggccccggtgtgtgatgttccccttcctgtgtccaagtgttctcttttttcagttcccacctctgagtgagaacatgcagtgtttggttttttgtccttgtgatagtttgctgagaatgatggtttccagcttcatccatgtccctacaaaggacatgaactcatccttttttatgactgcatagtattccatggtgcatatatgccacattttcttaatccagtctatcattgttggacatttgggttggttccaagtctttgctattgtgaatagtgctgcagtaaacatacgtgtgcatgtgtctttatagcagcatgatttatagtcctttgggtatatacccagtaatgggatggctggctcaaatggtatttctagttctagatccctgagacatttattcagccaaaaaacacatgaaaaaatgctcatcatcactggccatcagagaaatgcaaatcaaaaccacaatgagataccatctcacaccagttagaatggcgatcattaaaaagtcaggaaacaacaggtgccggagaggatgtggagaaatttttatatttttagttgagacggcttttcaccgtgttggccaggctggtgtcaaattcctaacctcaggcgatgcacctgcctcgtcctcccgaagtgctgggattacaggcatgagctaaagcgcccagcctgagccactgttttctacttgtaacaagatgatggtgatagttttctgctagttacaccataagcatgttgaaaagcgtaatggaaagtgcaaaagataaaattgttttgtgtttctcctggataaatataggccattactttttatcgttattaattttatgatgaaattcaatcatcttcatcaacgcaaattatttccattatgacattttaccgtcctttaatgagaagcattgttactaaatggtaaaagcaactgcttgtatcagtgaatgaagtgctaaaaatggattaattaaggagtacttaatttagctaaggcagaacatatcttgcagaatgttaaaaaatttaacatgggaggagttgtgcaaattttaattaaaatgttgtatatctattgtatatagtgacttgtaagtagagaatacatgtatgtacaatgcagtcagtgctgaatgccaaatacaaaatattaaaaataacaatatcatgctttaatgaattagtccattgccatgatatggtctacaacttagaaactccagcatttagatatcagatgatattataacataaatctcttcgtatgcaagcctcaaaaaataatccactttacttccagcactttgtccttttagaatatcacatcaatgaattaggttattgtttacaaccataggttttggttgtgccaacatataggcctttctgttttcatattttgagcattctggctatggctagtttatgaccagaagtgccttctttccagtttctctattccttttcttctcagtgaatttatttatttttgtttcctaatacaaaccctgtggggaggttgatgctcatcatggtttctaaatgacatcctctcacagtttttgttgtttaataaaactcttaaaagactgaccaactaaagctttgtgagtgcacatttatacctgctatctttgaaatcttgcttgttttcaattacacatgctatgcattataattctgtatttccattcctgcctgtcccttggcagaaacttggcctgaaatttagacagtagagcctcttctttagatttcccagcggtgtttgaaggttacacccagcgactggctaatcggacttccctgaggttgactgcccaagattagttttgttgaaggcactgctttcatcttacttactcacattgactttcttggggtgagggcatgttgaaagcaaactttgtgcgatacttggtcttcaaatacactgagatagtatctgagagaatgaggttaaggtaccatggcagtgtagtgcaatgactggtttctaatctgattttgactagcctttgaatttgccttcagaccgccatgaggttcaacttctttattcgaaaaatgatcaaatttcgctaaatgatttatttgttccatagtatcctcaaatatgaaacactcatcagaaacggtgttattgttcataaagtaaaatctctagcagtattgtgagttctcactattttcattctgagacggcttcaaagattggataagcaattattaaaatctggtgtccgtgagcattttatgtagtagagtcttggtgtaaaattacgttcatgtaattgttaagttcttactttggggattcagccactgctctcatttcataaaatcttaatgtcgtgtaataagaagtataaattacatcccatcattttcatactcctcaaatactttatagtactcattatcataccattgcctttagtcactgtcttacataattctcatcaatttctatgactttaactgtcctctgtattgagtttcttaacaaatacttaggtgatcacagagtgccaggaattggccttagtgcagtcatcataaatgaggattaccccgaagtccataacatttattttgatttcccataaaaagtaatgtttataattatggggtggctcatctgctatatactcataatctaacatagtctaagtatattctatagcacatgacaatcacttagcacatatggaataagtgataaatgctttttccttctaagtaaattcttctggcttcctgttaatagtatacaaatggtctcctacaactaggtttgtttttgtgttaatgatagaaacagcaaaaatatgacaaaaatgacaaaaaaatgcaacatagtaatggtattaaggttcaacaaactttacagttttactaaacattggatttgggcttcataacatcttaaataagagggaatgctcctggtcaaccacagtctctgaaaggagcgtattcttaggttttgcggggggagtcagaagtccagcaatctaagaacatttcagattgggaataggatgatgatagctttagaagcgtggtaactcaggtgagaccattgttaattagtttgagaattatcttcattgaagtgaatccactctggcaaagtttcagaagggagtgtttgctgctggttggctgggggaagcatgataagaatcatggaggaactaattgttaaatgaataaatagggtagattgaaacttttgttggtgtctacttgttaccatggctgcagaacaatcagtgtcctctttcgtcctcttcctcctttgttttattgtcagtttattaatctttatatcctaaggctgtagcacataactttgtatataggcatttccaaagactgtggagtaaatgatttgaaaattgaatgaagtcatttttgatccatcttagaatttttgtcattcattgacttgttttcatttcccccgtacacagttgtaccttagatcttgaacactttatatctggattatggtcctagcctcctatttctctcaagttttcctccagcaatccattctgtacttaaagaatttactttaataaaattttgatggtgtcaccctctcattgaaaagtatttactctctagtctattgaatgaaggccaggttttctagtttgctgttgatgatccctcagttttctatgtacaatctaccagtttcatcttagttttcactactctactctctctaagacacacaaagccactgttgccaagacatcgctaatgtgtccctacctctgcatgtttattctacatattcccactgccccgaatactcttccccattccctcatttccagctattgaaatcctatgcataattaattcagtttcctatttaaagagaattgccttatcctccaatattatatgattttaaaaatctgaacatgttaaacaactggttgtgccaattagaggaacacattttaaattctgttcagcaatgcaattactttgtacttctattatttactttcttattccaaattagaagcagaattcatgaattttctatctttcaaatttcctggataatccattaaaatactttgaatataatagatttcttgaaaatgtatgttgatgaaattcaaaatattttagaagacctaaattcctttcttcaaaaattacttatttctacctactggcagttttgaattccacataatctcagaagtgggatagtaatagtttggggcaaaatggcaatagtttggttaaataagtgcatatttattgtaatgactgatatttatgaacagctgcatttagtccacatgttttatgtaaatgaaatttattacaatgtttgaaattttttggggggcaataaaaataatgcttggccaatttttcaccattttttactttttataatggcatatatttgagaccaaacatacatgcatgtgtctatgtataacacagcagtgaataggcacaggctcaaccctttttgttttctcacatcatggttttatttaatatactaaaaatgaaagagctctaagttatgctaatcacaggtacagctgactagttactagtgagaaggaagaacattttctagaatttcaagatacggtgaagtatagtatctactatataagaaacaattggtcaaatattttgaaaaacaattatcaaatgaattggagatttctaggcttcagaattccaaagctaagtttgtaagattattaaggaaggcagtgttcatgcacaaaatattatttagttcttctttaaaaagtacttgcaaaaattactttgaccatctgttgattaataattaaagtgtaataagttgagccatatgtgttgtataactttgtacctttcagccttgtgcattgaaatgtctaatatcatttgaataaatgaataaaacaataaaacgggagatgatgtaacagtctgcttataagtaatgtttttggcccttattcaaaatgtagcagactagcagtttcagcatcacttgggagactattgcaaatgcagagctccaggctctaccccgatctattgaatcagattctgtagttttaaaagatccccaggtgattcatatgtacattaagaattgagaagcactgtattgttctacggatagaagtagaccaaggaacattaattttttcgtctcttgtaactctttttaaaaatactttaaaaatagctgttctgattaatcatggttctgatacttgcaaaagaattgatgaagtcacttgttcaacctgcttttgtgctaacggacttgagactttactcttggctttttcacttataatcagaacacctgatcagaatatacatactgaatacagatatcttaatagtagttaagctaagataaattgtatggcaaggaaaatacattgccacattaccttgacctcctgccaggatttatgtttatcttttatctttgatttttatattcattaatgattaaaaaactaaaattgcatacatttatcatgtacaacacgatgttttgaaatatgtatacgttctggaatggctacattgaactaattaatacatgttttacttcatatgcttagcatgtttcatggtgagtatacttaatatctactctcgcagcaatttttaggaatacaatacattgttataaactaggttgtacaatagatctcctgaacttatttttcctatctaactgaaattttgtgtcctttgaccaacatcttcccaacccctgccccacagcccctggtaaacaccattctactctctacttctatgaattcaactttttagattccatgtgttagtgagatcatgtggtacttatctttctgtgcctggcttatttcacttaatatcctccagatttacacatgctgtctcaatgacaaaatttccttctttttaaaggatgaaaaaggatgacaatgaaatgctagcatttcatagtcagaacttatgtgttaacatttctagtactaatgacatacttcacataaaggattactttacatcttggttcactggaatgagtgcagtaagtaaattttaatgccaagtagcaaatgaatcttttgaaggagctgccactttatatgtgttattacaaagtattattgactttaaatgctgcgtttcattcactttctggatgtggcaaaggatatgaagtcagatcaacttaatgtgcgggacttttacatttgtctctaatgtctgagaaggaaagtgatattctactttatcccatgcaccacaatgtaaacaaatatttttaacatacacggaatagtaaaaatcattatatggtatttttctgtttaatttatattgtggatacatgactcatttcagcagagacttatttagctctctgcatactttaatatcagcaacattcagttaaaaggtatcaggtttctttactgagaaccaaagcggtaaaccattttgtgtatttgtttaattaccagtgcaccatttgaattgacatgttaatataactttccattggagggaaaatgtaatcttttatttttgtttcttatctaatgaaagctactctgttagatgggctagtttggcaatttgacttaggaaaaagtaatatggaatgaagtttttatatgaacaaggaaaataaattaactttactgctcatctcattggtctgccaaattggaaagacattttaggcctcattctcatgttctaattagtctctggaggacattcatggacaattcactgttcattaatctatcgtcttcctttaactttgatttgttcattatccttttagagtctcaaatatagaaaccaaaaattgatgtgtagtgttaatgtgcttacagatgttgataccacctatccagataagaagtccatcttaatgtacatcacatcactcttccaagttttgcctcaacaagtgagcattgaagccatccaggaagtggaaatgttgccaaggccacctaaagtgactaaagaagaacattttcagttacatcatcaaatgcactattctcaacaggtaaagtgtgtaaaggacagctactattcaagatgttttctgttttatatgcatttttaggtattacgtgcacatatatatataacttatatgtatatacacgtgtatatatacaaagcctaatgtatgtatatgtacaaaaagagacagactaaaccttttcaattttgcttcattgactacaatattcatttcaaaacatattttaaaaatactattcatatgtaccatatcataggaatatagaacataatatattaaatttccattgtgtaacacacaatgaaatgaaaggcaaacttacgtacatattaaactctaaaatcttcatcaactagaacaaagagctagagaaagattaaaggcaaatacagtttttaatcattaaaaaatactttatgacaatatgatgtacaaagtcagattttgattattcaggataacaattttgaaaatagaaaagtgttttaaactatttcaaataaacaataaagaaaaacatgatgaaattcttcgttacataattgtatagaatttagtggggttcttccatgacattggcttgttctttctctcaacagtgggtggtttggatgttttcctatgctttctcaggcacaaacaacagtgaagaaacctttagcaacatttctgctgaatgtgtggagagctcttaggccaaactctctcactttgctgagctagctctgtattagcttatgaaatttttagtcctttccagggtatggacctgatgaattctgtttttatttactttggatttagagaaaattgcttatggatgcctgtttttgccggattgaagagtaccatcccatataaatgttggagttgtgttactttggaatcctcatggctaaatagcatgctcatatcttcccagatcatttactctccaacatgatattaagtgccttcattctgggagtataccaatttcgaatatcatttatatatgtttagtattaaacattgaatctcaccatttccatttaatgttctgttttctaccatgttggaaagtagtcctttcgggttacttatggtttttccccctcctctctatccactcccccaaacccttctctgcagatcacggtcagtctagcacagggatatgagagaacttcttcccctaagcctcgattcaagagctatgcctacacacaggctgcttatgtcaccacctctgaccctacacggagcccatttccttcacaggtctgtcaacatttactctctgttgtacaaaccagagaactgcttccaagataatctaacactgcttttacttgcttgaatttttcagtgccttttatctcctcgtgaagagctggtttgtttttccaagttttattgattccctcatgtgattctgctttgttattgagtcttctctaggtttactatacgttgattcttcataaatatgaattcccgtaatggtttctactttcattatgtaataacctctaaggttctctttgacaaaggctgctaatggttataaaaaacatgaggctcatgaaaagttttatatatgtaacttcgaaaagtgtaggtacatctgtgaaaattgctaattacactatttggggagatttttctggatctacgtaaaggaaatacatacattctaagtgaattattttatctattcattctaaaatatatattctatgtaagaaaaatataactgcaagcttcttcatatgctctcctttaattttgctaatttaaacttgtgtatagcaggctctgtagtatttataagaaaaagtcacactgaaaccaggtcatattctcggcaatgtttagtactttctatatgaggaagactcagtggagttttccaccctttcaatattgtatggaacccaatatacaagaaatagccttataaatgttacagcgtgggaatgaaatgtgctaggattgctagatttgcaagaattactttttaacaaaaatgatttattttgctcaatggagccaattcgaaacgtgctagaggatgtgatttttatcaaaactacactatgaatgggagtttaaaaatgatagacctgatcctatcggctaaaaaatgtgtacatttttggagactcaattttttgttaagatagtggtgtgcatttaattagtaatttatttggcagttaatcgatgcattagctgaaaattctaagctttgaaatagttatgacctccatccttggctagtttacttgcaaagctctcttctcactctctctcattctggacctcttgactctccatcgactctctagactcaatttatcaccattccctccgttgaaatcaccaagacttaaggaataagtgccacctcctaagattaaggagcatacaccaagcaaagatataggggtttttttccccctctcattatcactttattgagctgccttttctaggttttctccaatgcctattctggtagcacattttcacctcatcaccaccttcattaaggcatcgctcaggtatgactccttaatgaagtaattacaaatggacttacatcttgctaggctctgctcattctacctttgtgtaaatattaccaaatacataatatgtcataaatcacagataattcaacaaattcacttacttgttttatttaaaataagccattcaaataaatgtaatgtttatcatttaaaaaagacacagcacaaatcacaagagatgggggatggggaatgatatattctgtcactaaaggaagcatatcagaagatgatgttacatgtagttaggtttgataagtgtatgccttaattattcacactaagaacatttatttcaaaagtgtcaaaaggactgagctttcactgcccctacaggctgtacctgctctacttcaaaggaactcaagacaggctggatctgattccatcagaaagctttattaaagtgtttacttgctggtctacagagaaaaataacgttctctataagaggagagagccatgtgggtgactgtcccctatggaaaacacgtgcatgccctcactccccagacacatcactctgctttaacttcatttatttattcaacaaataagtattcttaatcacagagacaaatggcttttattcagctctcctaactttctaccactgatgaaacatttttctcagcctctacactcagcgggttcttcctctctgactattctgtgtctttcattacctggctctttctgttcttccaacttctttagcttatgaaactcatgggaaatatcttggcattcttatctctgtacttgttcttttatcaacataatttaataataatttaataacctggcttcaatctgtattcaatctgtatgcaaatgatcattgtatctctgtcttcaccacttccaatcttacttgagttatagccacatttccaattaattttcaactctttgtatgtatctataccttgatatccactaatatctcaaacctagtatgtctccaagtgaagtttattatgaagtttcttgtccattttttaatgttattcagagccctaataatacaatttttttcgcttaattttgtccatataacaaggctactctcctaaactgcctcgaaaagatttatgatatattaatattttatatttttatgctcattacacacgtatttcatgttccttcaaccaaattacatcactcgttctcccacacaggtgccccaaaattttccatattagcttttatgcttcccttagctcagagtgcttttgtctctgttttaaattggccaacttaatttgtatttctaggcctaattagtaagtggcagaacctgaattcaaatttgcatttattcaactccatgcccatgctcattatagtagggtgacgctgcactttctcgacggtgattcttatatattgcgttacgcacacatagagcagtattcatacatttgattatttagcgcttgtgtttgaatcacctattatgtgccaggtactgttattgaagcaagtgacacataaacatgcaaaacaatctgtgtctgaaagtattctaattttattatcctcctgctgtcttccctcatgccatacgtttttaactcatttaataaatggtaaggccgggcgtggtggctcatgcctgtactcccagtactttgggaggccaaggtgggtggatcacctgaggtcagagttcgagaccaaccgaaccaacatggtaaaaccccatctctactaaaaatacaaaattagctgggtgtggtggcgcacacctgtaatcccagctactcgggaggctgaggcaggagaatcacttgaacccgggaggtggaggttgcagtgagttgaaatcatgccattgcactacagcatgggcaacaagagtgaaactctgtctcaaaaatacataaataaaaaaaataaatggtatgatatgagccttttaattttatctgtgagcttttctgtttcatgatcctctagcatagcatatctggtagcagaattggaggccaatatttcatcaaagtcatttccctcctgatgcagtagatgtgacttatgaaataattagagaaatcaaggattaccgtgaggtttcttacttaagcaactggccaaatagagttgccacaaaccaagatgggtgagactgtagaaggaacaggtttgggagtgaacgttaggatttcagttttaaacatattaatcttgaggtgcctatgaggctatgaatgcatgtaaagaaggggttctaagatcagagttgaggataataatttagaagtcaacacatagatgttatttaaatccatcggccaggataagattgccaaggaaaaatgtgtagacagatgagatctctagatgtatatatgatgaggcatcagcaaaggggctgaaaaaggtggctagaaaggggagagaaaaaggagaagatagatgtggcattctggaatccagaagaaagtgttttcagagaaaggaagatacctaactacattaaatattgctgatgagttcaaataacatgatgattgaaaattattcagtgaatttaggaaaacagtagggtacgatgtctgggaaatcctaatatatagcagttactacagtggaattactaacactcctattcactcttaaaactttcccattttgaccgataaagttacatgctctctctagtttatatcccctttaataagaacaatttcagtggtgtgtgcatgtgtgtgtatttggaggtgttgctgattagagtaggttcaaacgacagtaaaagtgaaggctaccctcattgtaacacttaaaaaaacaaactacaccgcgagctgggtgtagtggctcatgcctgtaatcccgcctcttttggaggatgacgcggggagatcacttgaggctaggagtttgagaccagcctggccaacatggcaaaatgctgtttctactgaaaacacaaaaattaagcgagtgtggtggcacacacctgtaatcccagctacttgggaagctgaggcatgaggattgcttgaagccaggaggtggaggttgcagtgagctgagatcggccactgcactccagcctgggtgacagggcaagactcggtctcaaaacactaccctgaatagttgatggccacagggacaaaaacatacttcttttaaattaacccatcctgataactaatcatgtgtctatatgtattagttcgatttttgatgcaacaactacaaacctagtgcccctaatcaacacatattcattattttacagttctttagttcagatgtttaaaacaggtctcattcagctaacattaacatatcagcagggctgccttccttttggaggctgtagaggagaatccatttccatgccttttctagcttctagaggctgaccacattcactggctcattgccccctttcaacttcaaagctaacaagggcaaattgagtctttctcatatgacatcactcttacctatactcttctgcccccctacatctacttttaagagccttcattattacttacttgctatgtgaccttcagagaatttcttgaactctgggcctcagtttcctcatgtgtattattgaaactgtttctaactcatatagttattaggagtgttaaatgagattaattttataaagaacattgcatggtataagcacattgtaagttctcaaaacccggcaaccaatatgattactactttagatacatcaggggttagataagattttgtggtctgatctgagaaaatttttatgtttttattagcacttttatgagaagagatagcctggattctgatttataaacaaactcacaacctgtatagagttcggcaagttaatataccgagtaaaagattctaaggaaaaggatatccttttttgttctgaggttgctgaggaacaatcttggaaccatgcagagcagaacatagtaatgccttttataaagcagaaaaagcacttctgggtgattttacatccagcaatcctgtgttgggaggggatgaggcagaggagatttttcactctatctctgcctttgccccctcctggcacaacttgtccctcagactgtccacatattgtagaaagtaattggcaaacagaggatgggaagccagccagggagaccactccttagattaaaagtatcactaatttgcttcgaggaagcctttatacatcctgatgtgactgaacaaattacccagaaacagaattgttaggttttagctcaactctataaattggtacactgaagacttctgagtagaattttaaaactggaaggaaccttgaagtgaatatatgtgatgatgttattttcaacagttacactcttatcgtttaacttcttttgaaatttactttattgtgtgtaagaacacttaacatgggattcaccctcttaactgatttttaagtgtaaaatacagcattgttcagtataggtacaagttgtacaacagatcttgagaattttctcatctttcatagctgaaccttcgttaattagcagcttcccacttcctcctctccacagcctctagcaactactatttcactctctgatttgatcagcttgagtattttacatacctcttataagtagaatcatggagtgtttgtccttatgtgactgtcttatttcacttcccataatgtccttagggttcatccatgttgttaatgtggcaggatctctttctttttgaatattaatagtaatctcttgtatgtatataccacattttctttatcccctcatccatcagtggacactgaggatgtttccacatcttggctcttgtgaatggtgttgcaatgaacatggcattgcaggtatcccttcaagatcctgatttcaattcttttggataaatatccaaaagtgagattgctagatcaagtgggagttctgtttttaatttttgaggagcaactatattattttccataatagccatgccattttttacttcaccaacggtgtacaatagttccaattattccacatccttactaatccattttttaatagtaggcatccaacaggtataaatgtgatagctcattctgcttttcatttacatttccctgataattcataatgttgaacatattttcatacacctgttgaccatttgggtgtcgtctttggagaaatgtctgttcaagcctttagcccatttttaattgcgtttttagtttttttttttttgccaatgagttgtaggaattctttatatattttagaagataaccagttgttaatataatataaggtcttcaggtctgatcacaaaatcttacctaagccctgatgtatttaaaatagtaatcatgatattggttgctgtctttttgataacttagaatgtagctataccatgaagtattctttatataattcattttatttaaccctcctaatagctctgagttagaaataattctcataatatatatatatggtttgtattttcccattccatagattgccttttcacagtgttgatttgttcccttttctaaacagaagatttttagttttatgtagtcttaattctattttttttgcttttattgcttgtgcttttggaaataattgcgaggatgaatgtcacaagatttttccaatgttttcttctaggagttttatggattgaggttttacatttacatattttatccgtttggagttgatatttgcatatggcataagataagcaccaatttcattattttgcacgtggatatccagtttttccaacaccatttgttgaagagattatcctttcctccttgtgtatgcttggctctatcgtggaacatcagttaaccctatatgtgtagatttatatctgggctctattctgttctattggtctatatgtctgtcttcatgacaatacaatttatttttaattactgtagtttagtaatatattttgaaatcaggaagtgtgatacctccaattttgtacttctttctcaaggttgatttagccatttgggattctttgtggttccatatgaatttcagagtttttctctgtttctgtgaaaaatgccattggaattttgataaagattatattagttctgtagatttctttgaatgtaatgacaattttaagtccttcgatccatgaatgtaggatgtctttccatttgattttgtcatctttaatttctttcatcaatgttttatagttttcagtacatactctttgacctctttagtttattactgttttctttttggtgctcttgtgaatggaatttgtctcctagaaactcaactaatttttgtatgatgattttgtatcctacaactttactgatttttaaattggttctagtgtttttaatggattctagggttttctattcataagattatgtcatctgcaaataggaataacattcttcatttctgatttatatacctttacttttttttttttgcctaattattctagcaaggacttccagtattgccatcggtagaagtggcaagaatgggcatacttaccttgttcctcctgttcctgatttcatagaaaatcctttcagttcgcagttgttgtgatatgacctgcgatctttttatatatggcttttacattgaagcaatttccttctattcctagtttgttgagagtttaatggttttttttaaatagtgaaattgtgttgaattttgccaaacaagttttcagcatctaatgaaatgaacatgtgacttcttatttattctgttaacgtggtgtatcatactaattgattttcatgttgaaccatccttgtatcccaaggataaatctcacttggtcatggtatatgatccttttaatgtgttgttaaaatttgccagaattttgttgagaattttgcctctatatctgtcaaggatattgagttgcagttttcttgggatgtctttttctggctttggtaatgctgaccttataaagtgaatttggaagtgctccctccacttcagttttttcaaagagttcgtgaagcattggcattaattttctttaaaaaatgtttgatagaaatcacttatgaagtcacctcgtcttttgcttttctttgttgagagtttaaaaattacttactcaatcccttacttgtattgatctattcagacttttccatttttacacagttcagatttggtaggttttatgtttctaggaatttaaccatgtttttagattacagtttcttggtgtaaaattgttcatagtggtctctttatgaagattaaaggagcgttattgtgttatagtccaaaaacctagaggtttttaaaaaaatgatttagtgtaagtaacttaaaaacaaaaagttatttaaggtaaagccctcattaagtatgaaaattttataaggatagtataaccaaaatacatcatttattccactaggtgtgtctgcatttaggaaatatgttaaatgcctagcatgtaatttacatttattatttctgatcttcaaaaaaatcttacaaagatgtaactccacaaatggagttacctatcaaaataggttaggaaattgatgcttaaaaaaagctttgaatagtgtgggaatgttatttttcttcttgacatataagtgataattctaaataagaataggaaattttctgtcatccatgtcccaaatacatttcctgttttgtcctctgaattattctattcatgtttattttgatgtaaataagaattttaatggtgttaaacttttcgaagaacattaaggaatattccatagctaagatattaagatgaaaacaggagtataataggaatctagtctgtgggacctgcatatgctattttctctctattactcagttttctcatctctaaaataaagatactttcaactttccatggggtggctaaaataattaatgcatagtgtatgtgagaaaagcctccactatcacatagagtgttagaggggaaagactccattcaccttcttacacaacaggcattcaataagtagttaagggtaaagaaatatttacaacaacgtggatcaacactcttccattttgcattatatttataaatgataatgtaatcttaaaaatataagtcaaaaaatgtagaatgaaagtccatttttacatttggtaaagatatttggagtttctggaagagatgatatataattttaccaaccattctagaaaatgacttttttgtctcttgataccagagataggtccagaggtattgctgtggatgttacaaaaatagagtcaatttttgcgaaccaaggatatttgaatgctctcatttaagtcatgtttattacattttatgggatttgtcggttcctagaatttgaatgaattattggatggaatttagctaatctgtgttccggtgtttaagcaggtcagggcggcttatttgtaatcattaatagtttgtttggatctccacatgtaggctagatgcagtatgccttctttaggaagggcctcttaaggaatatctttttcaaacatttattttaatacttttttatttttatgttttattatttttcttttacaaatcaagtctttatggaagtaagaattcgtgttacaactgattgaccttagttgtgtgactcagttatctcttggcatacctgtgtaatgcttagctcacctgtgtaatacaggtgtgcttaccttgttcaccagtaactattgccatatagcaaatcaactcaaaacttgggagcttataaaaacaacattcgtttttcttattatctcttttgattctgggtctcagatgggttcagggcttctcatataggtgtaataaaatagtagatgaagctgaagtcattttgaaggcttcttcactaacatgcctggtggctactgctggaacttcagccagggcagttggctggaacatgtatatgtggccttatttaatctgcagtcactcactaaatgctggctggattccaagagtaagtgacccaaagagtaccaagcagaaactctattgccttttgtgacttagtcttggaagtcacatagtataacttcttccatagtcaggggtccatcctagtcaaggggcagaaacataaacccaactcttgatggagaagtatcagtgttacatccgaagaataacatgtaagatgaaacatattgtatccatcttaaaaaaatacaatctgtcagaacttacaagattcttctgaagaatccaggttagttgggaaatgtggctagcatggtgcctaacaggtgttcaataaagtgcactctacttactgatgactgtacttgttttaggtaagcttgtacagatcttcaaatatccaggctcctgattaagaagtttgagaatgtccttgcacataagtgtcacagagtaggagccgaaatggccacttaattgctttctagcacaaatgaaatttcaaatccatttggaaataatttgtatgtgtaatttaataccaagaatattaagtagacactgaaacctctacacctttcattttacaggtgaagacactcaagctgagatatgctaagtcatgtacctaagattacagagcagaaatatttggtctaggatcctgatatcctgaattttgttaaacatgatgtcttcttaaggattataattattttaagctaattcatcacactgtcacattttctgtagggcgatctctagtttctacattcattaagtaatttgattttcttttttgcattaattttattacaatctattttgttttcagaaaatattttaatatttttaatcttttctctttaaattattaaccttatattttaatgaaactatattcaaagtgttgtaacatcataattaagatacatgacaaccatgattgaaaatgaaaacttagatacatttctttcttttcttttcttttctttttttttttttttttttttttgagatggagtttttgctctgttgccccggctgaagtgcactggcacgatcttggctcaatgcaacctctgcctcctgggttcaagcaactctcctgcctcagcctcctgagtagctggtattacaggtgcctgccaccacacccagctaatttttgtatttttcagtagagacgaggtttccccattttggccaggctggtctcgaactcttgacctcaggtgatccagccgccttggccatccaaagttctgtgattacagatgtgagccattgtgcccggccatacagatatattccttaaaatgtataattagtggatacccatgcctaattttaatccctgctatagaattctggcagcacatatccttgcatattgtggtctttatctacaaataatatcagtgaaaaaatgtaataatgcttggttaatcaacataaacttgttaccaaacttgtagattaacacagagcctcctattatgtcatacatgtgttaaatccatgtgggtctcaaatctactagcaaacttttttgttttcactaagagtttacccccttaagcatgtcaatgtaaagaaaaatattaattcttttgaagagataccttatttagtaataattagagtgactttaaaatcaacacataattaacggtcacatattttgttcattataaagtttaatagaaatacagtcattttttaaattatgagaatgctatcaattaaatctttggggaaataaactatctttggaaggattaatgatgagttgatggtatcgttatgaaactcctcatttctagatcatctgcataccaattcagctacataaagtcatgttcctcttttatgtgtagcaaatccagattttcaagcttagcattttaaatacttacttctattaggtaacttatttaaagtgtaatgatgccaatgatgagaggtatgtataacaatgggattacttcacaataaaacttacttatagtgaatatttatgaaaatgtttattaggtgtctctgggaactctggtcaatttaaaatcttagtacattttatcttcattataacatgtcccaaggaaatttttggctgaaagattagcattataaaaatagaactttaattagaaatttctatattgtgtgtcagattgctaaatccagtggcaattatctgcttcctaagatatgtagtcctctttctgaaacattcaaatttactttataatacctgaaaaagtcatttcaagaagaaatttagatcattaatggaatgagaaataagattagcccgtggattcttctacttctactttataatttaaatttcaggtgagctaggtgattaaagtcattttaactatttggtacctcaaatagttcaggaacaagtatgccggaagcactgtagtattaccattaatttaataattgcttattggccacttgatcctagaagccaggaataaatgtgaaataaagtttttataagctcttaaaaatcttaacatttctattgcttcatagagcatgattatagttaattatttatggagtcaataaaggaatttagtatggcaattcttgcatcatgtattggttatgatgcttttaagaaagactctaaggaaagttagaagtcaaatataaagttgggaaaattattagtaacatttataacatacgaaggattgatagccctcatatataaataatgctgataaatcaataagtaaaactagaatgccccaataggaaaattcataaagaacatgagccagaaaatgacaaaagcgaaaaagcccatatatcattaagtatgtaaaaagacataccatctacttaataaaaaaatataatataaacaatcaaattatttttaactaccagataggcagattgaaacagtgataatactgataattttgcagaacataaagaaacaggaaacatcaaaagttgtaagagggcttatgacagaataaattgatgctgtccttctggtgcataattttttaatcacaaaatttaaatttaggagtaataatctggtaaatgaaatgatgtaagacatagttaaaacaggttttcaaagagggaaagtttaataaacacttgaatagtgatcaccataggattaataaaacttagggtaaatatttttaatgcaatatcatgaaatctttaaaattcatgctatagttatatacttaataccatgctgtaaagatagcactgatacatggttagattataagcaaagttttcaaatagagtatatatctgtgtgttacgtgtgcatatatatgtgtgtgtgtgggtatatacatacagcaatacacatatctaccaataatactaaacacttacatagggagtatgttctattcgaagttatacatatgggttgtctctaacagcactttatctctgtgcctatttccctagtctcatcctcataactagaactctaaatccattatgtatacacactgtgtgtgtgtgtgtgtgtgtgtgtgtgtgtgtgtgtatgtatgtgtgtgtgtgtgtgttttgtatgtgctataacatttcacttttgcttctatggtgcaatttttttcattggaaatttaacaacttactatttttaccgtcttaatttttaaacaaataagtcattattactcagtggcccttgaaatattgaggcaatatgtctcaaaaacttcttgttaggtgaatggttacattcactccttctttctttctttttttttttattatacttttagggtacatgtgcacaatgtgcaggttagttacatatgtatacatgtgccatgttggtgtgctgcacccattaactcatcatttaacattaggtatatctcctaatgctatcccttccccctccccccaccccactacgggacccagtgtgtgatgttccccttcctgtgtccatgtgttctcattgttcgattcccacctatgagtgagaacatgcggtgtttggttttttgtccttgcgatagtttgctgagaatgatggtttccagcttcatccatgtccctacaaaggacatgaactcatccttttttatggctgcatagtattccatggtgtatatgtggcacattttcttaatccagtctatcattgttggacatttgggttgattccaagtctttgctattgtgagtagtgccacaataagcatacgtgtacatgtatctttatagcagcatgatttataatcctttgggtatatacccagtaatgtgatggctgggtcaagtggtatttctagttctagatccctgaggaatcgccactccttctttcaatagaaaattattgagtaattagtatgtcctagaaactaccataaagctctttaccatgataacccaattgtggtttggagatttactaatgtatcacaatatgcaggttaaagactgctgttagaatgtgttactagtcacttaatgtttattaagtgccatctaaaccagtcattctagatctggttattaaatttcactatgttataataactttttcattccaatgtgcactgtgaatcagcaagggaacgctattcattgtggtcatttggaaacccagcctgatgaaacagctactatctaggatactcccagtcactccgcaaagggaaagaaaattctgaaaggtcttgtgctggcaattaattgcttgaactggaagtgacatatctgcttcagttcacaactcacgagcacaactagttacatggtctcacccaacttagaactaagaaatatattcgtattacatgtctcaaaggtagaaagctggaaataaatatgaatggtgttaataactgctacactgctaaatttatgttgtcagaaacatctaaggacaaaatgaactatgaaataaaaacatggccatgctctcaaaatttgttttttttgatatgaactcttcaagcataaaaaattaaattccaaaattgaaatcataaactaagttaacttgctaaaattcatggggtcaaatatgtgatatttgaatactcgctaatagaaatgtctcaaaatgcaataaaaggctttgggggatagtgagccctctgtcagagtagtgtttaagtatagactacctaatgagactggttgtaaaaggcagtcggtcacgggacacatggcttattaatatgttcacttactatgtactggaaccatatagctgtctaagatgagctttcttctcctttgcaagccttaaatccataattctaatcgatgggtcttgtggaatagtggtaactattatggaatgagagacagtgaaccaagcatggggaacatatatggccatattattgcccttaaggaatttacaaactgagtaagtagagaagatgttgagagtagttctaaatcctgaaataatttcactttacactcggaagaaaatccaaaacaccatcgtgatttgttccctataggtatcctaccttctttcctacccttaaccccatttctcagctccagatacactggcctactagcttggcatcaaatacgccaagcatactttgagttcagtgactttacacatgtatctccctcttcctggaagggtttttcccccagttattcatatggcgcacttcctttaccttagactgcaaagagatcttttctgactaccctatttgatatgccactaccattgttctgtcttctttcaaagctttaatttttttcctcattgtagttatcactactgacattacgatatttgcaggtcgtttttccctaatgagtaaaaactccaagaggaaaaggactagaatatatactaggtacataaagcatattgatcaaatgaatgaaagcatcacgtttcttttatatgccccagtttgcgattgtattgtatattctaagagttgagtgaacagcaatacttaagggagcagctgcccgtgaatctaatatattgttcagggttttgaagcaggtcctgcaatataaaccctgctgcagcacagttttacgtcatcttccttctcttactatgaattattaatcccatcaacctcatcgtaatagaagagttacgtataaaagaatgagtaatacaaggtgggatatgctaccttgtatttcaaacacatgtttgatttttccaaactaatttcagtgattggagagatcgtacaaatatggatatataaggcttattactagcgtgatgaatgggatccaagaatcggcagtttatgcatcctacaatggtccatcgactcgtactcaggaagatttccatagagtaagttcatcttgaacagagctttttacgaggcttagataagaaaagaatgaaaatactttaggtgggacatgatttcaataaatggtattactaaagccatggaaataaccctatgcttaagagatggacgaaacagatattttggaatctttgctgctctaagattctttatcgcctaatagcaaaaagattagataaagaggaaaactatcacttactggtcaaaggtagaaaatgtatggagaagaaatcagtgaaaagtgatgtaaaatatgtaactaggaaataaataaggctagagaaggtaccagaagtagatgagcagctgtggactgttacccccactcccgtctcaaatataaggggcgtagcctgagggttttctgttcaaaacaactttgactgtgtgtgtgtgtgtatgtgtttctgtgtgtgtgtgctggggagaaaggttggggtgggtggaaggagagttgatggggggagagagacagcaaacaatgttgaggctcaaaatgaaatttctatttttaagtacattttgaaaatattggcttatataaagttttcactaatttttgaagtaatattaaatatatgagtcttttaacaaatattgggcattcataatttgagatgtaatacctaattttgaatgaaataattgtttttctcaataaattaaagcataagaattattggagatttttcaccattccatgagaggaaattttagtagtgtacaaaagtagattaagatttatagacagcctttggcttggagaaacttactctactcagtgcctgaggaccagttgtgaagacagtcttatttgtgttggacaaaaacgtcaggcctttgaaaaaaacaatattcaaagtcagtattttgattgtatttgaagttcttagtgatgtttctaaacgttacgttaaatattagaaaaatattttcatggtcatatgtgtcatggtcataatcaatatgatagcttagttttttaagagtacaaaaatttaggccaggcacggtggctcatgcctgtaatcccagcactctgggaggccgaagcaggcggatcatgagttcaggagttcgagaccagcctgaccaacatggtgaagccccgtctcaagtaaaaatacaaaaatcagccaggtgtggtggcacatgcctgtattcccagctactcagaggctgaggcaggagaatcgcttgaaccccagaggcggaggttgcagtgagccgagatcgcgccactgcactccagcctgggtgacagagtaagactccgtctcaaaaaaaaaaaaaaaaaaaaaaaaaaaaaagtacaaatattagagcgaaacgaacatcaacaatttagtgaacgtttcttgtgtcagtttcagtctcagtatactgtgaaaagggaatgaaaaaaacatgtttaaagtgagtaaaattgattgacgtggtctttttcagcatgttttaagtgtttttcgctttgccaattaaaacttctattttattatttacctaaatctaccccccagtaaacaaaatagtatttccattttcataaaaggcagttccttttctttttcatcacccccatctttagagatctttgactttctattttttctcactgcctgacattaagattccttctgttaaatgtttttgaattacatttagttcataagaaatgtttcccctagactttaagaactttcggacataaaatttttcgccaattttgttcattcacttaacaaggacaaaaaaccagaaagagttgggtgacaatttccattcagtaaatgttctttactaaatctgaattgcatattgtggaatcagtaaatgtcaagaacaagccagtctatcttttcacaaaaaaaaaaaccaaaacctcgttgttactattttctattgtttttctagtttctattttatttacttttgttctgatctttattctttccttctattaacttcccctgtggaataactccaattataccatatcatgaagcaaaacatataactgtagaaatacaaaaggctcaactataacactggactaagcattggctgatctcccctagcatacctagcaatattaatcactcagataattaggcactgtcctatatttttgtaagatttataactttaaatttttcattacatatttttttccagtgactttgagacttatcttactttttagtgtgttaggtttatcagtggtgattttattgttatacatgacctcataatagttgttttttctttcagtacatttgttttatgtttaaatttttatatttacatgattaacttatgcaaattatatgtttaaaaatctgttttattgccaaagttgtaaggagggagtcaaagttcctagtcatttatttattagaattattcacaggagtgacaacgtgcgtaagtttatgttgaccagtcaaattttctcttcacaaaggacagaatgtgaaaagcacagattcttttttggtcatggggcagggaaagataatataactctgactgtgagagaatgagggaggagtagagaagggatcacatgttagtgtttattcttgtttcgtagaatgtactcatattggcctggacagttgccctttgattttaggagattaaaatatactaagcatgtaggcacccacccatacacacatacacaacacaacacacacacacacacacacacggacacgcaaacacagttgctaatcagtctgacttttatctgtaattctggttctgctacttactaaatgtgtgacttaaggtatattactgcacattgtgctcacttttgtctatttggatattttagttgacatttcaccttacataaaaaatgtgttgaaaattgttagcaagaaacaccatagggcatcatcatctgctttgtgatacataaaacatttgttaaaactgttcttttcttctgtaaggacactcaacagatttatcaaataaccattttaagtgtacaatacagtattattagagacaacgttgtgtagcagatctttagaatttattcatcttgcatgatgaaaattttatgcccattaattagcatttccccattttctcctcctttcagcctctaaaagccaccactctaatctctgattctctgagtttggcaattttagatacctggtgtgagtagaatcatgaagtatttgtatttctgtgtctagcttttttcatttacaatataccttcaaggttcatccaacttgtcacatattgcaagttttccttctttttaaagactgaataaaattccattgtatgtatttaccacatcttctttatccattcagctatcgggcatttacgttgttcccacatcgtgactatttttaatcgtgctataatgagcactggagtgctaatagctctttgagatcctgatattttgctctttttttgataaaatggcttcataatagttatttcctcatatcattattctaaaaattgagctgctaagtataaatctgatcacaaagtaaacatgtaaatattattttttaatcacacatgaaggatttttatagtaactttgtgtaaaggtgggtattttcttgtaagttattggaatctattaattttaagggagcattccaaattttaagaggtagaaagaaacaaaattccagtgcctatgtagtttatttcattttaatttaaattatgagatgattgaatagtgttcacattagaagtataggaagatagtttagaggtcaacttctttggtcttgtatttctttttgttaatgaaattaatgtgtgttcagtggaaatatgcacatgtgaatatactgttagtttctttaaataaattatatctccaaatgatataataccatgaagccactacaaagttaagatataaaagagtttaattgcatggcatatttttacaatacattaaataactgaaaatgtagctaagacaacattgtgactggttttgaaaaaataaattatttgtgtggttatacatctatatatgtacttagaacaaaggttatattcagaatattttacactagactcttttcaattaattttataggagtttcatttctctgaattttcatttgtcagtgaaattacatattttaaaacatgcaaaaataaataaaacatgtaatttaaaaatgtaaaactcttttacatatatttttaaatgtcaataaatgaaaaactcttacatatatttttcaatttcaataaatgaaaatcaggaaaatagtgacatggtcttcaaaaatcacaatttaatagagaaaactgaagataggaaataatattctaattacggacaatgattaacactggcagaactggtaaatagtacactataaaataaaatactacattaagatatataatcagaggacatcatacctcaatacatatgtgtttgttttgttttttaaagacacgggctaacattactaattactgaaggatggagaatgttaactgagcttgtaatgataagccggtgcagataaataaaatggtataacaatcatcacagtttataaaaccctaagagtttgttaaatgtgcataatagcgtccacaatcccgctaacacaatctccaaacatttttgtgtacacatagtgtaaaggatccagaatttcaatcatattctcaaaagaattcattgccccaaaatggcaatgaaattctgagaaaaatagggtatggtgagactctgaggacttggaaagccaggcaaaatactacttatttctatggtacagacagataagtcctttatgttatattatccatgttgaaaatctggtagattgggaagcaggaaagaggtttcatgtttcagctgcaaactttgtgttcgtggaaagacaagagcaagtgctacataagttgagccattcccagaacaggtagtgaaagggctctattgcttcaactgaagaatgtgttatgctcttatgtataagagggattcttcacaccttataaaatgttcatatcccttttacgtgctttgtattatttatgccccagtgagcttacttgtgagataaaagatgaaatttttaactctgtcaactaaaaacaaccttatatatcttgaatgagttgaccaaagtagtatggttagaaactgataggtatgtcactcaacccaagttttccaatttctgggctctgaatcattttattagcctaagctccttcctgagtgttgatcttagataatgaaccagttactcttagataatgtctgtgatgatgaataatgtcacaaaaattactaactgatattggacaatcattatataacaaacattgctgtaaacacttttcatacattaattcaatgtttataacaaccctattgagaagattctgttaatatatccattttacacttgagaaaattgataagctggttaagaaatctgtgcacagttatgcacatgaaaagcagctgtgccaggatttgaacacacacacaatctcattccagaattgattctattaacctgtatgctaaaatgacacaacatagagctttatgaagctatcattagaggaaaggttgggttttcataaacacacttatgcacacacttcatgatttactaaaagtggatgaatatataagcaatataatgacaaattataaatcaggcaaccagaaaataagaaggtaaaatacaggcaggtttaaaataaaggttactttataaaatgaaaggtgaagtttgggaactggtaatgaggaagaataattgctgtgaaatctatcaacagatgacttcattaatcttttttccttgaaagagattcagatgatattaccatctctttcaggagtggaagagagagaattggagagaaatgttttaaagattctgatttatagcaagcctgtgaaaaaatggtgcattaaattcccatttggcatcctagttgtagtaagataatacatcctttctaaaaattccatttgatgaataagcaaaccaattcaaaatgactccattttattgataatagcatcagtgtcattaatgagaatgctttttgactaacagcaattaactagatttggtgaactgagcaattgaacattgaatttgaaatcagaacattcggcactgaagatgatataagtacatattagaatgattgttgattatttaaggatttattaagttgatgaagaacattaaagtctattatatcctgtattatttaggatgcttggtttcaaatgtactcaagatacaaagagaatttgttggctaagtaaagagttcaaggtttgctcaagggtttaatacagagttttattatggatttaaggagaagtctttgcttctctgttaatctaagcctaccctccataacttttcgaactcatacagaccggcttccctcagcagatcttggaaactcttttcccttgtttacagctaaatgtaaagaatatatctttacccaaataggaaacaaaaggtctgagtttctctctgcttggaaactcttagatcatatgcctggcctgaacacctccctgaagcaaagtacatagcagtatcccacttggcttgcacaaaaaccgagcgcatatctagaactgagagtaataacaatgctttccaaatcaccaggctactgtgccatcagagagtagaagaaaggatattgactgtataattgcagtgcttactacagtcctcctctttgaatatccaacattgctatacacccttcatagcatatattcactttcaaagatgctcagactcctcaaaaagagcaagtataaaacattatccagtgattgcattcagctccaaggttgggatatctgggtgattagcagtccctttcaattagtctttatgatccatccagtggactatgactaagtgaaaaaatttgatgtccagtactgctaagtaaaaagttagaagggcacatcctgattaaaactaaactaaatttataaaagaaaccaaattgaaacagatattatatcctgcactttcagagccttcctggtgatttttccttctgttcattataaattttgctaaatacttgtcttcatcatgatatctgaagttgacatattttggggttttgtgttactttattattctacttattgtgttgtttaaaagtcctggtgcttgccctaggtttgagtgataacaaggtgtttttagttagacctggggtttctttggcaatcagatttgtttactatttataggctttcagtatttgttcttatcaattccatgacccagtaacccaaattctatgatttggttttaggcttcaaatgttaacctcttttgacatctttaagaggcctctgtgctttgcacaatcccctgactgagaaaatttgcagcacagggttggggtagagggcatagccaatctttgagtatatctttgaagtatagattacatagaagctgcttcttcatgataggagggatcgtctactttgtcacaaaagtgctttagggaagcactatagttgattttttttagtacttaagtcttacattctgcctctcctgtctctgttcatacaaacattcgatttggagtaaaaatacaaattggcttttccactcatatcaggctccaaattatcagcctctcaaggcgttcacgttataagccacaggcagagagggcttcttcagacaaagctatattttcttttttttctgtacttcaaaaacaagtaaccattagcatgaggttttttctttcttggtttaaagaggccagtaggtggcaacatttttgtttctatcaaatctcctaatagtgttggtactcgtaaggcacatgacttaggataaaatagaccattgtttaatcaactgttttttaatcatgtaccaagtatcattttgagttggggtgggggaggtttatcatccttgtcttctcataattcagcctgttccacattataggatctattaactttcaacaacccacttcctgataccaaagtccatataaactagaatgatgtttggtacaataatggaaaactcttctcaagaaaacttgaaatatgcagacacacacacgcacatgcacacacatacacatacacacacatacagaaaacatccacattggagcagtaacatgtgacatcttttcttccattaaagatttcttgtaattaaaccttgggaattattggcttatgtaacagaaaattccaaaggaatggcaggattctggtaagcctttaatccaaatattcacattgtcatcacactgcagctccgtatctcagtggctcttttggctcttcactcttccgttatctatgccaggtagttatttctttccctatacagttttgttatgatagatggctgccagaactgtaacatttttttctttgcttatgtcaaaggaaaaataagtactttttttctcagtcaagcagaactctggacaccttctggttggaacatgttaagtcatgtttccacagttaatatactgtgttaaagcataaaatgttgtagttggatttttgttctatgtccctggcaaaaaggatttatttaaagcaatcaggacttatgcatgggattggggaggtgattaattgctcccaagccacaagattccttcataaggatggaatatagtttggaaattattttatggtagtatttgaaagagttcagtgttttcccatgatttaataatataaatccttaatagaataaaatatatcatgaattgcaagtgtatttgaaagtgtgtgtgtgtctaattttattggatccagaaaatatgctctattttttcttggaaaatgctgtgttttatatccactgcattttttttatgttctgtacatttcagttggatttctttcaaagggactgccctctatcaatcaaagtcatctttagcataggttaggctattactgatgaatcaaatatttctagagcaatactttaggacctgtcccacaactaatatattcaaaatttagcaaaagtttattgagtacctgttagaagcaaaggactatgctaggtgttctcatatacatgaagataaatatatgtcataaaacaatgacaaattggctttcagaatgtgcttatttccaatatcatcatatttttcttttctgtcatttttcattttatcatataaagaccttgaggggtgttttttcagagaaacaataaaccaatgatggatgagcccacttgagttagttacatactatacagcttatataaagcataagcatataaaaagtatatgcatctactttcatagtttggattgttatttaaatttggtggtattacattttcttctcacagatgactggtcttaaatgtgtactatagaatttacagaaacaaaccatagggtttaataagctgaataaaatgaagctctttatctggttagattactttgtaaaggacaagaataggggagcctcccaggtcaacctgatgtatgattttccatttttctaaataagttttattgacttttacattttaatggaaaatgagtaattagcagaggtgcagattatatttggcagaaaatgattataatatttttatcagagagtaaaatatatgcagaaatagccaagtaatctgatttgttaataataatagtatcctgattatggttttatcttttgttttaaaataacatttatatagggtcaattttgaagataaatgggaacctggtgaactctgtctctttttctcagagtgtgtgtgtgtatgtacataaatttaaaaatcgaagttatagttaattggaataagaagtttgttgaaaacagtttgatgtctggtaattgagaaatgtttatgaatctgacataatttactaaataatggagagagatacattattcagaacattatataagtacctaggccaaatttctgaaagatccaaggtgagagatatatgtataattatcttggtggtaatttactcatgagtagtattgacattgagatattaacaatttgtaccgacccacttgtagctgagtatatattcttaaattgtgttccaacataaactgtcatctatattggtggatctttgcgatgctttgggttaggtcatcaaaacctaagcaaaccctggggaatgtactttatatgtatattattctcccactcacacacacacacacatcctcactgtttagaagtacacatttgtcaacattacaatgcttttggcattcacagaatctgttcaaattagtacagtgttcactactgccatagcaggaaaaaaactgtacttttgaatcatttatttttaaatcatttgaagtagaaaattctgacaggttgcactgatgaatctttactaaaaataaaggtctttgtttacaaataattacatcttctcaaccagtggtttcatgttgcttactttcttaaaattccaaatagaacaaggtttgcaaaaatcgtcacatatacatgttatcactgttgactgttttatgataatttaggtagcattcattgtacacttacaatatggcaggagcatgtggcagttacttgaatggcaatatttatgaggtttaccaccaatcaagcttcccactatacagattaagattaagacttactgaagggtccttgtgctagtaagaggcagagtaaaatagacctaggcatcttgaattcctaaacctatgatttctaagttatgtcttctggcctttgtgttaaaatttatttctaatcaacagtgatacttttaaaatatacataatagtgtcatatgtgaaggtcaaacactagtaatttaatctgtcaagtacttactgatcatctaatttgtgttaattactgggtgttacttgacttgtcctcaggttctttatgcactagagaggagacagacactcttacagctgctttaagacacagtagagataggaagtataataacttttcatataaatcctctgggaccataaattatagcttcataaatcttggcttagcaggtagcagaaggtataactgaatgatgagccttgatagtcaagtatgatttttataaggagatcatcccatagaaatattacttcactttgtggagctaaatgagaaagaagcacgaatcgtcagttcattttgtgactgttcgtttcgtgtgtagggcatatggttaggggaggaggagtaggagaggcggctggaaaatgaggttgaaggacacattgtggaggattttgcatatcatgctcaaggagatacattttattcagtaggcaagagaagggcattggcaggttttgaataacaagtcatgtgtttcaaccctgggacttatgaagctgaatggagaggcactttgcctttaggaaggattgccaaaaaaaaccaaaaagggccatgctgagttgaaagtgtcaaggttgcctccagaataagctaactgtatttggaaatcagggtttattatcaacagatcagttaagaccagtgatagaatcgcattgcaggggctagggtggagagagataacagagtaatcccaaaaagtacatgaaatttcacagagaaaaaaagtacaatcaaatttgaagaggttcaaggacagaatatttgattgattgttttgttgatcgatctatctatctgtagggaactagaggtgggagacatagttaggtacgatttaagagtttccttaggaaagtaccatcacataacagatatttaaaaagactttaaagaaggtagttatgttaaacagtgctgcaaatgaattgaggaggatgcaggtaggggaagggcaactggatctactgttttagaagtatacttgtgtgctgtgagagggatttttaagtataagtgtggaaaacaagaaataatacatagaattacggctgattatgggaaactggaaggaggaaagtttaatcaattctgaggttcagtgatgaaagtaaggaggagatgggatagttcatagaagaatgatgttaatatttcagattgggagagaattaagagttctgataaactcctaattttgatgatacactctgtggtaggaatctacagtacaccgtaaattcctgtgtataacatacaatgtgctatataaaatatgtggtatcaacctataaatgttgatttttcaggacaaaaatgtccagaaaaatgtaatgaacattcagcatacagcttcgataagaagttttaatcccattagtatttaactaacatactcccatttttagtaagtgattattattagtattgattcctacttaattctcttcaatgccgtagtctctgtattttcctcccttcattaaaaaaaaaaaatctttcaagttcaagttttatcagagagcaagatggcatagggaagagagcagagaccatgacatcactggaacagtttaacatgatttgattttataaaacatgataaaataagtatcaggcggcattttgttttaaaacacttgctgctggaattccactattcatatgataacctgctgatcagtaggactctgtctcctgatgccaagtttttagcaccttctacagcaatgtgtgaataatgcagagatgcgaaggaaccttttaagccaacttgagaaacaagccctgtcaaaaacatgatttctcatgactgaataatgcaacagactattccatttagaaaaacatcagtaaatagtctgagttttgatagtgattacattcttacacttgaggtaaaaaaaatattcttgtctcagtccacaaagttgataggcatagggacatatgagtgtatacactgagggtgtttaacaatgaaatgtgattcaaaaatataacaagatttgataagcaaatgggccagcaatttgaaatgcttcaaattatacttaggctctgagatgaaatgtatgtcatttaagtgtacttttttttttttcccgagatggagtctccctctgtcgccaggctggcatgcagtggcacaatctcggctcactgcaacctccgcctcctgggctcaagcgattcttctgccttagcctcactagtagctgggattacaggcacctgccaccatgcccgactaatttttgtatttttttttttttaaatagtgacaaggttttgctatgttggccaggctggtcttgaactcctgaccttaggtgatccgcccgcctcggcctcccaaagtgctgggattacaggcatgagccacagtgcccagccttaagggtatttttaagtagctcatcaagatgcaattagatttaccattatctgacttgagtagaaaactggaaaaaaaaaaaaaaaaaacacaaaagcagagaatggtgagaacttttaagcgaaggtgtagccgacccagtgtcaaatagacaaaatgtagaaaagacaaatattatacatgtgatcttttctgtcacataatgttgacccctaggatttccatcttatgctttcagtaacagtaaactacaatatttagtgcagtattagatgattatcatgtcctaatacatttcctccataaaactagaagaatggcacttaaggtccaatgaaatatgatggttaaatataatatttgtactcccttgttggtgttgcttaatgcatttcttaatcctccaatttatcgtgtcacacagcactaagctcaacaatttattcataaagtggctgcaaatataatttggaacaaacttttttttgttcaatataatttatttatttattgcttgtataatcacacaaaagtgtgagttccatgaggacagagacagttgtctcttctgtttactacaaacgtcttccgggccagtaataaccagaagttgttacctgttaaataaactgaaagtcaaatgtagggtgatttctacgcatgaggagttctagagctcattgatgtcatccaaggtttaaattcttagtgtaatgtattctaggctcatccatgttgtagcaaatggcaagatttcattctttttttaaggactgaataatattcaattgcatatatgccataatgtctttaatcatttatccatggatacttaaacgttgtttccatatcttggctactgtgaacaatgcttcaatgagcatagaagcccggatatctttacaaggttgtgttattttttcctttgtgtatatgcccagaaggagggattcttgggtcatatggtggttttgaattccttgcctcacaaaaccttgctttgtctttgcttgctgtttttttttttttggagacagattattgctctgttgcccaggttagagttcattgacccaatttcagctcactgcacccctgcctcccaggttcaacgattctacttcctcagcctcccaagtagatgggactacaggcacccaccaccacgcctggctaatttttgttattttagtagagacagggtttcaccatgttggccatgctggtctcgaactcctgaccattcccatcaatgatagactggataaagaaaatgtggcacatatacatggaatactatgcgaccataaaatagaatgagttcttgtcctttgcagggacatggatggagctggaaaccatcattctaagcaaactaacccaggaacagaaaaccaaataccgcatgttctcactcataagtgggagttgaacaatgagaacacatggacacagggaggggaacatcacacaccatcgcctgtctgggagtggagggcaagggtagggagagcattaggataaatacctaatgcatgcagggcttaaaacctggatgacgggttgatgggtgcagcaaaccactatagcacatgtatatttatgtaacaaacctgcacgttctgcacatgtatcccagaacttgaagtataataataaaaaaagacacctaggaatcattctcaacaactgtactgtccttgtcatatttatagtgcccacgtccaatacactctaagatcatatatgtcagaagtctgtcatctccccctctttccctacttctgttttgttgaagtcctcagtatatatctcatcaattcattttttcaacagttcttgagttcttatggcagcagtcaggttctgactattacatactgtcattcactggatatctaactggtcttgctgccctcatcttccatagatcattctccacactgcatccagaatgatctttcataaatataaatgtagtaccaatgttcatggtttgactgtcaattcccccaaaagattaccgggaaaacacgttgatgaaacaacgctgagtgtattagacatggcgccataagggaagacactaacttgacaaggtcttagtagtgtgtaaaaattcctacttctcagttcatatttcgcttcccttttcaatgcttccatttcttcttggacgtgttcttatgagagcacatatattttttgcttacttgtaggtttcctccactggactatgatttccttgagggcagctcttttattctttatatccattgtgatctaagtgagtgattaatacatagttgatacatgaatccacaatatgtgctcattttagtattaattgaatacataagacattgcttcttaagtgtgccttaattggcacaataacaaaatttgttgaggatttactgaagaccaggttcttccatgctgtatgtatattattaacatgtttaacttagcttaccaacattaggagtttatattcttgttattcccattttcagacgagaacactaaggttcagtggtacagaaaagaatttgagtctagatattttgattccacagcccatattcttaattctcggtacactacacttctctagcatgtttgataatatattggtaacactcaattgccaaatgtattctgcatatatcacaaccagtatcctgatatatgttggttgggttatgaaatgacacataatttgttcaacaaacatttattaagtttttacagtatgctagccacaatgtgagattccttatatgtactacctaaattaagtaacttaagtaaatgtaggaggatttgagacatgcatttactttcccctctttgatttctaaggcaccacacattccaggttttcttcctgtttttctagcatctgctttgattttaatttgctggttcttccccatcaacacaaattcctgatatgacagtaaccaggggttggttcttagaccacattcattttctcgatgatcttatctagcctcctggcatcaaatactgtctgtaagttgatgcctcccaatgtttacccccagctcagagctttctgccaaactccaaacttagatacacaactttttatacattcctagtcaattcaaatttaccctatgtaaaactaaatttactaacacccacatctgcttcgtcaatagtttttcctgtgtcagtaaggtttcactatagccttccagttgccccaaatgaacatctttgagtcaaacttagtcttgttctttctcacacctgatgttgttgattagaaaactatgccaggtttggccggatgcggtggctcacgcctgtaatcccagcactttgagaggccgaggcgggcggatcacgaggtcaggagatcgagaccatcctggctaacacggtgaaaccccgtctctactaaaaatacaaaaaatttgccggccgtggtggcaggtgcctgtagtcccagctactcgggaggctgaggcaggagaatggcgtgaacccgggaggcggagcttgtagtgagcggatatcgcgctactgcactccagcctgggtgacagagcgagactccatctcaaaaaaaaaaaaaaaaaaaaacctatgccaggtccaccttaaccaggtatatatccagaatctgatcacttctgactacttacatggccaccaccatcacctctggtctaaattagtgaaatagccttttaaacaagcctgcctgctttggccttgccttacctgtaatccattttgtctgccagatggtcttgttaaaacgtaaggcaaatcacatcactcttctgctgaaaaccttcccatgccttgccagacattcagtaaaatgcagtcctgctgttttataagcccatgcacaatcacctcctcctttctctatgtttcttctctggcttccttttccaccgttgttaccgtctctcattccaccgcagtcatagatgcctctacctggaacacatttcctccacatactcacatgacttactctctcatatctttaaatctttttctcaatgatattttccctagtactttcaattccccttccttgcttccttttctccataacacttacatccttctattttacttatttctcttgattagcatgccttcagtgacatgattcactgaatgagaacttagatttctgtctgttttgtatatggctatatcatcattgcctaaaatagtgcctggtcctttgtagttgcttaataaatatttgttaaagcaacactatttgtactaagtgacagagccagaattccatatgattttcaagctcttctctataaaataaatgaagttatgatgtattgaatgtataaaggctcttttgttagttgctcttctacctggcaagtctgtaattaaaataattttgtaaaaaattatctatttgaagtttttttattatttgttcaattgccagtagataggctagacaaagataagtttaccaattgattatggatatcttacattcttattaaaaagcaaaataataatggatataacacattattattttcatgattaaggatatatcacctctaatgagtagatactaaaagagccttaattttctgattcccttatttctcctcaaggcaaggatagatatccctgtgctgatggcatcgaatgcattggcaagcctaaaatcaaacaagctttctagtagactccactcaagattatcatcaatcttcctttgcaaatttggttttcagtttttgtcttcacattgaaaaatagtcaatatattggcaacaaatgtaatgcattactcaatggcaggtgatatcgctaaagatggtcaattacatgctaaaaacaaaggactttgaggtctgttggatgccaaaacctacagtcaattcagtcaatatttttgacagtacagagggaaaaatcactcaaggaaaattgccacagtatacattaaatatctttgtttatcccattttagttattttgtgtgatatctctaaatgctgttctgtatatgctgctgacaaggagcaaatttatttgtttagaaattctgcagcctttccatcctttgccttaactttcttgttgaggtactaatgagctgtgaaaggccaaatgaaagagaaataacacctccagataatctgtactctgataaactactcccagaataattgggagtttatggttgttgtagggcagtggaagaaataagcaatgttggccaactatacggaacaacccgtgttaataaatttgtaaaagaagtttacaaggcaatcacaatcctttcaaacaaatgtcatgcatgtactttcaggcctaggcacaatgttattatctgaaaagcttgataggtaggattgtattttgtcccactatttctaaatcaggaaattctaagcatacttgtgacgatttctcttttaccttaaatggcttccctattccagatttacagtttctgcatgagttttctactcaatttgcataattttaatttacctttatgttaaggtttttgaagagctgccgtactttcatatttggagtttaacatattttaatttatggacgtggcaataatttgatgacctttttagtgtaatataaagcctatatataaaaacttccaaatagaatatgtactgagtttgtaggaaatttataagtattatgcaaatcaagaatatggtagctgattccactagaggctattttgaaaatataaagaaactttgtttttaaacatagtattgattatctcactatgtgacaaaaaggtatttctgtttattctgtttctttccatttctgctttccaaagtagaacaaataagttgaaatgtaccaatgggtgtgttttaagttttgacaggtttcgggtatgattatataccaacaaaatcccagtaatatttgctgcatatttcattgtatctatattttatgtactgatttaaaatttaaaatgtgagtaaattttaaggcattgtgctaatgaaacttatggtagttcattttttatttttatatagacaagctatctgtttagaatgcaaaaattatatgccatatacaatcatattataaacatataaaattggtcacagaaatttctaagggtgaaaaagactggatgaatcaaagaaatctatccacaattctgtgagtgtatgagagacttagaatgatcacattcacataaaatataacacattattatattttgatttttaaattaaattttataaatctagctatctctgggaaatgtttcttccccttgagttattacaaaaaagtctggcaacaagttaatattcaggatttcgtgagacagatactgaattcagttcccatctctgctttttattagctcttcgaccttgggcaagtttctaacctttatgaatcaggtctcctcatagtaaaatgtagacaataatcatcccttatgttgtgaggttaaattagatgatttagtggagtgcttacaccatccctcacaaatggtaaacacttaattcactatacttcagttctggtggtaaattctaaaagaatttagatgatgaagacagcattataatttaaagcacagtctacacagtggatagcacccacttaggagatacacacgatgaactggggttctagaaggacatattataatgtctcttcacaggcttatttaagaattaagaaagaaataaactttaccaatttttaatatacaggttttcagataatttgatgtaatatatggtacttgatatcttctgtggaaaatcagagatccttaataggatgcataatgtcaggcctctctcttatttattagcgtttttggtgctcttgatgtgctgctatgtctatgaacactaaagtgtgtttatagattatgttatcttaagtagtagaatacttaaaatctttgtcagcaaaatcagagtaacctaggaaatctattttactacacagaaatgttctggacatctcatggcaaagtagttgaaaagattgagttatgtactttatttttgaaaaggtcaagtgttacataaatgctgaacattttcaggttggcaagtggctgtgagtactatgttatttctcaaattatttccaaaagcagaaaaaaaccttcaatctttgaaggagaagcttctgtattaacaatattaagaaagagactagattttataagacattcatgctatggagagagcattttaaaaatggatatttggtggtagtcccattataaataggtcagttataaaatattctatacctacagaaaataaatggaaagaaatgtcaaatctgtttaaaaatattataagtgaaaactttcagtgaggttttgtctctgtttatgactttaggacgtttactttctatgttcacctcacttagggttctgtttcgcttttctgctcatgcttccatttcctcagttggtaatatacacatatctgtacatatcctttaatcctcttctagtatcttcaccaaatcagaagtgattgctcttatcacttagcccaccctgattttgagttttttttttacttgaaaatatgagaagtaatgttagtataacaagagatggaaacttatcaaaaggtttcatacttttatttttctgaaatgcaaaagacttactgcgttcttctcagttctatgaaccctaagatcaaaagctttagttgtctatgggacacagagatacagaccctgaagcatgattactcctattaggagccaatgataaaattgaagaactttccactgctttcagccaacaggatagaggacttttattactttccttgaggcagagggtggaatttgcaggtgttaatgaaatctaccagagtcttcccaagaattaataccattctttgaaatggcaggctctgaagacctttccttgaataggaaaggaataggaagagattccaagaatctctttccttgaatagggaagccaacactgcattgaagaaggcagtaagtgaaataaacaagtggagtttgtgtcatttcttgtccctgctctgtcatggaaagatgccttggtctaattctcttaggaaaaaaaatgtcctcatatcagtataaggtaaaatggaatattgttacatgtcatatgctaagagacacattattgtattcaacaaacatatagtatgttatactgtatgtcaggtgctgaacaaaataaactgtctactgtcgtgaggcttccgagatgctacatcacctctcataaaagaacttccccatttccacaatcacacccttataattgtcttcctaattagctcactagttatttatattatttccctaattttaataatgaaactatcccacagaagcactatagatgcccaagaagtagagacaggaagctacccattagttcccccatagggatttctctcccttatgaaggatataccacatctttgtttaaggaataaggaaaagagacaaaggtatgtaacataaataaagagaaagcacacagaatttagtgatatatgtgaaaggtaacgggataaaccaagcaactggtgtatgttaaggaggtgaatatagctaatgtccttggagaaaatttacctagttagaaaagatgtgtcaatttagtagaatatttttacaacctaaaatctaattgaaccaaactcctctttattgttgttagttctctattctgggttgcactaaataaaaacaatgaggcagtgaaagtgattttataaaagttgaatggcaaagggtgatgctgaatgtcaatacaatcgctgtatgttgtctgtgagccttacaattaccctctaaattagtatcatatctattttcaggtgtgtaccaagagtgtgaaattaaaaaactttgccaagttcaagtacacactacctataaattccagaacctgaatttgacctcatgtttattttactccaaagtgaggccgacttaaagtttcccgaatgcggccactggttttatgcagcatgatttctttgagacattgttatatacagcaatggaggtagggcagggggagggcagtgagatttcagagatggctagcttggacatgcaatagagtgggaaagtgacccaatgagaatcaattggagggggagagattggagagaggaaagataatcaacagtgagaagttcagagaaattagtttaaatgtgggaagcaatttcatcatcaggagatagcaatctatggcctgagggtgaaaatagacttgctacctgatttttgtaaataaagttttattggaacacatccatgtttattcacttaatgtattgtctccagatgctttggggctacaatttgcagtgacagagctgagttgggggcatctggtctttagtggtctgcaaaattgaagatacctattatctagccctttacagaaaaaagcttaaggttaaggagtcttggatcaaataacaggaagaataagattttcactgaaattagtgtaagtgtagataagtttctatattttggggacatctcttgtgctaacttctaatttctttacatatagacttgtggaataaatgagtacatagctaagaatattataaatgatgagaaaaaaagcaaaattccaaaacgggctacatgggaatatttatgtttaggttctcctcatagctcacaattaatttgtatatgcaattacaaactctatggactacggtcattctagaggaatattatttaagtgcagtatatgtcaatttgaaataataagttttcacgagatatgtgtattttgttttgatttttttggtatgtaaaaaccacttgtctaaagcagtttacttctgaattattttgcattttaaaagtatccagtgaatcatttttttcctatttataaatgactgattaaaataaataagacttggtgtttttccatgagacgtatttgaaaattaataaaattgttaaacttaggattaaggaaaataacattaagaatttatttggtcttctgagacattttgtaactatcctattttaaattaaatttagtacttttacaaaatctcgtttcaattaccaactcatatgaattccaaccaaatactgacttttaaaattattgaaacatccaccaaacagtacagagttattatgttcatccttcttctctggacttcatgaatctctgtcagccaaggaatgtcggtttgtttactgggtatcccatttttcctcccacacctcataggtgtgacttggatttcctcatcctcatcttggaaataggtccccccttttagggtgtttgtaagaattatatgaaacagtaagaacaaagaaatcactaggctagacgtctttcatgtgccatctaataaatttctgagaaagtttttttattgatgcttatgaaaattttattataaacttgcttttaaaaagaaatcttttatattgggttattaaattgttctaggtacatttctctaaatcttctattattttctctctgaccttccattgatttaggagaatttgccataacagtgcttatttctttttcttccttcttgattttatgagaaaggttctattgtgtggattataatagccaagacagaaagtctcaggtgaagtacaggaaaaaataaaggaataaaatataaaataagttagaaagtaaatgtatacccaaagatataaatggtagaattagagaaattagaggaagaaaacacacacacacacacacacacacacacatataagttggtatactatatatgtatgtgaatatgtatatatgtataaacacatatgaaatatgaataggaatattgggaagacatatatttgaaactatgaatattttatgccatattactccattttcaaggtattgattggttaaaacatattttatataaaacctgaaattggaagcacaaatgaccttaaataagaaattaaaattaccccaaacaatttagtaaatatttattatctgtgtactgtgctgttaggcacggggtcagtgtccccgccttcctacaatgcaagggttagtgtaatatctaaaggtatgtgacttgaaaaacgatgaagcaaaatgactggaaccttcattgagagtatgttttagagagacagagtagagttttagagagacatctgattttatagtagaaagtttattttaaactcacatataagcttttacagatacatttttatagtaaaatctcagctgctagaaaattagagtatatcagtatatgagattgctgtaggtttcgtggcactaacaaaaacacaaggatggatgaactaaaaaatgagtttgtttctctttcagacttacttctcttaaatgttgtgtagatgggagtgatggaggccttgtaggaagtctctgctcattcagggatccatagtcctgttgcccagtttttcgatcatcccctgggacgctgtcttcgtagtcacggttgaggatagctcaccagcttcatgtgtgtatcacgaccttcaggagggaggacgaagaagagagcatatctatgcccatttacgtcttaatgacgaagttggatgcgttatatccaactggccaatacttggttacatgccacatctaactgcaagggaaagtgggaactgtagtgacatttctagatagccaaattgtcccctaaactttctaatactacataaagggtgaagaaagatacatattggaggatgagcaatctttgccagagccatttttttaatgtaggaattaagattaatgtttttcaaaaaaaggcaggggttgcaatcctagtgtctgataaaacagactttagaccaacaaagatcaaaagagacaaagaaggccattacataatggtaaagggatcaattcaacaagaagagctaactatcctaaatatatatgcacccaattcaggagcacccagattcataaagcaagtccttatagacctacaaagagacttagactcccacacgttaataatgggagactttaacaccccactgacaacattagacagatcagtgagacagaatgtcaacaaggatatccaagaattgaactcagctctgcaacaagcggacctcatagacatctacagaactctccacccctaatcaacagattatacattcttctcagcaccacatcacacttattccaaaattgaccacatagttggaagttaaagcacccctcagcaaatgtaaaagaacagaaattataacaaagtgtctctcagaccacagttcaatcaaactagaactctggattaagaaactcactcaaaaccactcaactacatggaaactgaacaacctgctgctgaatgactactgggtacataacgaaatgaaggcagaaataaagatgttctttgaaaccaatgagaacaaagacacaacataccagaatctgtgggacacatttaaagcagtgtgtagagggaaatttatagcactgaatgcccacaagagaaagcaggaaagatctaaaattgacaccctaacataacaattaaaagaactagagaagcaagagcaaacacattcaaaagctagcagaaggcaagaaataactaagatcagagcccaactgaaggaaatagagacacaaaaagccctttaaaaaatcaatgaatctaggagctggttatgatcaacaaaattgatagatcgctagcaagactaataagaaaagagagaagaatcaaatagatgcaataaaaaataataaaggggatatcaccaccgatcccacagaaattcaaactaccatcagagaaaactgtaaacacctctacgcaaataaactagaaaatctagaaggaatggataaattcgtggacacatacaccctcccaagactaaaccaggaagttgaatccctgaatagaccaataacaggctctgaaattgaggcaataattaatagcctaccaaccaaaaaaagtccaggaccagatggattcacagccgaattctaccagaggtacaaggaagagctggtaccattccttctgaaactattccaatgaatagaaaaagagggaatcctccctaactcattttatgaggcaagcatcatcctgataccaaagcctggcagagacaaaacaaaaaaaagagaattttagaccaatatccttgatgaacattgatgcaaaaatcctcaataaaatactggcaatccgaatccagcagcacatcaaaaagcttatccaccattatcaagtgggcttcatccctgggatgcagggctggttcaacacacacaaatcaataaatataatgcagcatataaacagaaccaaagatagaaaccacatgattatctccatagatgcagaaaaggcctttgacaaaattcaacaaccttcatgctaaaaactctcaataaattaggtattgatgggacgtatcttaaaataataagagctatgtatgacaaacccacagccactatcatattgaatgggcaaaaactggaagcattccctttgaaaactggcacaagacagggatgccctctctcaccactcctattcaacatagtgttggaagttccggccagggcaatcaggcagaagaaggaaataaagggtattcaattaggaaaagaggaagtcaaattgtccctgtttgcagatgacatgattgtatatctagaaaaccccattgtctcagcccaaaatctacttaagctgataagcaacttcagcaaagtctcaggatacaaatcaatgtgcaaaaatcacaagcattcttatacaccaataacagacagaggcaaatcatgagtgaactccattcacaattgcttcaaagagaataaaatacctaggaatccaacttgcaagggatgtgaaggacctcttcaaggagaactacaaaccactgctcaccaaaatacaagaggacacaaacaaatggaagaacattctatgctcatggataggaagaatcaatattgtgaaaatggccatactgcccaaggtaatttatagattcaatgccatccccatcaagctaccaatgactttctacacggaattggaaaaaactactttaaagttcatatggaaccaaaaaagagcccacattgccaggtcaatcctaagccaaaagaacaaagctggaggtatcacactacctgattttaaactatactacaaggctacagtaaccaaaacagcatggtactggtatcagaatagagatatagaccaatggaacagaacaaagccctcagaaataatgccacatatctactactatctgatctttgacaaacctgagaaaaacaagcaatggggaaaggattccctatttaataaatggtgctgggaaaactggctagccatatgtagaaagctgaaactggatcccttccttacacattatacaaaaatgaattcaagatggatcaaagacttaaatgttagacctaaaaccataaaaacctagaagaaaacctaggcaatacctttcaggacataggcatgggtaaggacttcatgtccaaaacaccaaaagcaatggcaacaagagtcaaaattgacaaatgggatctaattaaaccaaggagcttctgcaaagcaaaagaaactaccatcatagtgaacaggcaacctacagaatgggagaaaatttttacaatctaatcatctggcaaagggctaatatccagaatctacaaagaagtcaaacaaatttacaagaaaaaaacaaccctatcaaaaagtgggcaaaggatatgaacagacacttctcaaaaaaggcattgatgcagccaacagacacatgaaaaaaatgctcatcatcactggccatcagagaaatgcaaatcaaaaccacaatgagataccattgcacatagttagaatggtgaacaataaaaagtcaggaaacaacaggtgctggagaggatgtggagaaataagagcacttttacactgttgatgggattgtaaactagttcaaccattgtggaagagagtgtgcaattcctcaaggatctagaactagaaataccatttgacccagccatcccattttatcccattacagtaatatacccattactgggtatattcccaaaggattaaaaatcatgctgctataaagacagatgcacacgtatgtttattgcggcactattcacaatagcaaagacttggaaccaacccaaatgtccatcgatgatagactggattaagaaaatgtggcacatatacaccatgaaatactatgcagccataaaacaggatgagttcatgtcctttgtagggacatggatgaagctggagaccatcattctcagcaagctaacgcaaggacaaaaaaccaaataccacatgttctcactcatgggtgggaattgaacaatgagaacccttggacacaggaaggggaacatcacacactgggtcccgtagtggggtggggggaggggggagggatagtattaggagatatacctgatgttaaatgacgagttaatgggtgtagcacaccatcatggcacatgtatacatatgtaacaaacctgaacgttgtgcacatgtaccctagtatttaaagtataaaaaaaaagattaatgtttttggctctagaaccttttgtttaataggctatagaatgagatttttaaaaactaaaataccccatatgtgtacgtatgatacccatttttgtcttcttaactggagcatcggaggcacaatgtagcatttctgtgagtggttctgcaatagtgaagaatgttaaatttgctgacatttaacatcaaaggcaaatcatagggattaacagaaggcgcagagttcgaatggtggacttgacacatgccttcttttagaaagaatttgttagctttattttttgctcagcttcttctgacttctttttctgtttatgtttttaaaaaactgttaaaattatgttttaaatttttgtggctacgtagtaggtgtatgtatttatggggtacatgagatgttttgatacagacatgcagtgtgaaataaggacatcatggataatggaggatttaccgggtctgtactaccatctgggctgtgtcccattgctgtctttctggtattctggtatcttcctcagtgtgatatcagtgtctgtgacttgcgtgcattatttagacttgacatttgatttcctactcagcaacgtaatgaagacgaggtattttcctagtagcttccaaaccattgattgaatttgtggaaattaagaaaaaatacactttgacttatttttaagaagttacgtgagggccggacaccgtggctcacacctgtaatcccagcactttgggaggctgaggtgggcggatgacctgaggtcaggagtttgagaccagcctggccaacgtgttgaaaccctgtctctattaaaaatataaaaattagcccggtgtggtggcttgtgcctgtaatcccagctactcgggaggctgaggcaggagaatggcttgaacccagaagggagaggctgcagtgagccgagatcccaccattgcactccagcctgggcaggaagagcaatactcaatctcaaaaaaacagaaaaaaaaaaagttatattatatttttttaaaagtgctgttgcttagactcttaattcattttcttcatttaaagagattgatcatattgggataaagacgtgttttggaatccaaacaacctggttttaagtcccagaaccaccagttacctttgtgacctttggcaagtcatctaatttttctatttccatttcctcatcctactaatttctatcaccctgatctgttgtagtgaaaaatgatataatgcgtgttaagtgattagcaaattgactgacactaagtactcaataaataatggcagctgttgttattgctgttgtatatgcggtagtagttgtatttgttgttgattgttgccctaacagcaggccatgatttttcctaaatcctcattagggcttaactttgaactcaatttcaggccctatctatattaaaaattacctatttaatagtgtcattaggttgaatgtcatgtacagtgttgcatgatggattaatttctcataaatcacttcagtaatcatttttatgctttgaatagtaccttggtttacgtgttatatctgtgagaaaacacagcggaaatgtgtcaagaatatttccaggtactaatcctggttgttcagaaatgctcttctgttatttagtgaaagaaccgcttggttatccctctgtaatcctttatcttggaaataatcttttactgaggggtaaaaagattatagaatacaccaaaaaattcaccatccatgcattgacttagactccatgaaaaagaagtatgatacatttaaatgaactgagaatgataaaatttgcaaatgttcttgaagcatttatgcattcaagaccaataaaactgtttttgatccaggttaacagtcgtatcatactttaaggctgaatttagataaattgccaaaatccattttatcagtgatataaaactgctcagtgatagactgtgccctctcatagtgtcccagctattttttctaagagctttgtggtttgctgggctgctggtttcactacctacatgtagccacttgattacttatctcagtttgaattgcccaaatcatgcttccagaaacacacagagctcattcacctgtttccccataaaaatcatttatcatttcaatgaactttggcccccaaacacaggcattgcagagcatttcttgggatctagaatgtgcttagcattttatatgcactatctcatctaatctttccagcagccttacgtacgtatatttttatttttcttgttttatagatggggtaactgagatgcagagaggttaaatacccaagatcagacagatagtaaactggattttaaaatatatttatatattcagaagtatcaaggctattgctgtatacttcattagaaccatttctagtcagagaaattctacgagtagaaattatgactagaaattgtctccagaaatgagtgtctagagatttttctagacattgctggactaaaacagtcatttatcatccctgatttttttacctttctcctttctgctctttcaccttttttttttttttttttttttttaaaagagacggagtcttgctgttttgcccaggccggagtgcagtggcgctttctcggctcactgcaagctccgcctcccgggttcacgcctttctcctcctacctcagcctcccgagtaactgggactacaggcgccgccaccgcgcccggctaattttttgtatttttagtagagacggggtttaaccatgttagcgaagatggtctcgatctcctgacctcgtgatccgcctgcctcagcctcccaaagtgctgggattacaggtctgagccaccgcacccggcctcttccaccttttttaatgagcgatgtcttcaaggaacataggtgacaatatctaatacttcctaaatctaacaggcagtaattaagcctctgaagtctgtggataacgttgaataaatttgagtgtactcaattttgggggaaaaaaaaaaaacaaaaacagaatcgtttcatccattcactgtcatgcctctcatcgtaatcattatttgcccaatgtactgaagagaaacataaactactgtgataaagacaaaataggattgaagcataggaaaaataattagttccagttgatgatactggcatcttcattcatgaaacgattggggtctatctttcttataaatagatctataaagaacaaaaaccaactttcctagaaaatctcttcatttgatgccatgacatgtatgaagtgatctccaatcttaggtacaatgtaaaattctgtgatgataaaaacatattttggggtgctgaaacaaagcataagccactttttatatctttatttccaaattctcagattaaacatcgttttattttaaaatgtcttttattccaaggtctctatggaaaatatacaaatgtagaattcaggcaaatttcttttttcgtcggtttgcttagtctgaaattctagagccatttccaattttgttttacaaactgcagaaaaaagtttaatctcaccttagaacatatatacatatacatatcaaaataaacccatatgcacatctgaaacaaaaattgagacaataattgttagtattatataagtgacacagactactatttttctgtttaattttaaaatattcctagtcataacctactaacatgattttatgaaccatgaatggattctgacttacaatttgaaaaacaatagtctatctagacaaataattactcagatcttaaattcaaattttgattataattctgtatatatatagttgaattgatggatataaatataaaattttgcatagcttattcagatttgaatttatctttaagaaggctgtctttgaaatgtttttgttttatgcacatcctcagacaaaatatttaggttcagaatttgagtactagatgtcatgtccttgagtataagtatacaccttttaatattttcttccaaaattcaatcctgtgtaaatatcaataaatcataaagtgtttaatattttgattcaaattgcacagtgtaaagtattgtgttacttgagtattagtgctgtttacaatgcttcgtttggagaagattatttgaactcaagatagttaatgatttttaagaactcttaaatacgagctaggttaaggttcagatttcaaaaagagttaaataatgtttgctcttacacatttttgggggcgtattttcgacaataattttccatctcctgaaacctgaacagtgacttaagaaggtaatcttggggcaatttatgcttcaaaacacttcttatatatgcagaggaatttgataataattacagccgtaacatactttatttagttgttatacaaggtcactctgtgaagtgcattatgcactctttaattcttaccacaatcttattatggaagtattattgttcccattttacagaagcagaaactaaggcttatgcagggctaggtaactcccaaagtcacaagattccctttctttctatatcatcaatttcagcataagtggttggttcatataggaacataacaggagtaggaaaggatatgatagggtttcttggtcgtttgtattttcttgaaaaaattgccttcttgctgcatttgaagcagggtctggttcagataggaagcattatctcccagggctgccagcaaccttgtttactcagttatagacataacacacttacgccatattctttgaatcttactaaacttactgtgagctcaccagacttctgtgcttctagggcattgaaaatgctatatgcaaataggacagatacacatattataccacctgtctcctctgcgcatgtgcatccttcattgcacataggacttcacttctaaaacacaaattcaaaaataaaattatttacaatttcaggatagtatcagcagataatagaggcatgtgtttcttctgcgctcagggccctgtgcaactgctcaggttgcacaaacgtgaagctggttccacctgcgcacatctctcaggctgcctttatatcattttcccccttaatgctgactttgatagttattattaatagtatttagagacggaagagatacaccatggaagttgttctaacccctaagaccttcagaaattgccttactgttagacaagggttccatgcaaatagccctttcagtgcacttaccctctttgatatgatgaagttcggtgattttgacttaccaggatgacctttctctgccacttttatagaaactggaaaaagagtgcatcatttgatgaaaatgtcattgcaataactgccactatgccttgtcatctcgaaggacttaacagttggggaaatttaaaatattgaattttcaaaatttgagcatttatcagaagagcacaagtaagttggtgctggcagcttagtgggttaattcccagaactgagaaggacaggaaatgtagcacatacacaccaggggaaagccaccaaaggttgaattttctctgggtgagattatgaaatcccccaaacagcttctgttgttctacactgctttttgattcctttacaaaaccctgtttgttagggggccccgtgcttgcttgcaatatttgtggaatgcagaagattcttctacaaatatttctccaatatttgtttgttctgctcacctccgtaaatagtatgcctatgtccttgacctcagcaaagtccctcttgagcatgttctcaggatttttgaagcccggcgacctgcaaggagtacactcctcccaaagcaaaacctcctgcaaacttagtagtttactcaaatttttgcccttgataaatgcctttaggttaaagcagcagacatgtagtttatcccaagaagcctctcctgtcacttgagtgtatggttcctatagcatgcaaatctctgcaaacatatggccaggtttacagctcatgtaaactaccccgtctctattacttggcttcagatggggagaagttagagccacgcagagcgctccagcctctccagaggaagcctttctcaccagatttttctaatcgacctccttgcttgctcttacacacctttaagctagatattggattaagggttgtgagaccaattttgtgatcacttcttagcaattttttaacaggtaccctggatcttctctttagaattatggatgcttcgtacactttgctcttggctttagggtccagacggaaattccaagacaaccatttgcattctcacttaatatcctgctaattaaattgggtaaagcatacttcatattttagttcttctaagataatgtcttactatttaaatcgtggccttctggaaataaaggctaaatcacagaagtcattatgctgttagaaattttagatgggtgggtgaggtattttttttctttctaaattttgccttcctttcccctacctccttgttttcttactgatgcctttactggtctgtaaatatttggaaatatttcattacctagggcctctcaggaagagatatttcctttaatgccattgcagaggtatgtaaatataattctgataatgtatatgtaagttattataaataagaaatgaggaaagttcctacagatcaatatttatagcatttaaaaagcaacatgaggtgatatactaatttactccttccagtaatctagaagagctttaatacaatattaatttggtgtggattttgaccgctatttgaaaattgatgtatgcatgaggaagttaaaatgaaaactccctattgtctgtatctgctgttcctgtgtttgataatgccagtggacagtcctagcattttaaatatttcattcgattcatcatttaatgtactggaacaatctgcaaagacattaattgtgtaacacccaatttattttattgtgcagcatttggaagctcctgaagacaagtcatttggcagttcattgatggagagtgaagtaaacctggaccgttatcaaacagctttagaagaagtattatcgtggcttctttctgctgaggacacattgcaagcacaaggagagatttctaatgatgtggaagtggtgaaagaccagtttcatactcatgaggtaaactaaaacgttaatttacaaaacaaaacatatgacttgttataatggcaagtcatcctttttcctcaattactctcttacatccttgtattttggaaatttagttactatgatgtgcttgggattccaacagtcagattttgaagttttcttttggagagcaaccattgaaggcatttctacctgatcggccaacaggaatacgaaagcccaacttctttctcttgtgtcaaggcagtgctgaggcattacttacattcctgagttgatgtatggtattgggcttaacttctctcagtgggagacttttcctgagatgatacactcgtttggcttctttcccttccctgtcctttttcctccatcttcaactcccttgcggaacttcctgggagctcttccttaataaatcacttgcactgaagtccttatctcggggcctgcttctgaagaacttgacttaagataattttccttaattcatattaaaagtggttttgggattctgcaaatacaaattaaattccttttactgggaatataaatctaaatgggccacaagtttaaaactgcaaacaaataaaactcaaaaccacaccgatttacctagagttctaattacaattgttaacttccttctttgtcaggggtacatgatggatttgacagcccatcagggccgggttggtaatattctacaattgggaagtaagctgattggaacaggaaaattatcagaagatgaagaaactgaagtacaagagcagatgaatctcctaaattcaagatgggaatgcctcagggtagctagcatggaaaaacaaagcaagtaagtccttatttgtttttaattaagaagactaacaagttttggaagcttgtgattattttgatgtggtttgatggttaagttacgattctcagtttgttcccaaggcacacagctttctttcaagggagactggttggattttcatagaaataacattttggttttcacttttgtaactaaaagagcagatgttagatagatgcactgttatctacagaactatgttttaagatttgccaaaattctgtcatagttattattttctaggttttcctccaaacattaaaatgtcactataaaaggcacagaagcatgcacaggagattgtgtacataaaatcacctattagctatagttgacacgaaacttctcttctgaagaaaaagcccttgaaaatattaaagagttactcatctatatatggaaatcctcttgaaaaacattattcaaacgttttgggaaattcttattaaaatacagtatggctatgaattatcttaagaatatatattgacttaataaaaaagaggatttgagacatttctgaaaaatgacatatttcttataaaggtaacaagcagatctcatcattctggatatgtgttttgatttatattgttaggtgtgtatattcatgtaaagcctatcaagacaagatagatttatttttaaatgaaaagaaatgaagtgccaactgtggatttgaatacattaagtgaaaaaaattgtccaaatgccttaagtttatttaactattatttatgaagttcaaaagcgttaaaaaaaaaaaaggaccaaggaaactcattagatatgctagaaggattggtattccagtactaaattatagtgtgaaattatggaggggaaaaacacatttttaagctcaggccttttgaaagaataaataaggtacatgtaagatagaggtttcataactatatatgtattccaagccaggagatactaatctatgcatattgatattattcgcctgctgtgatcgtggtgatgattgtcactacccctagatgtgagaggtacaataatcatattataactgttgagtctgcccactccccagtgtttaccaggtccactaatttactccatctattatcgatattaagatataagctgccttctgtggtcatatgccaacattcttcaggttagaacttctatttgcagtgatctgtggaacttaaagcaacctcaaacaaaattagaaagttttgaaaatccaaccacctctttactgtccttgccataatagccaccagtgtcttctcctttgtgcactctaggtttccatcctctcctggaggctaaatgctctcatttttcttacactccccattttcaataaaactaacaatatggcattaattattcatactaatcagttaattaattgctgtgtgaaattgagttgcaagaaaatatgaattcctcctggaattaaaattgcaactttttctttgcttatctgaaacataaaaaaagtcttttatctgtgattctaacatttaaaaagatgttcattcaaaaattccccccttcaagggatgtctgccattaagtgaaggatgacagacacctagacttctgtgcgtgtaatttcctcatccccatcccactagagaatggaaatgctaaaatggcagtattaccacctagctgagattgacataaaaaattagtttgtccttagggaagattcaagagcttttgtacgtgttacagcttttagaataattattaagaaggcaaggagagccttctagctggtatagcttttgctaaaacatctcacagagtttttaaaatgagacacgtacatgtaaccacttctatcacatagacttttctggaaaattccttaaaaatgaatatacaaagcattatttgagcaacacaaattcagaaataatatgagagtttataaataacagtcttccttgccactttgactatgtatgtgttcgtgcataaaacctattaaattctaatgtgataagccattatgtaagctttgctgaacctgatttttgaaagattttgtgagaggaaacaaaaaacgtgattatgaaaagagggtattgtcattatttttaaaaaactaatctaggttttacttaatgcttcaaataaattataacctgttcagtttccattatcatggtcatgagaatggattatctccaatgattagcttcaacttggagcattacctattttttttctaaatatatgattacttcagagtagaagattactagtaaacaaaaatggattcatcgatacttcttttctctctctacctaagacagggtttggatagatccagtcggaagccattatttcctgcctaagccttggtttagcgattagagaaatgataattaacatttgtctagtcatattaagtatatccaaagctatgctataatttctaagttgatataacaaaagttaaaaacttcttgtaaatacagataagcttatcactaaaatctatgaacatttacacttagcaattattaatcctatctaccaacatacttactattaggttgctgcaaaagtaatcatgtttttttccattgtaagtaatgggaaaaactgtaattacttttgtaccaacctaatagcaacatcaaattatatttgatatatagtcattgtgagatatatatatatatatatatatatatatacgtataaaatacacatatatctctctatatgaacaaatattaatggaatacattatcaaaaacaattaatggcactggagactcaataatgatcatacaaggtctggccccagatctcatgaaacatattctgtagaggctggcagccaagaaaaaaaagaacacaagaaaaataccggataggaatatagtttttgaagagattaaaatgtaatgtgatagagaatggttgaggggaggctactttagactttgtgatccaggtaagactttgaaggttggtaccatttagtttgagatttgaatgacaagaaggtaccactatttgcagatcacaaggaagtgtggttcacggattaggaacagctaatgcaaaggcccaaaaatagggacagtttggcttgctggaggaaccaaaaggccagggggactgtagagttgcagggtggtaagttagatggctgaggtctgagatggggttgaaatataggtaggagactgattacatattgtagtgtcagtcagggctttgaataagggctttgaattctagactaagtgcaagacaaagccatcagattttatgtaggtgagagataggtcaagaaaacctatcaggaaggccactggaggaagagaggacagttattaggccagtgaagttggccagttaagacacagtagtgtcttagaccagctggtagttgtgataaaagtatactttactatcttagccatttagttattttaaaaaccacttctctgtttagttttagttcctatttttttttccttttgacagtaaaagtgctttttcctttggaaatagactgcttcaatttgtgcccacagttactattattcaagttgcatctaggaaataatatttatcccataaaccatcaacaattatgcaaaacaagaaatattaaaaatacaaagataatagcgtgccctgatttctgccttacataaaatcctctccagtttgcctaaggaataagggcttgctttctcaaacacttatttatgtgaactggggcaatatacttttcttttctgttctctactttatagttttgtaaaacagcaatagtgtcatgaggctgacatacctctgaaagatactagatgagatagggtataaaaagttagtttgtgaatgcaaaattattataaaatgtgaagaaagataactgtgataaataagatgatgagctgtcagttaactattttaccataccatgtcactttttatatgtaatttgatattttctatatgaagtattatataattttatatataattatatttcatatattttgtataataacttatatataattttttaacttttaaaaaaattttgcagggaatgaggtcttgttatgtttcccaggctagtctcaagctcctggcctcaagtgatcctctcccaccttggcctcccaaagtactagtattacagacctgagctaccaaacctgaccctcatagatgttttttactttttttctccagccttttctaattgcctcagtcatttttttttcccaaagagtatagctgtggttattttgtatggggataagggagcatgagcaggatgattagaaatacatttgcagttattttttcacaatggcaacatttaaaaatatgcttacaaaggaatgtcaggaaagataaccatacagatacttcctcctttctttctccttcataaccacactctcatttgattctttccttgctattgtattttccctccaattctgttgcttttatggacataaatttctgatgaggtaaaagctaatacaataaagaagtttattaacacatctccagtcacaaatgagtttggcacgtgccgatactggtcaattacaaaactttaccaatgtttatatgatttaaatgagaaaactaagtgccattcctttcataatgtagtgtttaaaacaagagaatattgatgtggttttgttagaaccccttaagaggagtaagccaatgattttttttttaatgctgtggaatacacttgggatggtaggaggtaaggaattcggaagaaaaacacacaacttccaactgtggaagtgcaagaagacaactggcacagggaaaacagaagattttcttctctatgaataaactaattaatttgattgaaaaatgcaacctgcagagagcaaaaaagatttactgacatttttataaggactcaaagttaagcacagcaagttccatcaacttttctgataattgtagttaggacatgcaggcagaaactaaaacttctgtgacggtaagggaaaaaaatgaaagcaagtcaggaggccaagtgaagttgtgttttttggtttatatcagcaggaggagagatatgaatagtatctgggtagatacacaagccataatatggaaaataattgtgaatcaccatcaatgctttgactggacagaaaaatacatctaacaaatatggctcatctctttttttttcccccaagtgtctatttgactctggaaataagatggcatatgtgagagtggatagagaaaaggaggtgctgaacaaatgagtgggttattttctcccaagtgcagtgaagtttgcgtatgtgaatatatgaatgaatagatgaacaactaaattaagttattcaggtaattccaatcttggaattgaattcgttgcagtaaatactttggaggtgcacaatctcaaactcctaattgtgattttatttcacaatttggtaagttcattgatttttctgttttacttcttccagtaatgttaagcaatagtaacttgcagatcaaggtggtgtaggaccagtagcatcagcgtcacctgagaacttgttaaaaatgcagactctcagctctcattctgatatatacagaatcagaattgtgcagtttagcaatatcccaggtgatccctgatcagtttaagtttgagaagcactgatctaactgaaattaagacagagtagaaatctcaacttctttgtaaacctctacttagatatcttctgttcctatttttctatcaagtgacgtgggccaaatattttaattactttctcaggagctctaaaaatggtgctgatatttcattcagtcctcatatgttgatatcataccccatgggtgattaagcagtagcaagattctggtgcaataatatataacagacaatatatgagtgttgatgagtattgataattaagctattggactaataagaagtaggaattatttatagatgataacgtgacattcggttaggttgcacatggattatggtcataataatttttctgtcaataattaaaaatgtgataatgcagctaaatgtggacatctcttgtactaataatacaatgcatgtgactcatagtttaaattacaggaaagctaaatttctggaattcacagaaatgagagagccgtatcttcaaaaacaatgctttctcacaaagataaataatgctgatatggtttggctcatcttgaattgtagttctcataatccccatgtgttgtgggagggacctggtggaaggtaattgaatcatgggagtgtaaccctcatgctgttctcatgatagtgagtgagttctcacaagatctgatggttttataaggggcctttccccttttgcttggcccttcttcctgctgccatgtgaagaaggacatgtttgcttccccttccatcatgattttttctgaggcctccccagccatgccgaactgtgagtcaattaaacttgttttctttataaattatccagtctctattatgtctttaattagcagcgtgagaacagactagtacagtacattggtaccgcagagagtggggtgctgctataaagatacccgaacacgtggaagtgactttggaactgggtaacagccaggggttggaacaattcaaattaaactaatagactatctcagagagcagatttaatagaagttgacattttaatcttagtacaaaaattcccaatcagaaatatcaaaactatgtcttgttcataattaagttatactacttatacattgaagaaatatttattgagtgtgtagtatgtgccaggcactgtgccagatgctatgtagtggcaaaatttttgaagttgagagtgagcttctatttccacataaatgaatagaatttcagagtgtcaacattacctattcttactagagataatttaaacagtcttccaaacgtgatatattcatatttgtccttggctcctgatgacatctgccaatttctttattttctttaaaagcatttaatcaggaagattgatttgagggttgccataatgtatttgccacaagaatctttttctttttctttttcttttttttttgagacagagtctccctgtctcccaggctggagtgcagtggcgctatctcggctcactgcaagctccgccccccgggttcacgccattctcctggttcagcctccccagtagttgggactacaggtgcccgccaccacgctcggctaactttttgtatttttagtagagacggggtttcaccatgttattcaggatggtctcgacctcctgacctcgtgatccacctgccttagcctcctcagcctcagtgctgggattacaggcatgagccaccacgcctggccaagaatcttttgcatccagccacgcagcttctttatgttattgttactaaactgaatttatgttttcaaaatgaaaataaatgtgtttgcatttgaactttaatgttgcctcggatagttgaaaaatattaataattaaactgttcagctatatggatggaggacaaaaatggatcaggatttgaaaacaatgacacattttcgattttctcatagaattcagtataaaaacaatactatttctcacattccattaagtaggaaaataaatgttagtgcatgtttaattttgtgaaaaactggaacattttccttcatttctagttgttggatggggaactttatattaggttctttctgaactatttactgtgaggttgtaatttaaagtttgacctccaagatcaggttgcagggtgcagtataataactatggcaattagtgggaatttttgaaaatgatacatgacatgctctccttggcttctttcctagcccaagatgtcagcatacttcgtgttgggaaagaaggtgctgtaaagaggagaatgaacacattagttttagggggataaaaactgtataattttgtcagaccttgcctcacttcattctccaatggaaactactatattagtgcctaagatttatacacaccgtgacaccatgcagtgtcaggctttgcagctgagtctagtaaggaataccagaatttggaggaaagcagatctagttactgaggcaagtaggtaaactaggccagtagggtttctacagcttcacagatgctgagggtacccattcagaaagttagcatgagaactagaggacaatagcgatggatgtacttgtggtaaaggtgatgagatagtgaaaacagtgacagctgaagtcttacacatttgagggggtaattggttctgtttggattctggctttaaagcttatatttcacaggccacttattgaactttgataaacgttataaatcttgggagttgaaaaatactaatatgcttcctatggaccattcattattgccatgcaacaacaacaaaaaactatgtgcatatgtttgtacatgcactactcaagcttttcttttaaatgaatgttgcttttctatattaaaacatgtttgccatttcttggattataatatatcatgatttctgattcctatatttaatgatacaccatacattttaaaaatatctagtcattttatatggtcaccatatatttgagggaaaatgagtctcgaagtttattgtggaggaggtggagaaaaatcgccaaacagaagcctccagtaattatccctgttgcaggaacatcaaattgaacaactgtccacactagaaaagcaccttcataagagtgaaaaattaggtgcatgatcgtagtacctggtttttgggttgtatcacagaaagaggcacagaagagggtagtaaaggcaatattctatcacctataccagctctccctcatccatggcagcagtcacatggcatgaagagagagtctatgtgcttgcagaagggagattgcagtgattataggactttgcattgaaaatcagtgctgccctgtcacagtggaaaccgacaaagaacagaactcagccaaatcccgcagagggagcatttagatgaaccctagacagggaagaatcatccatcccagtgtttggaacctgagttccggcaagccttgtcatcatggattagagtgctctgtggttctaaataaacttcaaaggtagtctaggccacaaggactgcagttcctttgcaagtcctggtgctgtgccgggctcagagtcagtggacttgggatacatacaacctagtgagacatccgctggggcagctaagggactgcttgtgcttcccttcccccaaccccaggcagcacagctcacagctccaggaaagactccttccttccgcttatgaagaagagaggagacaagaaagagaactttgtcttgctgcttggataccagctcagacatacaataggatagggcaccaggcagagtcttgaggtccccattccaggccctagctcacagataacatttctgaacacaccctgggccagaagagagcctgtcaccttgaagagaaggaccccgtcctggcagaattcatgacatgctgaccaaagggacctagggccctgaataatcagcagctgtagccaggcagtacttgctgtgggtattgggtgagactcagagctgtgatggtttcaggtgtgacccagtacattcccagctgtggtggctacagggagagaatccttctgcttcaggaaaggagaggtgagagtaaaggggactttggcttgcagcttgggttccagtttgaccacagtggggcagagcatcaagtgggctcctagggtccctgattccagagtttggctcctggattccattttcttactgccctgaagggagagactcaggactgacagcattcaccacaggctggccaaagtggccttggcccttgagtgaacattggacctcagacagtactctctttggttcagtagtcgtcgtggccatgaggagagacatctctgtttgtggaaaggggagagaagagagggaaggactttatcttttgggtggggtgccagcttagccacagtagaatagagcaccaggtagatttcttaggttcttgagttgatatagtttggacatgtgtgcctgctcaaatctcacgttgaattgtagtaatctgcagtgtttgaggtagggcctagtgggagctcattggatcatgggggcaaatttttcataattggttgctactgtccttgcaatagtgagtaaattcttgcaagatctggttgtttaaaagcgtggcaccctccctctcactcttgctcctgctgtggccatgtgatgtacctgttcctccttcaccttctgccataattgtaagtttcctgaggcctccccagcagctgagcagatgccagcatcatatttcctgtacagcctgtagaactgtgagccaattaagcgtcttttctttataaattactcagtctcaggtatttcttgatagcaatgcgagagtggcctagtacagaaaattgttaccaagaagtggggctttgctgtcaagatacttgaaaatgtagaagctgctttgaaattgggtaacagacagaagttggatgagtttggagggctcagaagaagacagatgagggaaaatttggaatgtcttagagactggttaaatgattgttaccaaagtgctgatactgatatgcacagtgaagtccaagctgtcgaggtctcagatggaaagaatgaacttattggcaactggagtaaatgacatgtttgttatcccttagcaaagaagttggctgtattatgtccatgctctagatatctgtgaaagtttgaacttgagagtgatgatctcgtgtgtctgacggaatgaatttctaagcagcaaaatgttcaagacgttgtgtggccacttctaacaacctactctctgatgcaggagcaaagaaataagatggaatatttattattttattttattgtactttaagttctgagatacatgtgcagaacgtgcaggttttttacatatttatacatgtatatttaaaaggaaagcagaccataaaggttttcaaaatttgcaacatggatatgtggtagaaaataaaagcccattttcaggagaactcaagaaggcttctgagcaaccacttgctagaaaaatttgtatacctacaaagaaggcaagtgctgatagccaagacaatggggaaaaaggcctggaaggcatttcagagatctaaaaggcagcccctcccattatagatccggaggcctaagaggacagaatggtttcctgggccaggcccagggtcccagctgccctgttcaacctcgtacactgtgcccccgccccaacccctcccccccgcacccagcgtcctggccactgtagctccagctgtggctcagagtggcccaagtacagcttgggccacagctccagcgggtacaagccataagcctgcaggtgcacagagtgcaagagttgaggcttgggaacatccatctagattttagaggttgtatggaaaagcctgggtttccaggcagaagcctgctccaggggcagaaccctcacagagaacttctcctggggcaatgcagagggaaaatgtgggctttgatcccccacacgtagtccccactggggcattgcctagtggacctgtaagaagagggccactgtcctccagactccagaatggtagatccactgacagcttgacccttgtatctggaaatgaaacacacactcagcaccagaccataagagcagctttggaagctgaaccctagaaagccacaaagttggagtctgcccaaggccttgggagcacaccactcccaccagtttaccctggatgtaggacatggagtcaaagcagataattttggagttttaagatttaatgactaccctgctgggtttcagacttgcatgagacctttcttttgaccaatttcacccttttggaataggagtgttgactcaatgcttataatcccattgtatcttggaagtaactaattggtttttgattttacgggctcataggtagaagaaacttaccttgtctcagatgagactccggacttttgagttaattctggaataagtaaagaccttgggggactgtttggaagacatgattgtatgtttaaatgtgagaaggacttgagatttgggaggggccaggatggaatagtatggtttggatgtatgttcttgcccagatctcacattgaattacaatcctcactgtcagaggtggggcctgggtgggagccgaatgaatcatggcgttgaatttctcatgaatggtttagcactatcctcttagtgctgttttcatgatagtgggtgaattcttgtcagatccagttggttaaaagtgtgtggtaccctcccactcacctcttccctggccgtgtgacatgactgctcctccttcgcaatttgccatgattgtaaatctcctgaggcctccgcagaagcagagcagatgccagcatcatgtctcagggacaacctgcagaaccatgagccatttaagcctcttttcttcataaattacccagtatcagatatttctttatagcattgtgagaatggcctaatacatgaccccaggccctggcttacatataggatcttgcaaacccaccagggaaaaattgctaccctgaagtgaaaaacacaagcttcattggatttgccacctgccgattgtagagtccttgggccctgagtgaatgtaggtgatagccagtcagtggtcagtgtgggccttgatcaagacccagtgttgtactggctttaggagtgacccaacacaatcctagtcgtggtagctacaggggtgcttgtgtcacctctcctttagctccaggcagctcatcacagagagagactctctttgttgaggggaaggaaagagaaaaagattatctaccaggtaatacaggggattttcctgaatcttcccaaagatcaccaaggcagtacgtttaacagtctgcaagagtcacagcattactgggcttgggtgcaccccagtgcatatatggctgcagtgaccaaaggaataaatcacaacacccaagaacctttaaatacctggaaagccctcctgagaagtatggatacaaacaagccgatactgcaaagactacaataaataccaaagtcttcaatgcccagacattgatgaacatccggaagcatcaagaccatccaagaaaacatgatctcaccaactgaactaaataaggcatcgctgaccaatcttggagagacagatatgtgacctttcagacagagaattccaaatggctgatttgaggatgctcaataaaatccaagatagtacagagaaggaattcagaatcctacacataaatttaacaaagggattgaaataaaaagaatcgaacaaaaattctggagttgaaagatttaactgacatactgaagaatgcgtcagagacgagtaacagaagaattgatcaagcaggagaaagaattagcttgaagacaagctatttgtaaatacagtcagaggagacaaaaaagtcctaaaaagtttattgaagagggtaataacacagaacttcccccacctagagagagagattaaaattcaagtacaagaagataatagaacaccaaggagatataatataaataagactacctcagggcatttaaaaatcaaacttccaaaggtcaaggataaagaaaagatcttaaaagcggtaatcatataaaaaaaaaaatcacatagaaatagctccagtatgtctggcagcacaattttcagtggaaaacttccaggccaggagagtggcatgatacatttaaagtgctgaaggaaaagacttttattctagaatagtatatctatgaaaatcctcttcatacttgaaggagaaatgaagactttctaagacaaagaaaagctgacagatttcattaacaccaaaccttttctacaagaaatggtaaagggcgttcttcaatcttaaagaaaaggatgttaatgagcaatgagtcatcatctgaagtaacaaaactcactggtgatagtaaggtttgttactattctgttacaaagagaatattataacactgtgattatgatgtctcaactacccatatcttgagtaaaaagactaaaagacgaacctatcaaaaataactgcaacaacttttcaagacatagacactataataagatataaatagaaacaacaaaaagagtggggggatgaagttaaagtgtagcattttttttttttttagttttctctttgcttatttgtttatgcaaccagtgttgtcatgaatttcaaataatggattataacttattctttacaaacctcatagttaccacaaatcaaataatgtactcaggtacataaaaattaataagaatgtataacatatgaccagagaaaattactttcattaatagtaagacaggaaggaaagagagaatgaagagaaggccacaaaacaaccagaaaggaaatagcaaaatgggaagtgtttaagtccttaacgtaccaatgataacatggaatgtaaattgactaaactatccaatctaaatacattgagtgacagaatggataaaagaatatacaagacacaataatctgttacttacaagaaacacacttgaccaataaagataaagatagactgaaaataaagggatggaacaagtattccatgccaatcgaaaccaaaaaagaacaggattagctattcttttatcagacaaaataggtttcaagacaaaaactataaaaagggacaacgccggtcattgtagaatgataaaggggtcaattcagcaagaggacataacaattgtaaataaatatgtacccaacattggaacacccagacgtataaatcaaatattattagagttagagagatagaccccaaaacagtaatagccggtgatttcaattccccattttcagcagtggccagatagatcatccagacataaaatcaacaaagaaacatcagacttattatgcagtgtagaccaatttgaactaatagatatttacagaacattttatccaacagctgcagagtacatattcttcttctcagcacatggataattttcaaggacaagccatatgttctgccacgaaacaagtcttagaaaattcaaaaatcaaaataacataaattagcttttctgatcacaactgaatatatcaagatatcagtaggaagaattttggaaactatagagacacatggaaattaaacaatatgctcttgaattatcagtgggtcaaagaagaagttaagaaggaaactatagaatttcttgaaacgaatgaaaaaggaaacgcaatgtaaccaaaacctatgggaagcagtgaaagcagtactatgaggaaagtttataggtataaatacctacatcaaaaaagcagaagaactttcaaataattgaatgatacaccttaaagagctagaaaagaaggagcaaaccaaacccaaaattagtatgagaaaataaatattacagtaaggaacagagctgaaatacattaaagtacaacaaaatgatacaaaagatcaacaaaacaaaaagaaggtttttttgaaagggttgacaaaaatgacaagtcttaagcttgactaagaaagaatgagatccagtcacttacaacaacatggatggaactggaggacgttatgttgattaaaataagcccggcacagaaaaacaaactttgcatgttctcacttacttgtgagagcttaaaaaaaaaaaaaaaaaaaaaaaaaaaaaaaaaaaaattaaaacaactgaactcatggagatagagactagaatgatggttaccagaggatgggaatgctagtgggtcgggggcagtggggatcattaatgggtacaaaaatatagttagattgaatgaatgtgatgtagtatttgatagcacgacaggatgattactgtcaaacataatttgttgtacgttttaaaataacaaaaagtataattggaatgtttgtcacataaagaaatgataagtgctcgaggtgatggataccctattaaccctaatgtcatattatgcctgtatgcctgtatgaatatgtctcttgtatcccataaatataaacacatactatatacccaaaaaaataaaaatttaaaaaatagggtattgtggtttctatcattaaagtaaacatcatgctaagaacaattgtctcaagagtaacaactgtaattttcgttttggtgaaaataataaaattattaatgacaatctctgtataaaattccaccaaatgaacttctgttttctatttttttaatatttataatcagtgccataaatgactttataatagatataaagttaatctctaaaaagttaattttagttcaggcaatattgcatgattgtgaagcaggccccggagccaaactacctgagttcccactttgtcaccttcccttgtttgcgttttgacccaagtaagcctttgtttccccacctgtaaattggggctaatatcagttgctgaatcaataggattaattacaataatacctctttttttctgacacacaattattattttgtatttaaaaattatatttaaaagccccaaattctacaagatcaaaattactctttagtaagtcttcttttttatttgtaatttctgggggtacataatagatattttagtacttgtggaagtcatttataaataagtaaacgcatgtttgtgcatcctgatcctttgtctccatgttacctctgtgcatctggttcatgttaaccctaacaagtcatgttgtctggatacagctttccaggtatttgccacttgtgaggacccaagggctaaagtaaaaattatggctgtgtcctggggcgggggggggggcggggaagaggcacaatcgttctcaaccctggatgttcattcgaattacctggttggatagttttttacagaaccaatacctgggctccattcccagatattctgattgaattgttggggaatggggctgggacgtcattttgaaaagttctctcagtgattctaatcaattagtacctttttatattaaggcattatttatataaattccactaattcacctatctgtgatagtttgaataaaagccggacttaaacattacctcaattaataactttctgttttttaacctatcttggatttcttttcttttttctctccctcttttattattattattatactttaatttctaggatgcatgtgcacaactcgcaggtttgatacataggtatacatgtgccatgttggtttgctgcacccatcagctcatttacattaggtatttctcctaatgctattccttccccagcccccaatacctttcttaatagagaatgaaacaaaagctgaaacaaagttgattttaaaaattacttatttaagcagatgacagcattctagaagcatctagttgcatataaagaattgttaagctaaaaccaaaactaatctatctataagaaccaccttgctagaatttttgagccatcgttttgttatttttatctatttttttaagacggagttttgttctttcacccaggctggagtgaagtggtgtgatctcagctcactgcaacctctgtccccccgggttcaagtgattctcctgcctcagcctcctgagtagccgggattaaaaagtgcttgccaccacgcccagctaatttttgtatttttagtagagatggggtttctattggccaggctggtcttgaactcctgacctcaggtgatccagccacctcggcctcccaaaatgctgggattacaggcctgagccactgtgcccagcctgagccatcattttgaataagtaaataaatcaattccaattttcatcagtacaattttagtttctaaatggcgtgcatttaaaagtaaaaacatgcattaaaaattaagtttctctaatttgtactggtatctttcccttaaatcatattatacaggttttatttctgacttaaatcatgtaattgtattttacatgtaagacatgtcaattgaacatcactggtagttcttttctaatctagactttcattataatacattacctccttttattaggtgtatttttttaaattgaggattgcatatatgccagtaactgtgaattctagggaattgggcctgagagcctgtcttcctaaagagctcacacctcttggtaatttgtaagttttaattgtagtcctctaggttttataaagtctatccatttatgcctttattagttagtgcctagcatatgattatgttttcataatatatgtttatacattttataatgtatttccataaagcacaaaaaatgctattaggaccatcaaatacaggctgaaattaatgaaaacatgtactattttgcatttataaatttgtatatggaaaatgaaaattttaaaaaatgctattaatgtttattgctagattgctaaacttaggatgtcattcctcatagacattggaggacaaaataaattggtatggataagtacttgcaaataaggattcacggatattggtaatctaattatctgtcggtttatagctgtgctgtccaatattgcagccgctagctatgtgtaggtaaattataattattataattaaatatagttaaaaattcagtttctgagccttactagccatacatatttcaagtgttcattattcccacctgactagtgtccattatatatgtatacctatagtgcacacatagaatatttacatcattttagtaagttctggacaacactggttaaagaataattgccttcctacattctttcttttttgttttttgaaacggcgtttcactctgtcactcaggctggagtctaatggtgcgaactcagctcactgcaacctccgcctcccgggttcaagcaattgtcctgcctcagcctcctgagtagctgggactacaggcatgtgccaccactcccggctaatttttgtatttttagtggagatggggtttcaccatgttggccaggatgctttcgaactcctgaccttgtgatccgccgcctcagcctcccaaagtgatgagattacaggcgtgagccatcgcacccagccgccttcctacattctaacagagtttctgtaaagcaaagctggcattcccattgaattcctttatgttcatacagatacgttttcatgtccgggggtgggatgacagctctcgagtaaaatcatttgaaaaatactacgtcttagaatgccatttactgcaaatgacaaaaaggccaactcaaagtgacttataccattgctccttaaaatgtgattaatggatccgaagcattgatatcccttgggcagttgttagaaatgcagaatctcaggccccaacccaggcctactgacttagaatgcatagtttgacactctccaggtgattcatatgtacattaaagtttgagaaacactgggcacaatcataaggatgtctgttatctaacaatatatcaaaaatgtcgttgacgctagagaccattaggtctgtaactctatgttgccaaagttccaagttcttacaacttatctgttttgctagcccctctctattctcagatgatctgaacgattggaagtttaccgtagcagttcctagtatcatgtcctgatatgcttttgcctatacctactgtcaggaccaactcctgccctatactactttattctaattccactccctcggctctctattgccagtcatatatgtatactccattcaccttttgcttttactttcccgtctaaatgacgacttgaaggatataaaatgaaacctggaaaaatgcaaacattttttcctatctgtgcatggtagatttttattttgtgactttgacaatttttccaaatttatttacatctttagaatgttagctggaaataagaaactcctgtctcattttcatcatgttttaaattgaactatatgaagccattttcatcaacaaagaaattgaaatatcagaaatttcatatgatctaatacaatattttgcccatgaaaaaaataaaatagtgcacagtcttgggtcacacagggtttgtgatttctatactggcttcacatgccactgtgccagctctttaacctaccactatcctcagaaataaaataacagtagctaggtgcggtggctcacgcctgtaatcccagaactttgggaggtcgaggcaggaggatagctggagaccaggagttcaagactagcctgggcaacatagggagaccacatctatacaaaaagagttaaaaatttgccagggaaggtggtgcacctgtagtctcagctactcaggaggctgaggcaggaggatcatttgggcctgggaggtcaaggcttcagtgagttatgattgtgtcactgtactcgagcctgggtaacagaatgagaccctgtctcaaaaaaaaaaaaaaaaatactagtattataaatctttaccttggcaaggttatgttaaaaaaagttgaataaatgttagccagtgtattttacaactaatattaatgacattttaacccagaggttaacctccccactccctgaagtcacccctttatttaaaccatctttgggaaaaaggacatttgtgtcatgaaggctgttaaactcaccttctgatatcagtgcctccttcaattttgcttcttcctctggttcagccttgcaatggaccactactcacttccttgctaatcacccagaaaactctggcctataattcacctgcactttactgatgctcttttcacaggcctcagtgaaggaaggaagcgtcctcttcattactagttatttcaatctttagagtttttcacatatcagtactgtaataaagcccttccttactttactgaagggcatacttgggcattctgagtctgataccctttgatacttccctgccagtgtcacataaatctatatcttctgagttttagcagtagtaactaatagatcgaacacataccttaagtagactagcagtggttttcaaataaataatattcttacctggaatgttgtcattcaaagtgtgatccatgacccagcaacattggtttcacctggaagctggttagaactgaattcttcgacccaaccccgtgaatttaaatcagaatcaccaggtgggctgtatccatatttaagtttgagaagctgtgatcaagaccccggggggcaccaaatccaaatgcctattgtagaagccagaaacataacataaggaagtgagatgagttgcgtataaaaaaggatagggagtgatgaggactacagcaaactggagagcttatactttgtatatgaagtataattggatgcgaagtataattggatgtgaagtataattgatactcaattttgtcctataggaaggaaggtttagggttgctgaatcctattaaatatgatcaagagtggtcagatttgatatttgtagctaatatctcaaattttaactactggcaaaaatttcaatttattttcaattagtatgagaccaaatccagcatatggactactatttgctaatatctagtcaaggcctgtagtaaggaaaagaaatattttctcaattaaaacatctcagaatcctttccaacaatgggatgaatgctttttgttttcgtgcttattagtatcacacctccacaatccttaggttcttctgttttcaaacttgttctgaggttaatttcatgcttcagacacatgaaatcctgctttttggagcctcaggtagaacccattctttggcagttggcagtcacacttctctctgtaagtggaggtgaagtcaggaagagaatgtaaaagtctcatgtcaaaataattcatagtaatctcctggggattggcagttgtcctcctattaatgttaatatcttggtctctgcagaatttgggtgagttgtgtttgtagaataaagttacctagagcagtaattttcaagtgtgagtatgcatcagtcacctggaagtcctgttaaaatacacatttctagacctcatcccagagtttctgattcagtaagtgtgagtcttgcacacacttctagcaagttttgaatttgcacttctagcaagtttctaggggatgggctgatgctgttggtccagggtccagtaaccacactttcagaaccactaatgaagagagaaaaagcagggctctatttggctgggagacattgatgtgactgtaccagtcattaaaatattgagccatcccgtttgcacacacccagccattctggtccctaccccaaaaatccccaaccagatgtttctgtatcccacttataaagagaaaacacctggctgggttcggggactcgcgcctataatcccagcacttttgggaggccaaggggagaggattgcttgagctaaggagttgaagaccagcctgggcaacataatgagaccttgtctctattaagagaaaaaaaaaaaaagaagataaaacacttatgtgtacatctcttcttattggtcaatctctgagtccaagtttgtaaaatgaaaccacgatagaacatgaaagattactgggtgttcaaatttcagatttggggcagagctcaagaaatctctgtggacccacagattaaggtaggctatgatactgtacaaccatcctgcaccttgtgcgatcaagctgcactggatttccggttcctctgtgatgtgacagggcctttcacaggtctttctttccgtctagaaagagtttataccttctttttcactacttctgacttcagtcttcacagttgtccagtactgcactaaaggcccccctttacagactcaattcaattgctctcatttcatagtatgatcacattataaccaactaatggcctgttgagctatatgtattatctgtggccctcacccgccatccatataaactccaagatagcaaggggctgtgttggtcttccttgcctctccatccgtagtatccaggtactcaataattgtatatttcgtaaattaatgaatgaatttttcaagtctcaactcttaggctgtgtgttctgcgaggacactgttcccaatgactgcaggtcaatttgtatcctctccttactccctcaggaatgtatataaatctaattataatggatttcttatattctaattatttttgtatttatgtctctaatagtctctaagctacttgaaattgaagataggtattttgtccattcctaacaaatatgagtttcctgcatagatatgaaactcagtaaagatttgttgaaggaaatgtctgtccaaaagcaaaaagtaaatgatgctttcaaatactagcaactttcagtttttgcttccacttaaatggatatctcatctctgttgtttctcataaaaataaaatgtctactttttgtgtttgataaatgaaagtttattctcataacttctgattgcaatgttcctcatggtaaatgtgtctctaaaatgttaaaagtcaataaatagtgcaatctaaattattgtaaacactctcaaaaggaatatgaaatgcatattggaagaaagctctgataacaaccccaatacttcggaccagctatggagccattatcttttatattttattttactggtttacttcccctgtttccctgtaattttatatgaagagtgtgagtggtatgtaacattacatacaggttccatgttggggtttaaatagcctggcattagtgtatgaggataaagatgctgatggaattttgtatccttttgttttaaatacacttatactaatttaagtattttgatagttactctgtttagcagattcatttcacttttctccttcttgctctgttcaaagaggatgaagtctagattttctgttacccaggttcctcttggcctttggttgctaaagtacttcagccaatgggaggcactggcaagagggtgaaagcagagattgtggtacttttctcttcctcttctgtttcttactgtggagtggctggaattgtgttcctcttaaactacagctactgttggacagctcttgttccatgtctctaattctcactgagctccggcaacagctctcttccttttttcttccagttccggggatgctaggtcagttgtctttgttgttaggtcctggctccttcactatcgtttattatttttcccccgacccttcacataaatgtgtaagtagtctactgagcgaaacatatttgagtgtgttctatctttcctgccaatagtatgcagcatccacacacacactcaacagacccaacttttatattttattgtttgaaatgctatcaatttctaaacattgctttttaaaccctactttaaattgacagataaaattgtatattcatcatgtacaacgtgatgcttctgagtaaatatatattgtggaacagttgaatctagctaattaacatatgcattaccttacatatttatcatttttatggtgggaatatttaacgtcctctctctctacatttttcaagagtatattttcattagctgtagtcaccatgctgtaaaatacatcacttgaatattttgactgtgactatatatcccttgaaaagtatctccatacctcccccttccccataaccacctcagcctctggtaaccactattcattccctacttctgtgggatcagctcttttagattccacatataagtgaaattaggcagtggttttctttctttactggcttatttcacttaacataatatcctccaggttcatccatgttgttgcaaatgacagtattttattcttttttatggctgaatagtattccattgtatatatgtataccacattttctttatccgttcatatgttggtggatatttggattgattccatatcttggccatgaatagtgctgcaataaaaatggtagtgcagatatttctttgacatactgatttcatttcctttgtatatataattcatagtgggattttgtatcatattgtagttttgttgttcatatttcaaggagccttcatactgttttccatgatgcctgtactgattgccattcccatttacagtgtgtaaaggttttcttttttttaattagtaatttttaacttttgcaggtacgtaatacatgcctttttcctaaatcgttatcaacatttatctttttttgttttggatagtagccatgctaacaaaagtgaggtgataatctcttcttttttcttttgacaaagatatcgttaattactattatattttaacttttaggtgcaagggtacatgtgcagttttgttacatgggtaaacttgtgtcatggaagtttattgtacagattatttcatcaccaggtataagcttagtactcattagttattttttcctaattctttccttctgccaccctccaaactccaataggccccatgtctgttgtttccctctatgtgcccatgtgttctcatcatttagctcccacttataagtgagaacgtggtgtatttggttttctgtttctgcgttattttgctaaggataatggcctccagcttcatctacgtttctgcaaagaacataatcttactctttttcatggccgcatagtattccatggtatgtgtttaccacattttctttatccagtttaccactgataagcatttaggttgattgtctttgtgattgtgaatagtgctgccacgaacatatgtgtgcatgtgtctttttggtagaatgatttatattcctttaagtgtatacacaataataggattgctgggtccaatggtagttctgttttgaggtctttgtggaatcaccacactgttttcaacaatagttgaaataatttacactcccacaaacagtgtataagtgttcccttttctttgcaagtaagctgatacctcattgtggttttaatttgcatttcccagatgattagtgctgttgagcattttttcatatctgtgttatccatttgtcccttttatgataaatgtctattttggtcttttgcctatttttaatcaggttatttgttttcttgctatggagttggttgaatttcttccatatttttatatgaacccccatcagatatatagtttgcaaatatttttctcattctattggatatctctttactctgttaatttttaattttaattttaatttttttgctgtgcagaaatttttagtttggtataagtcctcagtctatttttgcttttgttgcttgtgcttttacagtcatattcaaaagttattgcccaaataattgtgatgaagcttgtcctctatgttttctactaatagattgagagttttgagtcttaaatttaagtttttaatccatttcaaattggtttttgtatgtggcaagggataagggtctaatttcattcttctgcatgtagattcttacttttcctggtagcatttgctgaagagggtgtcctgtcctcacggtgtgttcttgacacccatgtccaaaatcagttgaatgcaaatgcattaatttattcctgggttctctattatgttccactgatcagtttttatgctaatacaatgctgtcttggttactatggcagaatttcttctagttgcgtactttgaccttagtgggaaataaaaaacatccttccaaagaaccatattattagtgtttccatattgatcgagtatcttctgttttttttattggttaacactatcatatatgggtatactaagagactcctggcaaatgcccatagttttctaatgtagtactacttgccccgcattgtattgggtgaactcagttgaccatttgtgcttaggttctgtatggtaacccctttctctgtctgtggattcagcagcatgaggagccaaacatgaacagcggtcatctcaacttctagtttaaagaaatcatttttgagtttcttataactcaaaatgttgaagaggtagttcaaaaaaaagttgaagaggtagttcacagataaggaacagaagtcacaaggtggagagagatggataaattaatattaggttaatacagatgagataattatatatagaagtatttatgggtgagtacacactcacacatccacttctttatgtcaacccagaggtcctgtaagctacaacaccctagaagcaaggagcatacctagcaacaggatcttgggtttcagtaacattctttaaagaaaaaaaaaaaaaaaaaaaaaaaaaggaaccagaacactgtggagaaacagctgattctaacactaggaaagggaatatagaaaatgagcctggaacatttggtagtgccagatagtaagaacatgctaaactccacggtctcgctctaaacaaaaaacactgatgggatgtgtcaaagaagccaactaagagacttcccaatgtccaaagctggaactatttgagcaaaaatccaaagcaaaaactagtattggatttagcccaaagtatcaaataactatacatgagtccatgctatgtaaataaataatttcataaataaatggaggaatagagacaaatctccaatgcagaaaaaactccaaaaacttatgtaacttctctgccctcacggagagggaatgtaactccccactccacaggggctgtgtatagtgactttcttattaaaaaacagtgtgaaaagagggggaaagagtaactttatagtggataaacatgacacctattactttagccaggtggtcacatttaacattgataagtcacgttgagggtatatatgctttataaaatgtgcttaaaatggcccattacttctgtggtctttcaaaaaccccagtttaattatgaggaaaaaaaatcagacaaatccccactgagaggcatactacaaaataccagcctggccagcacttttaaaaactgccagaaaaattctgagaaactgtcatagccaaaagcagattaaggaaacaggacaattgagtgtaatatggaatccttggagagatactgaaatacaaaaaatagtttaaggaaatcagaatataataatagtctccagctaatgcacaaatattggttcattaattgtaagagatgttccataataacataagatgttaataaaacgggagactgagtgcaagttatatgataactctttgtattataatctcattaatttttcgtgaatctaaaacagccaaaaaattaaatctgttaaaaaacactctcagctatgtgtgcactttgtgtgtttaaatgtgatgattaatggaaacttccagtaaagattttagagtaaaattatgtattcaaaataacatattcctaattcaaattataagatcaatgttcagaatatagttttgaaaaatgctttaaacatgatgtttataaagagtatttcctttaaaataaccatcagcacttctcatttgcatctcaaattttggttgaattaatgaatgaacaataatgtgttttcatcctcaacataaagttgtgtaattaataggcaaaacattatcccatgtccctgatgctggaaatgtaattgagaacgtttaagaacctggttgtagagcttaccgctgggctgtgaacctaggcctttggactttaaattcattacccagcccactattttctatatctttgtggggaaaaagcaccctttctctagtctatttgtgtgtatcaaatgacgtccaaacttaatgggttaaaacaatttataattgcgtcatgatctgaagaccgagaatataagcagggctcagccaggttgtttttatattactagttttatagctgggggtcaccccttgggctgtgctgagctggaagctcacttctaatacagtattttatcctgcagaatcactcctatatggtctctaatgattcggtagtgtagcctggcctcctttacagcatggaatctaggcttcaagagaggaagaaatacaaatgctgccagttcttttatagcctacacttggaattggtgtggtgtcagttatgccacattctgtggtcaaaaaaaaaaacacaagtccagatcatattcacagggatggaaaatagacctcatctcttgaagggaaaagtgacaaagaatttgtggccatctttaaccaccacacatactaaataatgagaatgtaaacgaacaactgccaaaatatactacttagtcaattatcagatgctttgcacttcagttagcatgttcacatttagttgactatgtgaaagtttttagaaatcaggatttgtgaactattataagtctgagaaataatagttccggggtgactgatagtgggctttacttacatccttctcaatgtccaatagatgcccccaaatgcgaacattccatatattataaattctattgttttacattgtgatgttcagtaataagttgctttcaaagaggtcataataggcttctttcaaattttcagtttacatagagttttaatggatctccagaatcagaaactgaaagagttgaatgactggctaacaaaaacagaagaaagaacaaggaaaatggaggaagagcctcttggacctgatcttgaagacctaaaacgccaagtacaacaacataaggtaggtgtatcttatgttgcgtgctttctactagaaagcaaactctgtgtatagtacctatacacagtaacacagatgacatggttgatgggagagaattaaaacttaaagtcagccatattttaaaaattatttttacctaattgtttttgcaatctttgttgcaatggcttgaataagtcccctccaaaattcaggtgattgtattaggagatggaatatttaagggtgaataatccatcagggctcctcccttaagaataggatcaagtcccatataaaagaggcttcacacagtgttctcctatctcttgaccctccaccatgcaccaccatgtgaaaactctgtgaaaaggccctcaccagatgctaacatcttgatcttggatttcccaaactcgagaactgtgaaaaaataaaggtacattcttcctaaattacctcattctcagttatttttgttacagcagcacaaaatggattaagacatttgttgttgtttttttaaaaaatacagcatagctaggcttttcgtatttggaaaagaaatcaaacatatttgtggatgagaacaacgcagggtatgtgatttattaaaaatttgctttcctggaagacagacttcatagggattacttgtaatgcaaatttaaataataaggctacgattttttttaatgtaattttacattcaatttatagtaaattgaagctggccaagcttgatgataaatgagagtctgaagcattgcttttctatagaatatgacattttttaaatgttaatatttccatcttttttcttcagtttacttgtacatttccagttatgctccctcgctgccagaaagcatttttttttgtttctgttattgagacttctacaataatatttcttatccaaaattatgagggtgctttattttaataagtgccataaaatattacaattagctctgagttttattgttgaaataggctcctgctcaattcatgaggaaacacacacacacacaagatcctttgtaattgtcccaggattagggttgccacatttagcagacacaaataaaagaagcctacttaaatgtaaatttcagataaacaacaaataattttcttagtgtgtgtcccaaattgttcattgtttatctgaaattcacattttgctgagtgtcttttattttatctggcaactctacttatgatctgtggtttttggatttatggctttgaataggaatatctgctcctttacctcataccttcgaaatctgccttttgtcaaacttaattctctctttttataatattcagtcatatatagctttacagttcttccatgcaaatgaaagatacatttatttctaagttctagagttttttttaagtttaatgagcttcagttttgaatgacaaatggggccagcccttactattattgacccccaggagtcctctaagatctagcatttaagaagaactgtaactatggtaatccccgtctgctatgccatcaggaaaaaaacatcaactgtattgcaattatgtagaaattgtaactgtgattacttgtcatatagatactaattgagcacctgaagaagaagttaggtacagtgctagttctctaaccgtaccgcttttccgatgtggcacatttgcttctctcgttgacactatatctgccctctttcccttggcctacactggaagttacatgcagaaagtgtctatataaaccaggggtgtccaacccgttggcttccctgggcgacattggaagaattgtcttgggccacacataaaatatactaacactaatgatagctggtgaactaaaagaaataattgaaaaaatattttaagaaagtttacaaatttgtgttgggccacattgaaagccatcctgggtcatggattggacaaggttgatgtacagcaatggcttctctctaccggagggtatttctggtgcagaaccatttcagccagtttgaaggtggacaggaagtggaattagtgccaccagagctgcccttagccaatgaggagtaaaagttgatagagaaatcctgtagaatctttgtcccatagtgggacatttctaaggtatattctccacagtctttcagagattccccagtaagactgagctccaggtatccacagggtaacttcctgaacgtccccgtgctctcataatgccttacgagttcaccctccaaataaaccatttatttgttcacaaatcttttgttcaggatgtgtttttggaggaatctaacccaagacaaacttctcccactagaagccagaattcgagctccagttctaccactaactaaattgtcattttccaaacatcacttaatgtcccaggttctctgtatctttactttggaaataaaagagtgagtttgtttctagtgttccttccagtcacagtttaaatgtgtccaatacttttggaagttgaagtattttagaaaaggccaagattaggccacgtaacactgaacatcagaaggcaggacactgctgctggatgcctggagtgtaaagcgaaatccagggagaagagctccaaaagagcagtagaagaagaatgttagcatagctaagtacggataacctagggcagctatgaaggaagttcttagcttgggacgctgaacagactcttcattaaggtgagacaagctatccaggatcttaatattctgccaggtacctgaaatgttttgtagttttttctgaaagatataatgtgaatgaaatggaaaacgtttgacaaatattgtcataaaatttaaatatattattcattacttgaaagtatgccatttctaatgactatgaaattgccttgaagaaaaaatgtgaaacaaaagaaggcaacaggagtatatgcaagttgattatgtaacattttacctccaggcattatttatttatttaaagggcataaagaggccagaaggcattggttttctggctcagagagtaaggccaactcctacttttaactatttgagcactcttttttttgacagatttgacaatattttttgaaatatttgacagattttttttttataaaaattaagggaaagattcatattcaagtcctgaatattgataatgctcttttgtttcttggcaacaattttggcgagaagaaggtgacttaacatcaaacaatttagcaaagagttgactttatttaaacctgaaacatgtacattatattgtcttttaagactaaaaggagcatacatacagaattaaaggaacactgttttgttagtcttgccacacttcataaaacaaaagaaaataaatgttacttctttgggtaactgagttcaaactaaagccttatttatatagtcgttgaatcgctttgcagctttttttcccaagaattgtaaatcattgaaagtaaggaaatttctccttctgacaacaaaatgcatcagtaaccttagagtccccacaaaagcaactcccatctgctgcatcaccaaacttctaacctaatataatatttatttttagctttgtgtagatagacattaaatccttgtgccatcaccattttttcttaaagatgattgcagatgacaaaattaaagaaaagatacagattttattgctgggaattgatttaaattctgctcagatcagaggtcgcctgctctctctctctcaactggagggcaagattaaaatgtttgcaaatcttgcaagtacactgtgaatattacagatatgcttctgtatattctgtgacaggatcctttgctatcttcatttcaacagcattttattatgaggcaggctagaaattcagacactgtgaaatgtcaggaagataagtcacttttactgaacctggcaattaggtaaggtaaagcaattgatcctatatggtggttactattaaatctagccaaactctttactctgggtaaccaagaaaagttcaattggctgcaccatttgggagaaaccactcatccttcatagacattgctgtagggagagaatttagaggtttgctttagctttgaggcacccaagagtgagtctttctggggagtaaacaaatcgaacctctcattcccctgtgaaaaaatatatcacatataattctagctggtcttttttgtcttaaggggtagaatttattagtgatgttgacaaagaatgaaaggatttccctcgaaggagtggcatgatgctattgaggaggaaaagccttgagctttcattaatagtaaagaagtttgccattttggaggcatttttttcaaaaggaaaatatttaacagtgaaatcttttgtctcctggcacagtgagactgcgatgaagtttaaagctgagtttactagctaggttttccattcttttgagagatttagacttttgtgcatagatgcataaccttggtgacagcatcaacaaagactttacaaattacaagaatttgccgatgtgaatatatactctatattctgacttcagtgaaggttatatgtgaaatactgattaatacaaactaagtagcctcttagaaactcagtcacctatccttttcttgaaggttagttaaaggcagacatttgggttgccaagattgtgaaatatcctcatctggtgacctttaaaatgatctagatgttcatgttacagagaaggattaggtataattctgccaaaggatctgacatttcatttcattccattgcattctattccatatcactgaacaaaccctcattatagcacatgggtgctgtgaagaatgcagaaaccaatcatttacgatgtcttgtactatactgaatgctggaggatttaagcctgatcatggagggtgatcatgagtcttatataaaagactcaggcatttgcagtagtagttctatgagtaacaggaaaccattattcatgagaaattaaactagaaatagcagcaatttaggaaaacttatcttaatatttaagaagatattttttgaggataaataaaagagcagagaaacaggaggccggaaaacatgttaagaggatattgctgaaagtatatagagcctgaatgaaagcaatgacaacaaaaattgtaaacaggtacaaagcattctggatatcaaatcaaaaccaataggactagatttaggatatgaacaaaaagctcaaagtaatagattctgggactgggcaattgggacttgagattggtaattaagaaaataggcagtgaaaaagagaaatgcaatagttggaagaaggataagtgattcagttaagtttgacagtgccataggatcaagtggtgcttttagtggttagcaaactcactctcatatttagcaaggttaaaattacatgttgtttgtttctgctatgaagtttcattttatttcctgtcttttgccctcataagtgcttaatgaaagtttaatggttatgatggtaagggggataaacactataatctgaaaaaatactgtattataaccagagagccagatttcttttgtgttttcagagtgcttagtcaataattgatgctcagtaaatgtttttagaacacatgttctgattatattgactagttttattatccaaatcgtctccatcatggctaactttctgacaagggcatgaaagtttgataatttcaattaaaacgttgggcatacagcaaaaaaaaattcataaagctgtagaaaaatacatctgtaaagtggcttacctggtgatgttatctctggtgtcttcaatctctgactttccttttttccttctatctctgttgcattcccatatgcaaatatcttaatagtgctaaaccattgactatgaaattggtttgagtggtagtattattttgacataaatgattggaagtttatgtaaaaaagaacatcacacttttatagtctacgtagtagtatgtgcatgatattcagttacaatttttaaaatcgaattgagaagacatctaatatcccataagaattctattaacaagcatcatattccaagggtatatttgcacagtaatgctatagattattaaaataataataatataaaatccatgcccatattcttattttacaaatcaagtatttctagctatcagattattatttactttattagaaattactgagtattgattcagtaacattacttagaatgtcacagctttgtttgacagtatatcggtatagctacgaaaattatacctgatcaagactctgtcatcttagaggcactaacattagttattatacttcattactcttgtaatacttcctcatgagaagacactgacctctccaatggtgtttaaaggaaaaaaataagtaccctatttctaatttactgagttagtctcatgtaaaatgtctctctctctctgaaccagtactgtaacaatcaatttcagttctttcgtataggtaatacaaaattaataatgtagataaactaattataaaaaacattttaaaatgcattttagggaaaccttacaagaaagctaagacacacatgataacatgaattttaaggcaataattttccttatcaaatgtatgaccgtatcttataacaaaatgcatgtccgtaaatccaatcccgtgttaaaatataaggttgaatatgatactttttctgaagaatatggagaactatcctgtttaatatttctgttatgaacagaatttctagtggatttctaatactagtagatttctactggtacatctggtagtactctcttattcattggaagtaatgatactgtatcctttaacaattaaatttttatctaagtcatatctagtaagactaaaaaagcactaaactatttttacataatggtctacagttttggcacactgaggatatttaataatggaaatataatgtgattaccaagttattagaaataaatagtgatgctcaaaagggctatttccatgaatctcagtgtaagaatgcaaggataatgtgaatacgtcagaaatgaaagaaaataagcatttcctcaccacctaccaaatctaagcactgtacaagctgaagttaatgtattgtctcatttaactctagtaataagcatgtcttagaagaagttttaaaatagattgagggggtgcatgtgcaggtttgttacatggatatatcgtgtagtggtggagtctgggattttagtatatccataatctgaatagcgaacactatactcaataggtaatttttcacccctcacccccctaccagcctataatcttttgtagtttccagtttatattattccactctagatgtccgtgtgtaccctttgtttagtttcttcttataagcgagaacatgttgcatttaggtttctgtttccaagttacttcacttaggataatggcctatagttcctattcatgtaactgcaaaagacaggatttcatactttcttaggctgtgtagtgttctgtggtgtgtgtgtatatatgtgtgtatatatatgtatgtgtgtgtgtatatatatatatatatatatgcgtatatacacacatatatacatgtgcatatcacattttctttatccaatcatttactgatggacgcttaggttgattctttgctattgtaaatagtgctatgataaacatacaactgcaggtagctttttcatgtaacactttttgttgtttttgttgagtatatacccagtactaggattgcaggatccaatagttgtgttttaagttctttgagaaatctccatactgttttacataatgtttatattaacttacattcccaccaagagtgaataaacattttcttttctccacatccttgccaacacctgttgttgtttgacttttttaatgacaggtatccccttaaaaaaatgagatactgtcatttggaacaatgtggatggaactagagatcgttatgttaagtgaaataagccaggcacagaaagacaaacatctcttatgttctgacttatttgtgggatctaaaaattaaaacaattgaagtcatggaaatagagagtagaaggatggttatcagagactgggaagggtggtggaagggaggtggggatggttattgggtacaaaaattacagttagaaagaatgaaaagacataatatttgatcatatcatacagtaactatggtcaataataacttgtacattttacaataactgtgaaagcatataattaggttgcttgtaagacaaaggacaaatgcttaaggtgatagatactaaattctccatgatgtgattatttcactttgcatgcctgtatcaaaacatctcatgtaccccacaaatacacctactctgtacccacaaatttttaaatgacattgaaaaaaacaaataatagccatactgattggtgtgagatcatatctccttgtggttttaatttgcatttctctgatgattagtgatgttgagcattttctcatatgtttgttggccacttgtatatcttcttttaaaaaatgtctgctaatgtcctttgcctactttttaatggggttatctatttttcttcttgttgagttacttttagattctagatattagttttttgttagatgtatagttcggaattgttttccattctataagttgtctgttcattctgttgattgttttttgtttttttgtttgtttgtttttgctgttcagaagattttaaaattaagttccatttgtctacttttgtttttgagtacttagtcataaattctttgcccaagccagtgtcgagaagagtttttcctaggttttcttttaggatttttatattttcaggtcttacatttaagtctttaatacattttgagttaatttttgtatatggtgatttatgacccagtttcattcttctgcttatgactatccaatatttacagcacaatttactgaataggatgtcctttccccagtgtatatatacatttttttactttgttaaagatgtgttggtcatagatatgtggttttatatctgggttcttaatttggttaaatcaatctatatgtatctgtttttataccagtaccatactgttttggttactgtagccttttagtataatttgaagtcaggtaatgtgatgccttcaactttattcttcttgcttagcattgctttgactatttgggctcttttttgattctctatgtattttactatctttttctaattctgtgaaaaatgatgttggtaatttataaggactgtgttcaatctgtaaattgctttgagcagtgtggttattttaacaatattgatgctcccaatccatgagcagggaaagtttttccatttgtttgtgtcatctatgatttatttcatgggtgttttgtagttctccttgtagacacctttcacttttttgtttaaaggcattcctaggtattttttttttttgtagttgttgtaaatgagattgagttcttgatttggttctcagcttgatcattattggtgtatagaaatgctaccaattttgtacattgatttcatatcctgaaactttactgaagtcatttatcaaatatagggtccttttggaggagtcttaagggttttctagatgtaaaatcctatcatcagtgaagagaaatcatttgactttctttttcccaatttggatgccttttatttctttctcttgcctgattgctctagctaggacttccagtactatgttgaattggagcagtgaaaatgggtatccttgtcttgttgtagttcttgggggaggggggtgctctcaacatgttcctgtttagtatgatgttggctcttggtttgtcatatatgacttttgttattttgagatatgttctttcaatgcctagttgttgagggtctttatcttggggagaggctggattttatcaaatgccttttctgcatctattgagatgatcatatgttttttgtttttaattctttttatgtggtgaatcacatatattgctctgcatatattgcaccacacaaaacatatattgtgttatgtggtgaatcacagatattgctctgcatatatccctgcctacctggcataaagctcacgttattgtcatgtattatctttttgttatgcttttgggtttggtttgctagcattctgttgaggatttttgcatctatgttcatcagggatattggcctgtggtttcctttttgttgtgtccttacctgcctttggtatcatggtgatactggcttcgtagaattaattagggagaatttcctcttgtttgatattttgcaacagttacaataggattggtaccagttctttgcatgtctggtagaattcggctgtgaatacgtctggtcctgagctttattttattgggagatatttattactgattcagtttcactatttgttattggtctgtccaagatttttgcttcttgtggttcaattttgggagttgatatgtatccaggaatttattcatttcctccagattttctaatttgtgtacctagagatgcccatagtagtctgataatctttcgtatttctatggtatcagttgtaacgtcacatctatcatctctgactttgcttatttgattcttctgtttttttcttggttaatctagctagtggcctattaattttgtttatcttttcaaagaaaactctctaatttttttaattttttgtcttttattatctcagtttcatttagttctgctctgatcattgttatttcttatattctgctagctttggtttcggtttgttcttggttttctagttcattgaagtacaatattagtttgctaattttagatctttctatctttttggtgtaggcagttaatgctataaatttccatcttaggactgcttttgctgtatcccagaggtggaggtatgttgtatgtctctttttatttgtttcaaaaagttttaatttcttccttgatttcattgtccaaagatcattcaggagcaggttgtttaatttccatgtatttgtatagatttaaggagtcttcttggtactcatttctagtttttttccactgtggtgcaagaagatgcttgatatgattttgatttttttaaaaatgtgttaagaaccaccttgtggcctagcacattttcaatttttgataatgatccacgtgcagatgagaataatgtacattctgtggtggtagaatagaatgttctgtaagtgtctggcctggaaggatattaatacttgattttacagacaaatagatgtgttcaaagagtttaaggagttgttcaaggtaacttcagtattaattggtagattctgattttaactttgacctgtctgcctttgagaccatttctctccattttgagattccagtgaagcttgactccacctgagatcctagagactagagcagttgcagagaagtgacaaagagatttgaagatgttgtggcatttggattcccaggattgggaatgtctagatagaaggtacagagactgtgtgcatatgagtcttcaaacatagagtaagcagtagtggtagctacacattaaatactcagaatcaaaatgcttaatgaaataattcatcaccattactcctgtagttctttaaaatagaggaaaaagagactataagggaaacaggaatataggcttatgataagaatggcaataccgtctgagcaggaggataatcattggaactgaatttcacaactatattctgttagcagcacaatgcatagcatttcctctgtgctctgcctgaaactttccaccccaactctctcccaataatcttcttttctttttcaataattattttcagtaaaggcattttataattatttattcaatgttattggtttttaatctgattttaattctgtaactatatgcagaatgtatgggtgggtgcatgcatggattgtagaaagagtaggaaaggcaagagaattgagggctaccatttcgtgattagggactgtcctcactccatgacatatgtctgcccatgcaaatttttctgtgataaccatcagatgaggtagtttgaacctacttttattaatgtagtgtaaataaattggaagttcaggtattatttaaggatttaacacttactgtatatttctccagaccttaaaactttgctgtaacttcacttgttttcatgacttttcaaaaatcacattctcttcctgcacttatgatgtctattagaaaggatgatagtcagaatgtattagatgagggtaaaatagattagtattaggttaggtcattgcagtttagtttcaaaactttgatataaatatggctaaatatgaattctttcaactaattagatgctaatatttttggaatttatattgttttccaggcaaaatgcaaaacagttttaccttattcaatcttcttaaccacataaagaaataggcagttttattatcttagttttacaaattaggaagctgaggcttggtgtggttgatgactttctcaaagtcacgtgattggttattgatgcttccaggaattacacatagaaaatctgatttcagatgctacacttttgactacagttttactgtctcctcatagtcatgcacaagttttggtcaatctatttcatcctatgtccttttccatatgtaggagtacattaattgtctactttatttttaaaacagtttcttttcgtatttattgagtccccttcaggctattgagaagcatttagtgtgcttgtatagcctttcaaatctctccattgaaacagtctttcagaacccccatttggtagcttaggagttggcagaaacataaacattcatttctaacaaaaagataaaatcagtgtgttctgatataagaactaataaagatattcaatcacatttaagtaagtgaatatcaaaagcttttctagggtagcctgttgaggaagattatttaaaatattcagcaaatttataacaaagttatataccgtaaatagatcttcatggaaagctagacaatactgtgaccagccaggcttagcaaagtgaatatttcactgcaaataaaatcgaaagtcctttccagatcatatcattcaggccagcaagggatatagagcctagcccagtgtagaggtggtagaaggaatggggcatagaggaaaagagtgaaaaaaataaattacctaccaccccatcatttcccaagaaatcctaacactttctgatctgtacttgaagtttttatttgaaaaaaagtcaattcctgtccagatgtcttgaattaacatgatcattagtatctagggatttttttgttcatgagacagcttttttaagatacttctttcctggatgttagactcaactctattcctagaaccttctgaattcttaatgtcctttgcaaattttatgtttgctacaatttttttctcgttagtctttccttatgtgtgcatttattgagataaactacaaactactgaatatttgtaattaaacatctaaatatattaattttaaagtcatttttggagacaatagattgccttccaattcatgatgaacagcgttctgtgttgtttctaggggtgtgttttgtgtgtgtgtgtgtgtgtgtgtgtgcgtgtgcgtgtttgtgtgtgtgtgacctgcaagtaccggcaattagctgttgggtattcaatgaagtcggaggagtagttaaaaaaaaaaaaaactttacatataggtaacagctgttcttttcctgttctttccatagctgagtctatgctatggccaaaagaaatagacaagtaaaacaaaagcttctcccatcgaatttacaggatacccatccttgtttttgttttctattatactgcctttcgattaattattgctcttcacctttaaacatcaaatcaaaaatttccctagccttacataattccatgtctttatttcctaagtattattttacatgtgttctaagaaagggtaaaatagcatagatctagaataaacactgaagtggctctccagtggtttttctaagccacttttgaaaaccaacttgacatggacaagagccagaagaattcagtatcactgatggcatttaaaagaagtacaagaaaagtcaggtttaaataataaaattgggaacatgtactaagggagtaacaaattttgttaagccctttaactagagacttatttagaagaaatacaattattcacagaggtataacaaaaactgtttgtccaatctaggcattcttaatgttacatctcactgttggccttttctcttgtcataaagaaaaaaatacattatttgacatttgacaacaaacattggtaacatttgtatctaataatggtaatgaaatttaactaggaacatgatagatgtttgaaatctggtaagtgttacaaaagcattcctttaataaaataatgaaaataaatgcataataaagtacctagtatgtgtgtatatatgtgtatgtgtatgtacaatctggaagcttttaataaaggaaaacattttaacaatattatattacaatattttaatttgaaggtattattttctgacagacaaacatttttgtgtacttctctagggatgcatctatatttggaaactatttggctcatatttcaggcttaattagcaaatccaatataaatctccgttgtataaattcatctatgacaaattgaaatccataagaagtcagtatttaaaattgtaattaaatatagccttacaacactttagcatattattttttttaaatactcttgagaattcatttctttccaactggagaaacaggcaggcattctttaccccaatgatcaaggcctttattcatggattcctagtttggcagaacaattgaactttttaactccagctttttatgtctggcgtttctgctacttgtaagaatcagtgtaaaagtaaaccctgaacgttgcatagttcataatctgtattttgctgatattaaggagattagctaatacagttatattcactaatatttatttcgcatttgaagtctgagaaaataggagacgtgcttactgttttaccatagcttttgtcttacagctatttagtgtgctcaaaaaagtcagtttaaccttttttagtttaattcctaattagctgagaaagaagaaatacaattttaaaaagtcatagaggagaagagatactggaaataacattaaatcaaatgtaccttatgcaaatctactccagcactctggactcttcaacgttcttagtcactgtagagagcctttccccactcctttatttccttgtactcaccgtaagtccagagggttcttgtgttagattttaatgctatcatctcacaactctctttagtggtactttacgttagcacttctgccaagcataaaatataaacccttgatcaatatggcaagaatgccatttccaattataaaacaaatagatgaacgaaacaaaatcagaacaactaagtaatggagaatatagtacgtttgatcacatagactttaaaagactcaataagagttggattcattccatggatccaatgtttttcttacacttcttaagtaaaatatattaaaattgtgaaaaagcaatttacatgtaaaaatgaaaactggcattatttacttgtaattttgtaatatatgtaattatatatactcattgaaggacagaaaagaattgactaaattcagaaaaccaacttatgatacactggccaccaaattatcattttaattattatttgaaacattcccggctgacaccttcaaaatgttcccagtcctgtcttatataactcagaaaacacagactcaacatgactgtcaaggacaactctgaattttaatgtttccatttttggcctcatggcaaaaagagttttattaaccattataagctctggaatgtcaaaggcatgataggcagtatagattgcacacacaaaatagatgcatagtcattttattctaaattgcttcacttgaaaatgtagtatgaaaatctagagagacgaagtaaaaagaagtgattttatagtgttctaaaatgttgaggcttcgaaaataagaagcctaggataaaaatgctcatgcatttgagattgtgattcagccatcctaataagttcccttccacctgccatagagtttgaatacctaagagctagactgataggtgctaagcactgttgttttgcaagtagggacagcacgtttgccagaaagtaacgggaaatgtcccaaacttgtttctccactcttgtgttatgtaacaaaatgttctaagaaacaaagtagttgcctagaagtctcaaatagctattcagagaaatcccaataataaatagtgtaacagggtaaggtcttatgggatctggagcacccaggcaacataccttggttctagagcagcctcctttgtttacccctaatttattcctgtgtttacccctgttcatcattacaaaataattgtacatcatgtttttaaaaagattggaaatactgttttgtgacagcctcacttaatagggggaaatgattttttcagagccacatttgtaagttagaaaggcagtatttgaattattctggttttatcctagggttcagttgagaccaagtggttattttctgttgaggttagtgtaattgtgattacaccaaaaatcactaattcttcctattatattgtaatctttgtgcaatcaggaaggaacaaactcatctgtgcatgttttccccaaacccccacatggtaccatttatctgacaaatgtttattgatctttatttgcttgtaatacatagtgagaaggacagagggcatctctgttctagtggactgcctattatagtaagtagagacaaaaggactaagctgatacataagaaattattgagtagtgacaatactatgattaaaaaaatgacagaaatggtgaattactagggagcaacattggatagtttgctcatgaaaagctgctctaggtaggtgacacttacattgagtcctgaatgataaagaaatgatttaaacatctggaagaaaagcaatcctggtagagggaacagcttgacacatttttggaagagagacaaagcaagtcattctgaaacactgtgagggcgagaatggtatacaattagactggtgaggtagtcaggtgctagatcatataagaatttcaggtagagaagttaaattttctttcttagtatgatagaaatctattggtttttataaatcggactgacatctgatttgtagtttgagcggaagggaaaaaacgagtaaaggagctaaaaagtagtgtataggccaggcacagtggctcacgtttgtaatctcagcactttgggaggctgaggtgggtagattacctgaggtcaggagtttgagagcagcctggccaacgtggtgaaatcccgtctcaactgaaaatacaaaaaattagctgggcgtggtggtgtgcacctgtaatctcagctactcgggaggctgaggcaggagaatcccttgaacccggtaggtggagtttgcagtgagccgagatcatgccattggcattccaccctgggtgacacagtgagaatccgtctccaaaatagaaaaaaaaaataaaaaaagtagcacataggtaggagggtaatcaagagaaggtgtcaagaatgagggagtggccaattaggttagtaatcaacatgtcaagtaagacgctataacaaatggttattgaatttaggaacatgaaagttgatggtgtcctttacaaaagatatttcaatgggttagtgggcaaagtgaatagtaggataaatatgtaggcacagtaactataggatacatttgtttttttttttttcagtgaagaggaacacataataggacagtaggaggaccggtttgttggatcaagagtttgttttatttttatggtaatggagaagttcagtagagaagaagagcctgaaaatgccagaagtgctgatagttgtaggaaaaaagtccttgaaagggagaaagggggtgggatgagaaggagaacatcctgctgtacctttcttaacatttgtcttctctagatactttccagttaaattaacaatagaacatataaattttgctgagcgtcatagcagaaaattggcttggaatggttttaggttaataaaaaatgggagtacctgagatgtagcagaaataaatttcaccatttgagagcaaatcatttcaacacacatgtaagaatatcattttaatttcctttaaaacattttatctttcaggtgcttcaagaagatctagaacaagaacaagtcagggtcaattctctcactcacatggtggtggtagttgatgaatctagtggagatcacgcaactgctgctttggaagaacaacttaaggtcagattattttgcttagtaaactaaatatgtcctttaaaagaactataacttgaaaagtattttaaaaatttagaatgcaatttatatattaaaatacttagaatacaatatgtgtacaatatacacacactcataatcagctgaagtgctgtgatttaaagaattccataattctgatacaatagtaactaactgcggatgggtaaaatctaatactttaccagaaaatttcaattaatattaaataaggctgggaagcaggggttgaagggaggttactggttaaaaaaaatttaaatgcagacatttttctaaggcatggagtatttccatttaaaataacaattgaaagcacccatttcatcattagctgacccagtgtgaatagcttttcaatataattcatccaaggtgatgcttgtgtggttaaggcatcttgaaaaacagtccgtagaactcacagatggttgtatggtgggcctatactcttctgtatttgttttctacttgctttcattttcaccttattttctgcctttatttctttggcccaaagacatctactaaatatcggtaaatgtactgattatccctaatttgcttaaactctatctgcatttgtccatgattgcatacccctttaatggctactgccttccagcctcctcttttgtcttcaatcttctttcctcttttgatgttctcattttgcctctatatagctctgtagtgtcatgtgactttaagataatctagactagtatctaaaagggcagcattaaaaggaatcaagtggagagaaagcccttgctataacttttctttgattccatcccatcagttccttcagtcccaaaagaatccatgcttgagttctatactttatttaactattggctggaattgtcgtggaatgctctgcttccatttgactttgaaacagagatgattcttaggttctttgcaagtgatataatcttgtcttacctagtttactttttaaaagcaagaagaagaggacgagaagatggtacagaaggaggagtaaggagaaatcataaagtattaaaagattgataaagtataaaaacataaaaaaatttaacacaaataccctgggtatattataattctagggtagcttcagagactgtggactttaatatgtttaatactggactgagagggattctggtagacgtaattagaagaattacaggaaagagaaacaggtatttggatcccctaaaagaaaaacaatcatcaggactcagagaaggatcttagcaggctttttattagagcagagtctggctatccttaacttattcctcaaaacctattagtgttgagtgcccatctcacgccttctcttccttcgccctggcatccctcatcaccacaattccttcatccattgcactaaaattctgttgaaatgccatccagaggctcaaaaaggatagccagctgtctttggtaaagaggtacagatgggggaaagtaggaagggaagtccccatttagtccaataaggaagagagatgcatacttaacaccctgagttagaactctaaaaatacttccaataggatatatctgcatgtattgatttattctgtaaattctattatgatgatattttaggatttctctaactttaaaatacctttagagtcttctttggaaaaggtttgaagaaaaccaaagacaggtcagaatatatgcttagagtttctgaaagatgacatagcttatgaagtgtaatattctgaaaagtgtgctctccgataattagattctttctctcaaaggttcagcttgtccctcagcaatgttactgcagattagagtcttgtccttaactttagaggcttccaggatgtcagtgcgtagagagtctgtttcataggcagtgatgccagttaacttatttgattgagaaatatttttataaactaaattttataactaaaattggtcatttatatagtcttcagttttagaggtcattaccacatctctttctaagcattccacatcccatttgaatttttttcaacaagtactcgttatgttcttactatgtcccagggattgtgttgggtaaccaggtaagacagttaaaaaaaagaatttgtcactatctaccctggttgcgatgggtaatttgagagcctactgccttccttggaaccctggaacaatggtgactatatctcagtctccctctttgtagtagaatgctaattccttgtcatccatggtcactatgataggcaggtaggcatgggaactgcgctcttggtacatgcaatccagtataaaaatagacattaataaagtatttttaaaaatgagcaaatgttaaagaatggatgcaacttatttataaaggcaaaaaataagcttttgtgacaggaaattactctgacttagactgaactttgaacgcaacagatgattcctgaggaaagttttctttaagctaagatctaaatcatacattggaggaaaatggataaagtgtgcatgtaagtgtcatgggatccttgggtgtcactttgccagccagaaacctctgtggccggcagcacctctgtctgggttttgcttgtgcccgctgggctccttgcacccactcagcctggcaggctgtgcttggcttgcactactggcccggatccccatgcctgccaagggcaagccaggcacagagcagtaagaggtatgtgagcaagcgagcatgaggcctggccactgtgcacagacaggcatgccagctgcagcggaaggcagctacaggcaccagtactggtggcagctccatgtgaggctgtggctggaccagatgtaccacaagtagcttctgctgcaggcaccaatgtctggacaggggatcgcggtggcacctgaaagctcagagacaccaggaaccacagagccccaaggagcatgttacagcatgccacaaccctggcttgaggagccccaaggtctgggctctgcaaaaggccacagctcttctctgtttctcattgcccatagcatggtgagtggggggcatgtttcagccctgtttgtgttacagctctttttgtcctgccattcagcaagtcctgagttcttgtcccatgtccaggaagaatgaggtacatggacaactggagggtgagcaaggtgcagaggagcttcattgagcgagagaacagctctcaggataccacggtgggtagctcctttccacaggcaggtcgtcccagggagtgtgcagctgtgagtagagaggagacccatggtgggtggctcctttatgcaggcaggtcatcctgaagagtcaaggagacacaaagtaggtagctccttcctgcggctggtagtcccaatgtctaagtttgtctgagtctggggtttttatgggctcggaagggaggaggtacattctaattggtccatggacatccatggataggcccagaaaaagcaccataagttctcattctgggccacaaactccacccagaactggcagcccagcccccaggcttcaggccattcttggcttgaaggaggggtttctctgtggatctgctcctttctgcccaggagccagtctgcctcctgccaccatcaacatgccatccatgtagcctaggcagtttataccaaggggtacctgcaggcccacaccgaaccatcctcagtccccactcagcctctctcccatgctcatcagtgcccaaagtccagacgggcgcaaggcagcagggggctggcatgccagcactgtcccgagcacacacataaccagtcaggttgcgacaacacctggtcttggccgcaactttgcttctcccaggagccagtgcggggagcgaggagatgccagggagtgggagcaggcacttcttagtatgtggaggcaggggggcttcccaggcccccaagagcgcaggaatgcccaggtccggagctgtggctgggtggctgcagctgcacctggaagcatggggctcccaccctgccaactcagtagggagcagcgctcctgcttgttcctggcccttggtggctccacacagtgcacagccctggccacgcctcccttgctgcagctggcatctttgcagtggccgctccagacaggctgctgctgccatcataagtgagattggtggaggtgggtagagtttctaggatggataaatggtaaatcaagagagcgtggtttataaaaacttgcatgaaaaaagactataaaaagaccataaagaaagccttttgttcttgggagataactgtttctaataaagaaagaaggagaaacatggttaagcccatagcttatagaagatgctctaatgaaaatgtcttccaaagaaaaagcaaaaccattaaaaccctatttttaggtatgttattctgtacaagttaaaagttgagagccaactatagatgtattgaaggtctgtgtggtcatagaaccaggagaatttctgccatataaaaggcatttgaattattttgttaaaatactttaatattgaagttactgcctaatattttggagaattaaaagtatatgaaaagaatgaggctaggtacagtggctcacacctgtaatcccagcactttggaaggctggggagagaatattgcttgagcccagaagttcaaagattagcctgggcaacatagcaagactatcatatcgtattttgattttcctaataaaaataattataaagaatggataaagacagagtgtattaaggttctctagaaggacagaacccactggatggatggatggatggatagatagatgtatatatgtgtatataaaatatacatttaggagtttatcatggagaattggctcacatgattacaaggtgaagtcccatgatacgccatctgcaagctgggagaagagagaacctagtagcctggtgcagtccaagtccaaaagcctcaagaccagagaagctgacagtgcagctctcagtgtgaggccaaaggccttagagcccctgggaaatcactggtgtaagtcccccagtccaaagactggagaacctggagtcctggagtctgatgtccgagggcaggaggagaggaagccaactgccccgcagggcacaggaagagagtgagtaaacttaccaagcaagctactttatccctgttctcctggctttgttctagtctaactggcagctgattgggtggtgcccacccacattgagggtgggccttcctctcccagtccactggtccacatgtcagccttctttggctacactctcacagacacacccggaagaaacaatacttcatcagtgatctaggcatccctcaattccatgaagttgacacataatattaaccgtcacaacaagtattctattttcaagaaggaaaacctggaaaacacaattttggatcagattattaaacatgaggccatgctcactggtatggtttctcacttatctcatgcagttaataaacatatttattgcctgaaggaataatttttgcagatgagatagttttctaagaactaagctacattcgctaaaattgagtcatgtaaaccaactttatatcagatgacattaaacaatttgtagaaatactttgtggtagtattaagacaaattattttgttagacttattaaattggctgatccaatggaatggaatgaatttgaggtattctgattttcctgaaccttttagcaaagcctctgcgtgatactgtttattggtaaggtgagtctatctttctctatgagtgttcgtgggtgagtctgtgttttaatatattcctttctagtatctgatttacgtgctgaaaattctggggaaggaagccatttgaggatttagctggggctctgtgtaaagtgtgcccctgtaggagtggttaatggaatatttctgctcccatattaacttagaaggtttatagctatgtcctgaggagttagaatatcatatacaaatgttacatcctattgttttaagtcagaaaactcatgtttatagttcgaaatgttgctgctttttaaaaatgcaagtagtataaatcagttgaattagtttgagatacaaagggtctgacttcccatctatagatataaatgtaaatatatataaatgtaagtgtgtaaaaatacatgtaattttgtctatataaaaatatatgtataaatgtgtatatagttaaatttatatacatctctttatgtttctatatatatacatacgtacatctttgtgcatatgtatatatatgtatatacatacatatacataaacataagcacatatgagatagagtgcacatgcttactttgaaacaagcttgatattaaggatgatacagattcttagttaatgcaatcacagactgtgatatagtgtctagattacatgaactaataattatactctatgctgatttgaatacactgtattttacgcccacgattggtactctatcttagcaggattttctcagatggcagcatcctgtgaagaatatttgtagagtgggcgattatttaattaaaaaataactaatcatagggaaatggcacatgaacactattgtgatggtgaaaaaggaaggcactttctctatggtttttcaaaatgtcataatatcagaagcagacagaagttggtaactctggatgtcttctgcccagatctttcctgagtccattttcttctaattatcttctgaacacatccttgaagtccaaacaacacttcaaactcaacaagatgaaacttacctcactgtacattgccttcctttaaacctgctttccttactgaatttcttatttttgtcattgcactggcacttatcatgacacctgtaccagaaacctagagtcatccccaaattcatccctgtcctttcccttatgagccctttgcatgcaatgtcaaaatatttctcaaccttatcttgtatttattatttcatctttgttcttgtcaacatttctcaaggtataggccatatcataagcccccaaagtccttgccttcagtcttaccgctcttccatccaatctccacattgaagtcagtgtgggttcccaagagcctgtttaatcgttctcctttgcttaaaatcctgagtcactttccagattctgatactttggcctacaaggtatttgattacctgactcctaccagtctctatagacttgtctcatgttatctgctttatgtccctcaacctgcatttgattcatacaagctgtttctgataccctgtatgttacgacctctttgcacataccaccgggtttaaacagacgactctgcttcataagatctgctttgataatttcatctatgtatagaaaactcatttcaagttttcctccatgaaattggccactctacctagtgatgactactccctctttgtgccatgtctgtaccctaattgtgtctgtttgggcaccgatcatatacttttgcagttaatattaatgtgctttactcttttattagaatctaaattacatgagatgtgtcttacacattcttgcctgcattgtcagatacaagtaatcagtaattcttgtaagataactgaatgaacctatgaacagacggttggatataattccaagaaagatttttttgacttaaaagggagagctttttgttgtaaggtaattaagaggagaaactctagaaatagacccttcctgctctgttccttatctacagtatacctttgggcaagtcacttaaccatccttggctttagtttccccatctttaatatgaagattgtattagaacctacattatcagatatctgtaaagggtaaaagggtagttgagaagctaaagcatttaaaaatcactgaaatatagtaagcaataataatattagttactattattatcatcatcagcccagagcattcttacaatgcgataagagctgtggaaagtggtgagctgttcttcattaataatatttaacacaaactggaatctcatgttcaagtatgttttaaaagaggtgacatactgagtgggaagttagacttgatagcctccaatgtcccttccaatacaggtggagtgcaagaaaataaaaggaaatactgcccaatcttatctagtagaagcataattctccctcattctgtagagaacttcagctttaaaaagcatgattctcaaaattactttcataagaaaaaacaatctgaatataatggcaaaatataaagaagtcaaatactacattctgccaattattttgaccaacagtgataatttttaaaggtgacaaatctggataagtagacaataagaatgacagacatttaatggtaacatctctttggacattgctgttagtgtcgttaatagttttaacttgtgtaacatgagtatcacacaggttacaaagggaatgtgctatatctcagttacaaagagaatgttaaaataacaaagccacttggaaagaaaatgctatactgtgaaaggtagttgttcagaaagacgataaagtcagatttttctctcatcacctaaatgtcagttaggtaactgaaatttttatagtacatatcttcgggatagtatgagaaagaaaattttatagaatgttagaccctatcaaattaagaaatagaagttatttatgaagaggaatatggttgaaacattttgatgtttcgctctagttcctaattttatatttggtgaattaaatgcatttaaaaaaaactttaaatgtgatggaaataatccacaaagctaagcatcaacatttgttgcccaagaagcaataattataattattagattattatttttcaggagttttacatgctttgtatgtaatgccaaccctatatcacaaatgagaaagccaatgcataatgaagttaaatccaagttcatatagcttgcaggtggcaaggctgacactggtattcagatgtgtgacaactcaacctgagatttctcccaatctctcaaattcatagtagaaatttgctatgtggccttgtgaaaattatgtgatttttttcagttttggtttactaatcagcaacgggggaatacagaaacctatgtaacacagtaatgtattcgtacctgtaaatttaactcattcatgcaaatactatctatctgtataaaatgcaatatctattcatatatatatgaatagatatagcatttgcatgaatgagttaaatttacaagtacaaatatatataatataaacatatatatttatttattttagcacctgtcccactcaattgcattagtacataaatatttttctcttctagaacaacactgttctagaagagaatggtttatatatgtatatagtttatataagcagtatatatatattaacacctgtcacactcgattgcattagtatataaaatttttttcttttctagaacgacactgttcagtaaggaagttgctatacacctttggctattttgagcacttgaattgtgactggtatgcttgaggaactggattttttattttatttacttaaatataaaatggcacatgattcagttattagaaaacttttgagtatgttttgatcagctttgatatgtgcattgttttttcaactgcacattgtatcaagtataaataaatgttgaatattctaatgaaatttgaacatccaaagccaatgtgctgtaagtatacagttaacgctagatttcaatttatgttaatacacggtctgttgtaatacatttggccaatagggtgttaggtagatttgaaagaacacaatgtctggattactcaatctgttttctattctgactttataatttatgagttgaacaataaattctctcatgataaaaattatcaaatgaaactcaaagataacagtgatcataatacccaccatacaaaattacaggggaaatataagcaagtatgctggaacaataatattctttttttttttttttttttttttttttttttgagacggagtcctgctctgtcacccaggctggagtgcagtggcgcgatctcggctcactgtaagctctgcctcccgggttcatgccattctcctacctcagactcccgagtagctgggactgcaggcgcctgccaccacgcctggctaattttttgtattttctgtagagatgggtttcactgtgttagccaggttggtcttgatctcctgacctcgtgatccgccagcctcggcctcccaaagtgctgggattacaggcgtgagccaccacgcccggccacccggccaataatattctttatgaatgcaagtgttaatacatttacaaaaaatttttaagtttattgatacataatatttgtacatacttatagagtacatgtgatattttgttacactgttgtatataattatatagtcttcctactctgctatcgaacattagaacttattccttctatctaagcgtatgtacccattaaacaacctctcttcattccatccacacactcttcccagtctccagtatctatcattctaatctctagctctatgagatccaattttttagctcccacatgtgaatgagaacatgtggtatttgtctttctgtgcctgcttatttaacataatgacctccagttccatttatgttgttgcaaatagctatatttcattcctttttatggccaaataacattgcattatgtatatataacctgttatctgtttatctgttgatggttctgaaaaaaaaatgcaaactttatggtactttttaaattgaagtatcaagcaaaggacataagttataattatagcttaaagacttattacagaagtaacatactatgattccacatccagaaaaagatagtatgttaccagcaaccaggaaacctccatcaagccctatggtatcataaactcttcccatctcctcaaaggtaacatgtatcttgagttataatgctgcaggttagtcttgctatatttttaacttgatgtaaatgaaacttttatatatgcagttttttaactggcttttttcactggatactatatttgtgagattcactatgttgcatatagcattactttattaattttcatcgctggatagaattactttgtatgaatataccacattttacatattctgttcagaaaattggggttgtttccagttcggaagcattacaaataattcatctatcaacataaattgtacgtatatttttgtgtatatatgtaaacttttgtattaggtatttacctaagaatagcatttcttaatcattgggtatatgcatatttagctttcaagatattaacaaagggttttccaaagttgtataaattcatattctcaccagtagtaaatgaaagtacaaactgcttcatatcttcttgaatacttgtttgttaaactttttaatttgagcctttctggtgactttataatgtcatctctcatttttcatttgtatatactgatgaccagtgaggcggaatactatttcagttgttattggccatttaaatgaactcttctctgaaatgcctgtttttctactggattttctatatttctcttactgatttattttagtttaaaatatatatattctgggtattctttgctgtttatattacatttttctttttgaatgggtaccttgccttttcactccgtaatgatatatctcttcataaacagaagtttaaatttaacatagttcacttcaatattttctgttatgtttagtgtacttttgtcctcagtttaaaaataaaactctctactttaaaattctgaagctatggtcctgggttgctatataggaactgtttgttttacctttcgtattacaatccacctattattacaggtatgaggaagggatgaatgtccattttttcccatatagatccaactgaaacaacaagttggcactgtagaatattgaggaaaagatggtcttattgcaaagattttcaataagaccatcctttcctcaatattctgtggtgtcatctttgacgaaaatattagaaataaaatgcctatacgtgcatggatcagtttatggactctaatcagttttatttctctacttgcctgtcctcatgctaattccacattgttttaattactatagcattatgacaagttttaatatatggtaatatttttttgagatggagtttcgctgtttctacccaggctggagtgcagtggcaagatctcagctcaatgcaacatccgcctccctggttcaagcaattctcctgcctcaacctcctgaatagctgggtttgcaggtgcccaccatcatgcctggctaattttttttgtattttgagtagagacagggtttcaccatgttggtcaggttggtcttgaactcctgacctcaggtgatctgccagcctcggcctgccgaagtgttgggattgcaggcgtgagctaccaggcccagcctgtatctggtaatattgtaaaagaaaaaatgcaccagacaaacaggcaagaaagactttattcaagactactgaattatggatcaagactattgccataggagagagagatggaaatcatttctactgaaagaaagacaggagagaatttaagcactgaggagagctagtagaaaaatactggaagatattagggggttaggatggtgattaggcaatctgtgattgttaattggcacttaatgaagttaggctcctactgtcccacagagactgggagataggcgtgctatcattaacaattacatttcaaagagatggctcctaggtccttgagaaagatattcccggattgtagaagatttacatctcaaagaggcagagaatatgtttttggttgcaagtttccctaaagtaagcgctctaagaaaagagaggtcaggagcctatagtcaaataaaagcctgtctagagtttagtcacattaagtttgttttggtcagttggtcagtaaaagccattttattttcttcctttttaaagattatcttgactgcttttggccatttcgatctccatatgaattttaagaacagcttgtgaaccctgcccccaaaaagaatctgctgtggttttaattggatttcatctattctctggatcaacttgtacagaatcaacatttttattatgtaaagtctttcaatcctttcatttagttaggtctttattttctctcaataatgttttatagtttttaaagtaaaggctcttaaactttctctgagatttatttcttgggtttttatatttttgctgttatgaatatatttttgaaatttcattttctatttgtgctgatataaagaaatacagttgattttttttcttggtcttgtatccaggtaccatgctacatttacttaataatttgaatacattatctgtagtattattcagatgtacatatataggttgtttttgagtaatgacagttttctttctccctttccaattatttttcatgtcattaattttccctgacatattgtactgtataaatactctagtacaatgggagtattgtggatatttatttctcattttaagtctcagagggaagaactttaataaataatcattaagtatgatctttcctgtaggtttgttgtagataccttctgttcttaatattctaagaggttttatcactaccggatgccaaattttatcatatatttttccagaatcatttgagatggtcgtatttttcttctttattctgctatatgtcaaatcacatgacttagttttctaatgctaaaaaagcctttcttcctgtaataaactaaacctggataagacgtataatcttttttgtgtattgctagattttctttgattcatagtttttcctttacgtccatgaaagtgattggcctgttattttcctttcttgtaatatgcttgctaggtttaagtacctgattatgcaggcttggtaactggcttcataactggaatttgcaaatgggaaattttaaaattaaatttttatgtatttaatacacataaaaatgtccatttttaattggaatttcaacattacatttttccagattttccgttttggagtcagctcgaatcatttgtgtctttctaggaattggtctattgcatctaaaattacagatgtatttagataaagttctatttagtccctatggtatttaatagtagtttattagctaccattgtttgaaattgaaaaaaatgtgacatgaactaagaatttctaacctctctagagaaagcaaatgatctgatgatccttagtctgtttttctacatagtaaccagagcaggagtcaagttgccctgttttctctagcacaggctcttcatttagccacagtccccattactacctattctgttacacctacattatcttatgcattttattaggtatgtacgttagaatttgtgatttcttgtggatgaaaagttgtgatgtcaagagttggcatgagacatagagggatatttatcttctatgcacttgctttcaaataagataccttttggagcccgtgctcagtggctcacgcctgcaatcccagcactttgcgaggccgaggcgggcagatcacttgaggtcaggagtttgagatgagaccagccaacatggtgaaaccccatctctactaaaatacaaaaaagagccaggtgtggtgtctcacacctgtaatcccagctacttgggaaactgaggcacaagaatcccttgaacttgggtggtggaggttgcagtgagccgagatcgcgccactgctctccagcctaggggacagagaaagactctgtctcaaagaaaaagaaaaaaaggatacctattggaatatggccctgttgtttaaaattgtaaaggtaaaaattttcaattcttgtataaaacataagctttatcaagtatagaaaaaaatgcaaaaaaaattatcattaattgtccttctaaaatgtttcactgtgttctatattaaaattctatcatgctccagatttatcacatctggaataaaggctgatttttttatcgactgagctctaaatccttactatcacaagcatctcaataattcatcacagatttaagagcactttcacatttattgatctatctgaccctagcagttacctgtctaggagagtctgtactattatctctatttcactggtgagaaaactaaagcacagcaagattgagtttgttcacagatattacaaagttgggcaacagtagaactgaagtgggaatgcaggaagtttatactttatgtaatgattagcagattgaaagatccaaaaaagatggttctaagacaaaagttgggtggggaaagccacctattgataacgacagtagtagtattcagttttgggatatttgtgcaagacattaacctcaaaggtaaggagcccacctcaaggagctcagagtctgcgaggtataaaacgataaggaagaggaaacctcaagctaccaaggaatgcctgggaatgtgatgaatgctggaaggaacactgttacgctggaatgctccttagaactcctgctctttattttctggtatcccaattgaacagactggtgggagctggagagtacagagtttattaagctgccaaaaaaaaaaaaaaaagacattaaataatatcctgcaaagaataacagcagtgacaacaacaaaaggcttttccagatttattcattagcactttgtatactcacacaaataaataatataggaaactgactgaaatagcgtagagaagaacatgcttcttcgtgttaaaatctcactacactttcagcacaattgcaaaggcagaatttaatgaacaaatcagtcatacttaccttttaaaaataagtcctgcaaaggccacatgttcttaatctggaagtgcaagtatttgctgacgttttatgattaaacaaatacagagttacagtgtcaaatgtttttgaatcaaattataacattaagcttcacatccttgtgaagcagattagattaaatgttaaatctagtcaaacttctgctaaaacaaaatatgaaaagactccaaagggattcggcatctggatatctcactgtaggttgtgtagcacaaattagaaggcatatcttttataatgaatgccctactgaatgaataccattatgaacgagcatgaacttgtagccaaatggatctgaggtcaaatcccagacactcagtactgtggcttctgtgacctcagacaagttacttaacctatctgtcagtttcctcatctgtaacctgcccctttggaagtgacagctaaaaattccttgagttcagacaggagattattacaggatcatttaaatagaagtaagaattatacttttgaaaaaacttccagtagttgtttcataactcatcaaaataggtttatccgccctgtaccatatgttatacagtgaagatataaggtacaccattttatagtatggtgcttcagttcagtttgtagaaatgtgtaaaactgagaaccaagccatacccttggctaaacactattcagtaggactctgccacatttctgcctcataatggatttttgtttttttcaatggtttttgatgtgatttccatttcaacatcagtaagagtaagttgcttatacgttttaactgcatagttgttgataaagtaagagaaaaatcaagaaataagggattttcagagggctcattacacataaaattcatttagcagagaagtgtattatagggtcttaacctgcaataaaataagatgggttgttttctgcctccctctttcataaagccccgttgctgatgcattgtgtggtccatggcacataattgtttccgccttagtggatatacgcctgggaacactctatctcttaacgccaatactgatgggcacagtttaggtttcatattctatccctggctccagtaaattcaagggtcaccatacttaagatttacctcccaggcttgtcagattttcctcagttacctttatccaaatgttcttttagtagccatttttcacttttgaattgaaatagcaactcaaccaaacaaaggaattcagatgagaaatgtccttggcacgtacaacaatatgacatgtgaattaaatgggaggaaaaaatcctccccgttgtggatctgagcatggacgataatggagttgtgatttagtccatgaaaatgttagacgaagtgagctgacctttagcttcacttactgctgagacaaaatgagaatataaataaaaattaacttcttttaccattttgtgagactttgtaattcattggttttacatttatgtgtagaatgtttagctctataaaaatatgcattattgctaaaagctcaagggattcctatacgtaaatagaaactcagagaaacagagttgaagttacatattttttttttctctagagaagaggtttctaatcctaatacagtggttctttaaaaaatatatgtattagccccattttatccaatttcttacacttgtctaacaattttgttatagccattcaggcaatgataggaaccagcatctttgagtgattccagagctgagggatatagtcttccaattgctttgcttcattctttgtaattcaaattaaggccaatattgctaagcaataaataggtaaatccataaatttaaagcacttcgtgtattatctatttatacttgtgcatatggcatcacaaaaatgtatgggcagatgtttacagcgtatgagcaagtaatttctaattcacttttccgcttacactgagatcagtggaaagcactatgcctgccttgctacagaagtgacttagattcaattcattgagtattttctaagagtaagataggtttaagcaatagaatatgttactaaaggatatgtgttcatgctgtcttgtgttggaaacctttaaagaatatacttgaagactaaacatttattcgtaaagatttaatgggtgcctttctacagtgaatacagtaaaatagatgacccttggcagttcttagatttgatgtaagaaccatgatcaagcaaattgtaaacaacgaccaactcttaaataacttgtttcaaattaataatactttcccatacatactcttgtttaacatttgcaattctttaacgggttggtattattattcgacagacatttagccaagtatttcttgaaaaagaatccatctatcttaattgtcttttgtattactcctttgtgagggctatcattaaaaaataacatggactggtggcttaaacaatacaaacactttctcaccattctgggggccagaagttcaagaccaaggtactggcaaggattggtctcttgtgaggcctctctccttggattgcagatgaatgccttgttcctgtatcctcacgtggtctctcctctgtgttgcacatatccctggtgttttgctgtgtccaaatttcctcttctcataaggatacccatcatattggactagagtaaccctaatagactcattgtaacttaatggtctatttataggctctatctccaaatatgggcacattccgatgtagtaggtggggcatagggcttcaacatggatttcatgggacacaattgagcctgtaacatcttctcttaatatttggcatatccagatatttggtacatatttgttatataataaattcatgatcaatgaatgaatgcattgatggctgtcattaactgtaacctagatattagctgaatcataaacttgctccattatttggatataaagaacactttaagtggcattttttaaatagttatgttaaataggttgcctatgtacctaaaagagtgtttaattacagcaatccctccctccctccctccctccctccctcatccatggttttgctctccttggcttcaattactggcagtcaaccacagtcagaaaatattaaatgaaaaattccagaaataaacaattcataaattttaaattgcatgctgttttgagtagcataatgaaatcttgtgctatcccacctctgtctcacccaggactgaatcacccctttgtccagcgtcttcatgctgtcaatgttacccgcccattactcagtacctgtctaggttcttagaaacactgtcatggtatcgcagtgcttgtgttcaagtcaccctagttttacttagtcatggccccaaagtgcaagagtagttatggtggcagttcaaatatgccaaagaaaaactgtgaagggttttctttatgtgaaaaggttcccaacttaataaggcaagaaaaaaatcgcatgctggggttgctcaaaatctgtggtaagagcaagtctatccgtgaaattgcgaagaaagaaaaataaattcataaatactatatatagggttttgtactacctgcagttttaggcatccacctgaggattttgaagcatatcccctatggataaaggagaactactctattagttttttgtgactcatacagtgaacaaaactgcaatattaaatgcatcccattagtacatctcagaatttcaataaatttgaaaatgttatacaacctggaataggggatctttatttggatttgtattcccactaaaattaataaattatacatttccacctatggggttacaagcttaaaatgctgcttcagtggatactatatgtcttgtagcactagagagaagatgctatatatacttgaaagtcttttttgtttatgaatatgatgctatagcttgagtttgtcccttcttcccttgactgtcttcttcactggagttgatgggctacaataaatttcccacattttgactttgtagatctgcatcatcacgtcaggtagatggtgtagtttatacttaagagataagattttctccatttgaagcttttttctcccacaactaatctattaaccattttgttacgtgccattttacctgacatgcactgacagggtcactaggaagttagctaaaaaaatgcaagtatgttttagaaaaaacctatatatactgcttcgtaataattagatggttgaagtgactaaattcattgatttaagctcgcacatttcctgtgggtatctcgcatcactgtttgagcgctatggcttttattgtaaacataattcaaaataagttgagtagaaagtgaaactacaaaaaattaacagttacattatgctgaaagcaataacattgatatttatgaagaaaaactgaaaactcacttatgattgagctgcatataagtacatgattatgttaatactgtaggaaaatgttgactgccttctgtttacccatgcgtgtatttttttttaagtggtgatagattaaacaatttaagaaacgtgactctcctagtcacttagaaataggtggattagggccaggtgcagtggctcatgcctgtaatcccatcactttgggaggctgaggcaggtggatcacctgaggtcaggagttcgagagcagcctggccaagatggcgaaaccccgtgtctactaaaaatacaaaaattagccagacatggtggtggatgcctgtaatctcagctactggggaggctgaggcaggagaattccctgaatccaggaggtggaggttgcagtgagctgagatagtgccattgcactccagcctgggtgacaggagcaaaactctgtctacaaaaaaaaaaaaaataggtggattattttcatgatgctaatttcatttgcattgtttaaatcatgtgttaatatcctctaggtgggttaatacacatatgtagtataaagtaacatagaaattatgagaccttagacactgagtagatttttcaaaaatatgagttataaacatttttctaactctaattctatataaaataaagcacgtcaatattttatgatttctagctttaaaggtccaatatatatatgagaaaataagtttcttatttatatgaaaaagttacaaaaagttgaaaattcaggctataaagtgcatcataatgaggttgagctaactgccattttgaaatgcttcctttgcatagaaagcatcacaatatttgttttccttccaaaaatcattgatagttggtttatgttacatattaaaatagtgtgtgttcttagacattagtgacatgttaatgatatagtagtttttactcagagattgttagttttctcactagagtagtttagaaacagaaaattttaatacttttgtaataattgagaaaattgaaaaatctacatagtaatagaatttaagttactaagaattttcttctacaatccaaatggtaggcaattctcattatgcaagattgtttcaattaagagtcttttgaggcattctatttagtagttagacttttattctttagggtgtattttcaaacctaaggaaaatacaccttttacttgttctcactgcaaaatcctctctatatgtatgtctttgttatcttacatttgctatggagccattttatatagtggtataataaccacttcatattgcttgtctctttgcttttctatgaaaggtacaagacttggtgagataaagacaaatgacagtcacaccacttatttaaatgtaagcagatcagaaagagtgtcccttccaacttctagcgtacataggagactgagatactttggcaaattattcatgccatttttaataaaacgtagttaccaattgtttgctgatgctgtgcttgattgtctcttctccaggtattgggagatcgatgggcaaacatctgtagatggacagaagaccgctgggttcttttacaagacatccttctcaaatggcaacgtcttactgaagaacaggtgtgtcatgtgtgagaaactagctgtaaaagacacggggggatattaaattggaaaagtaaagatttatgtttatttattccttggaattctttaatgtcttgcagtgcctttttagtgcatggctttcagaaaaagaagatgcagtgaacaagattcacacaactggctttaaagatcaaaatgaaatgttatcaagtcttcaaaaactggccgtatgtactttctagctttcaatggtcttataaaaacccagtactgtatattatcactattatttagtctcttctatgctattgaatattaaatgtttatttttgcttggatcatagattattcaaagatgttatattgctacttttctgaattaaagtgggaaaaaactataggtggattttcaactttgtttttcaaagttgtactcttgataaaacatagcataccagaataagacttcaattaaaattaataaagtaatactaagaaatgtctgtgagcctttcataaagttctaagcagcatagttctaaaaaaatagactgacgttgattctcagaataatatgtgagagttacaagcgacggttatcctgacattgatggagtttaaccttagtttattataaaggggtacctgagactgggactgggtaacttatgaaataaagaggtttaactggctcatggttctgcaggctgtacaagaagcatgacaccagcatctgctcctggtaagtgcctcaggaagcttacaatcatggcagaaggagaaggggagccagtgtatatcacattgcaagagtggaaacaaaagagataagaggaaggtcccagactcttttaaacaaccagatttcatgtgaactaactgaatgggaactgactcatcatgaaagggattgtgctaagccattcatgagacatccgccctcatgagccaatcacctcccaccaggccctacctccaatgctgggaatcacatttcaacatgagatttggagaacagagatccaaacaatatcacctagtttttcaagcaaaaaaaaattaaagcctatcaaatgacattgattataaatacctcgagtgttttgagaatgagatttctttggcaataaatggatttcagaaaagacttcattgaagcatttggtttcagcaggaatttccaagatttaaaaaaaaaaaaaaaaactctaaagtttctcttactctgtgaattttatcatttctagtaaaagaggccggtctgatactatgagtttaatttttcacgtgacatattctactttatgatttcttaaaatttttgatagatttgattaaatgttcatttgatatgaacttttataaaacaaaatggttgtaagtagtgttccataatttcacctttattattgcattgtacttcataataatgcaataatttctaaacttaagtaaatttttccactcattttaaatacgtaccattttaccagctatttatttgtttcatacattttttttgctccataaatgctaaccctcattggtcttttaatttaaaatagattcacttatgtattacttgttattacaagctagcttattattgataagaaattattgctcaaagaatatggactttattaagtgatgtgactgccgaaaatagagttcagaaaagtaacctgtatatgtttgaaaacacgagtgcaaaaatatcagctgtatttgtagttttggcctgcagctgatggggagccattgagagtttgcaaaagaatcatatttgcatttttgtaattctttttggtaggaagatgtttgatggtacgaggactaatcagaagacctgaactaagtagcattgggcattaagataagaagagaaacattagaatgttaagatgtgatgaatgaaacttgtgataagaggcagaagtttgaaatggttcctagacatttcatttgggtgactgggttcctaggagggttattagccctaacaggagaatagaagaggaattgctggaatgacaaaaatgataattatttcagatttggatatattccgtgtaaaatgtctttgagacatccaagttaaaaatcctttccattaatcagttggtttacacaactagaatctcagaaaatggttcatgactagttattgattcagaagcaatcaaaatgcttctgagggattgtgtagagtgacacattaagtgaaacgaatagatttcagggaggaatgtctacaatcaaggagtaggcagaggataagatgttgaccaaaagattgagcagataccacaaggggaaagtggtatcacaaaagtgaggagaataaagatttcaaaaaagtaggaagtggtacacactgtcacatgccacagagaggagaggataaattcatgagggattctatcatatctagaggaatggatgcatggattacatctccttaaagcagaatattccttacaaacattgttcttctcaggcaaaatgtgaatcctttcagtaaataagtgagtgaccactgattatcaaaatgcagtcatgccctctgattaggagcgaagatatattgctagttaaatacagaatcatgtgcttcagacggtcaatcataatggtgatggtcagtcatattctgtgtgctgaaaaagtcacaagcctgcccagattcaaggaaaagggaattagatttcatttcctcatggagaaacaccaaggtcaagttatagcaaagcatctgagatgaggatattttacagccatctttggaaagtaccacatgccagaatagtacagttattttacatgatgataaattccaaatcttaatatctagtcaaagttcctgcatatattgttgactagatttaccaatcaagaaagttgttcttaggaagccacaaactgacaaaatccaaatatgttaaagctagatgagattttgcatctcatctagtgtttcttcaatctcattacacatgtaaagttcattaggaccatctactcagtttgtttccaagagaaaatcgagatcaagaaaaaacacaggatctgtatcctacaacattagtatcagacttaaaatgaacactaagacatccagactcaggtccaggcctttcaatctatttcagtagtcctcatatcagttgattccttggaaaaaataactgcaactgagaactgtcatttctaacaataatgtgcctctatgttaacatttttgtgagcagaaatcttggctagcctcagggccataaaaatgctcttttaagaaagtcaataattttccaataggattaaaatttgtgttatgtcaccttgcttgtgaacaaagagaaaatatgttttctataggtcttgtcatttgatagtttaagccaattaacaaaacctgacagctggtctagaatttgaggtaaaattcctttgctgactcaggcagtgaataagaatttaatgttcattaaaatatgtcacaatctgagacccaaaacaggtaccatctgtcaccagttttcactacatgtctaggtatagatacactgtgctaaactctcttctctttacaataagtgtaatttgtttcaaaatagtatcactgataacccatgggattgtgtcctgcttgccattgaggtgggaggtggggattatgacatttaatttgctctagatctttgggattcatatccaaatcatgtagatctattattttttataatcaaaactgatttaagttttaaactgatttggcatcagggataaaaatgaagggaaagaagaaacagtagcttttatgaggtgaattataagacttgtagaatcacgtaaattatcgtgggaagatccaagtcaagaagaaacctgttcctgagtaaatgtatttctgctgtggggactgttggcgtttgctggggaaggacagctctggggaagcagggtgatccaagagattatggtatataagggctacagaagtacttaggaattgaagatattctcaaatggctgtgggatcaaaggacatggatgaagtgctcatggtaactgagcaagttcctgtttgacttgctacctttacctcaactcctgggatggccctcaaataattaattcagacaggatcaatgcttctcaaaatgtgttcccccgaccggcagcatcagtatcaaggaaatttgttaggaatgcacattgttaggccatcttcagacctactgatttagaaactctggaagtggagcctagtcatctgcattctaacaagcctttcaggtaattctgatgttctttcaagatgagaacctctgtaatagatcaacctcccaaagtacaactggtgattagaatgaattggagcacatcttacatgtagataagtaactacacataatataggtggaaaactcaattttgccaatataggagaaattgtcttggcattattctcttatgcgtattcctgatgagagtgaggtgaaggtttcctgggccttttgtaaggatacattatcttttcacttcaaatcatcttgaacagcttatctgtctcttctccatatccactactgacccagtctgatttattgactgtaccttcctccctaccttggaggtaggtctacattcctggcttctataaaaataaagtctgtttattcttttactatcccagctggcctttgccttgtacacattctctagatcttccttttgccacctgaattttctagagctctatgggtctctggcactcatagacctatggttaattattgatatgtagaaatacatattttatgcaataattagtaacaaatcatagttatttaatatgcacatgtaagacctaagcttaaaagaatcagcatcaatggatagacaggacaaggtaattctaatgaattctatgatctaatgtatctggccccatcatggattttctttcttttcctccctcagttaataatcctgggggagttctggaactgggagatgactactgaaagacagaaaaagagagagaaactgagaccaaacaactaatctgccatcatcatttttgatactcatatctaaaatttactaggtataagtctgggttcagtgtttttgtcatacagacatataaaaattcatttattcaataatcacacaatgtaattataacattgattttactttaccttgagtgcacttttttcctaattggatttttttttttttcttgagatggagtcttgctctgttgcccaggctggagtgcagtggtgtgatctcggctcagggcaacctctgcctccctggttccagcgattccttgcctcagcttcctgagtcgctgggaccacaggcatgcaccaacattcccagctaattattgtatttttagtacagacgaggtttcactatgttggccaggctgatctggaactcctgacctcgtgatccgcccgcctcagcctcccaaagtgctgagattataggcgtgagccaccacctctaattttatttttaatggtgactttcactttcatttttgtaatgcttaccaaatgtttcttcatgtggcttaataataaaacaggaggcttattttcatttgtttaggtaccatgaggttactcataggtttttattgcaatcctcttctttaaacataattctcacactcctcttctgacatgtttccaaatcattacatattttgtttaaataatgggtagaccattcagccttacacatatggctatttaaaatagtttctaacattctgagtaagtaagtcaaagaggattgtacttagattttttttttatttttagatttgtgtctttgtgtatattgtgcctctttccatagtaaagaaaaaaaatgacactataactggaggaatatacattgaaattcaaatatggctctcagcttgggacaggtagcatcaacctttgttctagtactaatgcaaatattcacttaaatttaatggaaaactaacaagtgaattaaacaaaatgaatatgcaaaacctatctattgggctgggtatggtggctcatgcctgtaatcccagcactttgggaggccaaggcgggtggatcacttgaggtcaggagattgagaccagccaggccaacatgttgagactcctgtctcttctaaaaatttaaaaattagctgggcttagtggcatgtgcctataataccagctactcgtgaggctgacaggagaattgcttgaacctgggagacagaggctgcagtgagcagagatcatgccactgcactccagcctgggcgacagagttagactccaactcaaaacaaaaaagaaaaaccacctacctattgctaaacccccacaccgtgagttttattttgatttgaattcagtgtataatatcttaatttgtattttggtctattgcattctttcaaacttagaaaaatactgaacttattgttaaggaaaaattagagatgaaacttaaatcttgctttgtttccccttaaaaatggcatgaagactgaactataacatactccaggtgaagcagattctgagtaaaagacaaactaattgaaggagccactagagcattctgcagttcagagctatcaatgcaggtgccatgccaaaatgggctacttagattgtccttttcaggaaggtgtattgactgctctaggtttggggcactttgcttcatgggcaattggtgcatttgtgtcatgacaatttgctctgtggtatgttagttcttaaataaacttacatttgtttcggaaagacaggtatcgcgatttagtttacattcattgtatttgctgccaaatatggggttgttaagtggctgtaagataattttctcctttatttctcttccttcttctcctttgtttacagattaagtcagggagtaatgttcagtacccaggaattgaatttgtctgtgtatcaggcaaagttactgagtcaagtaaaagaaaaactgccctgatttactgatttcacataaaccacttattcctttcaaatcaaccaaagggagtttgtaaccctccacagctcacaggaactttggaaatataaatggtataaaaattgcttcataagacacataagtatttataaactctgaaaagagatgctgaagcatttatgtcatgcccagcgacttagttcttttacttaatgggctctacaattagttttaaaaaataattactcaaataaccagatgttaattgattaatggatgctacaaaaattttatggtcagtaaatcacataatgagattttatctccaaataatgaaccgaatgttaaaactgtggaaacaataatattgtaattttatccaaataatcacagcatttcagaatggcaagtttccttagccattctcattttctcagctcactagcttttcttcagtactcctggtacctgattgtcagttttcgtttgaattccgtcaggaattaaggggaaatccaagatccgtgccttctaatttccacatgttgatctctgttttgccttttgaagcaatattaccttttcacttggattttcttcaaatatttcaaggtagctcttaattacctctagtaggtctttattctacgtttgagtttcttttctcttcttttctcttcaaacttcttgggataattagatagattataactttctacctctatttttctgaacttttgatcctttgcgggcacgattgaaatattttcttatctatgcaaatgagcaaatacacgcaaaagcagattgaactatagtggtgtatggaatgcaacccaggcttattctgtgatctttcttgttttaacaggttttaaaagcggatctagaaaagaaaaagcaatccatgggcaaactgtattcactcaaacaagatcttctttcaacactgaagaataagtcagtgacccagaagacggaagcatggctggataactttgcccggtgttgggataatttagtccaaaaacttgaaaagagtacagcacaggttagtgataccaattatcatgctacagactatctcagagattttttaaacctgcattaagagagtgacattataaccctacaaaagaagcaaccagattagtttttgccctgtgtttagttaaataaaaacatgattcttttgcctgtcttgttgttggagaatggtggtgaggtagagtgctaattaactgaacttgttactgccctagagtgaatttcttccagcccaatagtaacggggaactgagtgacttagagcaggcgaacaaaatgctgggaactgtataatcacagtctaaccccaaatcagagattgctagaaccacgaggaacattagccaactccgttttactcttgagaaaaatgaaacttagggaagaaaagtaaatttttcaagagaagttagtggtaggagaactagggttcaggtcttttgatttcttggaaagttttttattagtgtagttaattatctgactattgtaccttttctgccatagactgctgatttcataaaattatgaatgtggcttagttatactaacacatacgggctgtagattatgaaaacatctcagctacatttggggtatgtggttttattataataatttttaaagatttagtcactaaaatggggtatcgttaaaagttgaacctctttttgtcttatgtagttggatggtagaataatgagtagtcattcaagatataaacattatatataatagtatttaacatattctgccacatagcctggcattataaggaataactttactcaaaattcatagctcaatgcacaggcatacacttccatattcaatagattttaggcaaatatttcctctatattgagacaagtacatggaatttgttttcttgagacctgacatctgataagtagcacttaggaaatgccttttggagacatgaagtttgtagtattgcctccaggaatacaatttaagacagcgtaataaaccagcctatatgattttcaatcacagttcaatgttacttttaatccaattttacgttaaaaaattataatttgaagaaatatgaatataaattgtaataatttcccacacaatcattacataataaaaactccatttgttttccattaaacatactttagcaattaattgacctaatagtagttttagtactatattatgattcctcctgttttatgtgatctgcccatggcttctttgcaatacattggtatttatgtaataaatacatgagacattagtcaatttgatactttttaacccaacactgagagtattcccatatgtacccattgcttccacagattattgctgccataaaatggtcagttgccgtgttaagaaagattgccattatttgataaagaaagttattttgacgtgcatcccttttaagggacatgtttagggagctgtaacagttaactgtaggtcatcttctagttcatttgcattgcatggagtggttctcaaacttgagtctgcatagtagccacctgaggagctaattaaaatgcatattcctaaacattttgctcagaaaatctcatccataagctgtgataaggacctaaaaatctacatctttactaagcctttgatacaatctgcagaccatagaggggatcaacatacactgggatctacttgaggtgggagggtgggaggaagtagatgagcagtaaataagactattggatactgggcttaatacctgggtgatgaaataattggtaagcaaacccctgtgacacacatttacctatgtaacaaaccttcatatgtactcctgagcctaaaataaatgtttaaagaaaatagacagtgatatgtgtgtgaatcccaacattctggttttccacaatgctccctgaaatgtgaaaagggagagcttcttgggaatacactatataaatatgctcattcccttggaatgggactactttttgatgaagtttgtacatgtcatcgaaatattactgatttgattattccaattggtagaaaagcatttgaagccttatttttaattccctagaaattatgagaccaccacctaggcaattgacgtgatgtcttccaacttgtataattctataataaaagaatactggttttgatttgcatggttctttatgaaataaagtccaacatgcattacagcatgtatctcttcacttgctcatagggatacaatgaagataaaatggaggcatagacaagaaagcatttgaggggaaaaaggttgagtttgatatgtaagtcatgtagttcagtgtgtctggagggctttttgtggttctctatctgcttttttttttttttttttttttgagatggagtctcactgtgtcacccaggctggagtgcagtggcacaatctcagctcactgcaagctctgcctcctgggttcacaccgttctcctgcctcagcctcccaagtagcagctgggactacaggtgcctaccatgacaccccactaattttttgtaattttagtagagatggggtttcaccatgttggccagggtggtctcgatctcctgaccttgtgatcctcccacttcggcctcccaaagtgctgagattacagacataagtcaccgcgcccggcccactatctccttttaattttattttcaaacagttacacgctcctattgtgggctagaaataaataaaaggacttaacatcatgtaagttgttttccagaacactaagcttgagtttttcttaagcttatgtttcagttttctctcattgcctttccaaaaattatgctgtcatgggattgatccaaatctttgctggctgtttttgagctcacaggaaggtagaaatggagctactcaggaaaagagaaattaaaaggaggtaaacagagacaacagcgaaatagtatcatataagagcaactgattttcttttatccatgttaaattgaccttgattaaaattacataaggagaattccaagaatatgagctgtaaggttgtgactttgaagaacaaagctcacttgtatgtacattttctataatgattgtgggagaaaaatgagtttcattaatgactactcacatgatatactcaattgtttcaaaaattcttttaaataattagtataaagaatgagcaaagttctcataatggttaaaacctattgtgaggcagggtgtggaaatcgtgattgagatgacaaggcacccagttgtactcatataaagaacactgcttgcgcgtatgattgctgttcaggtcagagctttgaggcatttttgaccttttgaagcagttgcatggcaagagatcaaaacgtgaaaaaataatcagctaggaggactgctctcttgcatttcaaactcagatttgacttgaataatacctggacacaagctgagggtatttaagttgattagaaggtagcctaagaagatagaaaatactttttttctaaatgttggagagataataactcttgctatctggaggcttacaatgagaaaagagggcaaatataccctggattgacttctttaaaaactcaaatgatcatgattccctgtaattttttataaacatacttgtaatttgtgcagttttttctaattgccttggccctgatcgatatatattttatcttgatcataattatgaaatacgatagtgacgaattccatcaacatttgcttgtctggaaaagattttattcttccttcacttatgaagcttactttgtctggatatgaaattctgccttggaaattcttttctttcacggtgttgaatattagcccccaatctctactggcttatagggtttctgctgagagatctgctgttaccctgatgggcttccctttgtaggtaacctggcctttctctctggctgtccttaacattttttctttcatttaaacctggagaattgtatgattacgtatgttggggttggtctgctcagtatcttgcattccctgaatttgaatgttgggctggcttctgctcagtgagtatcttgtatttcctgaatttgaatgtttggctggctttctagattggagaagttctcctggatgatatcctgaagtgtgatttccaacttggttccgttctccccgtctctttcaggttccccaaacagtctttgcttcagaatttacataatcccacatttgtcagacgttttgtacattcatttttattcttttctttttctctaatcttttctgcctgtcttatttcagcaagatagtcttcaagctctgagattctttcctctgcttggtctattcaggtattgacaatgtgatttcattgtggagttgtcgtattgcgtttctcagctctatcaggtcattcatgttcctctgtaaactggttattctggttatccgctcctgttacgttttatcgtggttgttagcttgtttgcattgggttagaacattctcctctagctcagggaagtttgttattatccacctttgaagcctacttctctcaattcatccatattagcctcagcacaccatctcacgccagacagaatggtgatttttaaaaagtcaagatacaacagacgctggcatggtttcagagaaatgggaatgcttttacactgttggtgggaatgtaaattagtttatccattgtggaagacagtgtggtggttcctcaaagaactagaaccagaaatacccagcaaggccgttactggatatatacccaaaggaatataaatcatcctattataaagatacatgcatttgtatgttaattgcagcactattcacaatagcaaagacatagaatcaacccaaatgcccatcaatgatagactggataaagaaaatgtgatacatatacaccatggaatagtatgcagccataaaaaggaatgagagtatgtcctttgcagagacatggatgtagctggaagctgttattctcagcaaactaatgcgggaacagaaaaccaaacactgcatgttctcacttataagtaggagctgaacaatgggaacacatgggcacagggaagagaacaacacacactggggcctgttgctgggagaggaggagagcatcaggaaaaatagctaacggatgctgggctcaatatctacctaatgggtctgtaggtgcaccataccaccgtggcacacatttacctccataacaaacctacacatccaatacgtgtaccctggaacttaaaaaaataaatgtgatagtaagaaatttattataattaatattttaaaatataatgtatgtgatttgaagcattactttcctcatttgactgaaatcacatgtgctgttgaaagggtatattagtcatatgctttacaatttggtatgctaattgtaattatcatattacgccataaattgtaattactgtatttaatatgtaatttatattaagtagtatataccaggtgctttggtgtaagcatatatatatatattttttttttcaagcgagtctaaaggttttgtagttttgtggatttttagtagaataaattgtcttctttctcaggaataaggaaagttgtatgacttattaaggttcaaatatctcattcccattttgtgaatattttgctatattgctaacaacaatttttgcaacattctcaactgtgagcacctctttaagataaaatacatatgctcagaatttgcctcttcttgtacatggcagttcatgtttatgctgtatatgtttgtgcctacattcaaggatgcccaaaaagagaaaatgattattatataattatgtgtaccttctatatcatctatatcctgatgagagatttattatgtgtgctgccgaagcaagcacctgatgggagatttaaaactcctatcaaatagtaatataaaacatagctgtaaatgataagccagtgctttttattatacccaaaatgcaaatagaaatatgccaatgtaccaagatgaaaatttctttacatgttcttcttttctgagttaattctcattctttaaagatcctctattttaacccttcataaaatattttatgttcacgttctggctgtacccattctcagagcatcattttgtagacctctttgtacaagggggatatagttgcaaatggtttgcctctcttcttttttggccagtaagtttaattaaaaatactctaaggctttttatttaaaagaccttttcattgcttcctgaaagctctccacgactagtaagcctgatgccaattaaaaaagaaaataattttttaaaatctggaattaaaataaaaataccttacttattttgtgtttccttcttacttaaggtcatagaattaactcccttaaatttgagaacatgttttgggtaattcctcaggttaaagttttattagaaaaatttgaagttgaccgagtgtggtggctcacacttgtaatcccagtactttgggaggacaaggcaggcaaatcatctgaggtcaggagtttgaaaccagcctggtcaacatggtgaaaccccatctttactaaaaatacaaaaaaagtagccaggcatggtggcaggcgcttgtaattgcagctacttgggaggctgaggcaggagaattgcttgaacccgggaggtggaggttgcagtgagccgagatcatgccactgcactccagccgggatgacagagcgagacttcgtctcaaaaaaaaaaaaaaaaaaaaaaaaaaaaaagaaaatttgaagttacatctcaaataactttggaaattaactgtatcattttgctatctccaactataataggtatttgagaatgggccttgtatatcagtgcaataggttttaccttgtaaatgcattgtctgtaacaatataaaatgtaagcactaaaaaatttaatacattcagtctgagttaactcttggaatctctcattctttatttataaatttaaaggaaaggtaagctaggcagatttctatagtggccatcgagttctaaatgtctttgatatgtttctctttgcttttatgtgaaactctggagtacttagtgaagaagattcctacttttgccactggaaaggcagctaaaaaataatgataataacatcctatccctattcaaaggagacttaattatgaaattattacactgtattcactgagtatgtcattaaaataccatacagacaaaatgctcagcatctgtatgatacgcctattatctcctgacaaaaaaatgaaataacacataaagacaaatacaagtctttttcctaagcctatacttgataatatccatccctaattatagaatgtgtttcattacttcagtgttagatggtatgtagaggaaggccagatggatcagaaaaattaaatctcattgctttgcaatttttgcaggtgcagttaattcacacagttgctcaaattccgtatttaatatgaatccagaagacaacatacatctcttctttctgatacaatttgtactaaagacaatttaaaatgaggaacaaaatacattaaattggacagacagttttacagaataaaccttcttaattatcatataatatttatttcgaagaaacaaatgacttatgatgccttctaagtatttgacaataattttgctcatgatttcaatgtcagtacttattcaagaaattttattaccttacagtaataaattaattattaatataaattaaattattattaaattattgtaataataaattaattacagtaattaatagtaaattttagttaccaggctactgtcctgaactttggcactcattgtatgctacattcagctatgggaagtcctctatacttcataagataaagcattttacatccttgtgattagtaactcagcttcctttgtgaccatctgatcttttgcccaaggattctcccaaagttcaacatataaatattttcttttgcttagagatgcaaatctttaccagatttttgtgccttgtgctaccatgcctgtggagttggtttttaagcatggctatcaattattatctaaagctgttgctatgattatgcagtatgttttaaactgcagaagtgcaattcctccatgcccattaaaacttattgatcactccaaagggttacatatacatagacagacaacgcaatgaaaagccttgatccacagttgtcaacctgattgtgtgtgtgtagtgtattttgactaattttgcacagatttcaatatagcatgtcaagagccaaacatatttaacattgagtaattcttcctatataatagttatgatgtgccattgtttacaatttcagtattctgaatttatatatgtgtgtgtatgcatacaaatacacaccccttaaaaggaaaccaccattcaaaaaagtgtacaagtgtaggagcaagtgagcatagctgataagagttggatgaatgaacattcagacttggatttatatctatgctttgctactaaaaagttttatctgcctcaacaaggtcactttcatctataaaataggaataatattagtacttactcttagggccattgtgaggtcataatagctaccatttattaaagctttacaacatagcaagggagtttttctagatcttttgaataagataatcaattcaaaacacttattgtaatgcctggatcatgcagaaagcttcataactggtacctgttattgcaagtattagtatttgcaaaataaagattttatgctaaattagtaactaatactttatagcttgaatctttctagtaagtatctaaatattcaaatactagaatatctcaaaaggcaagaagttgaaatctcttatcccagcataacaaaaaagttacaaaggcaataatatgtaaataattaaatggaaagttaaaagtttcaattaagaatatcagtcaaaaataaaaggaaaatttattagcctgttcttacactgctataaagacatacctgaaactgagtgatttatgaagaaaagaagtttgactcgttcgtgtttgtggcattatagtattccttggtgtaaatgtaccacattttctttatcttgtctatcattgatgagcattaaggttgattccatgtctttgctattgtgtatagtgttgcaatgatacacatgcatgtatctttataatagaatgatttatatttgggtatatacccagtaatgggattgctggcttaaatggtttttctgcctctaagtctttgagaaatctccgcattgtcttccacaagggttgaactaatttacactcccaccaagagtgtaaaagtgttcccttttctccacaacctcaccagcatctattgttctttgactttttaatagtaaccattctgactggcgtgagatgttatctcattgtggttttgatgtgcatttctctcatgatcaatgatgttgagttttctttcatatcgttttaggtcacatgtatgtcttcttttgagaagtgtttgtttatgtgctttgcccactttttaatgaggttatttgtttttttcttgtaaatttgtttaagttccttgtagactctggaccattgtcagatggatagatggcaaaacttttctcccattctgtaggctgtttatttactctgacggtagtttattttgctgtgcagaagttctttagtttaattagatcccctttgtcagtttttgcttttgttgcagttgcttttgccattttcctcatgaaacctttgcccatgcctatgtcctgaatcttattacctaggttttcttctaaggtttttattgtttggggttttgcatttaagtctttaatccatcttgagttaatttttgtatagattgtaaggaagaagtccactttcaattttctgcataggactatcccagcactatgtattaaataggcagtcctttccccattgcttgttttttcaggtttgtcgaagatcagatggttgtaggtgcgtggtcttatttctgagttctctattctgtttcattggtctatgtgtctgttcttgtaccagtaccctgcttttctggtgactgtaaccttgtagtatagtttgaagtcttagcttttgggctgagacaatgggggttttctggatataggttcatgtcatctgaatacaaaaataatttgacttcctctcttcctatgtgaataccctttatttctttctcttccctgattgccctggtcagaacttccaatactatgttgaaaaggagtggtgagagatggcatccttatcttgggccagttttcagggggaatgcttctagcttttgcccatttggatgtgggtttataatttatggctcttattattttgaggtatgttccttcgatacctagtttattgagaatttttaacatgaagggatgttgaattttattaaataccttttggttgtctattgagatagtcatgtggtttttgtctttagttctgtttatgtgatgaatcacatgtattgatttgcatgtgttaaactaaccttgcatgctagggatgaagcaaacttgattgtggtggataagctttttgatatgctactggatttggtttgctggtattgagaattgttgcatcagtgttcatcaatgatattagcctgaagtttgcttttctttctttctctctttctttctctctctctctctctctttctttctctctccctctctctctctttctttctttctttctttctttctttctttctttctttctttctttctttctttctttcttctttccttctctctctctctctctctctctctctctctctctctctccctccccctccctccctccctccctccctcccaggttttggcatcagggtgatgctgacctcataatataagtttgggagaaatcccttcttttcaatttttttggaatagtttcagtggaaatgataccagctcttctttgtaccgctagtagaattcagctatgattccatctggacctgggcttttgttggttggtgggatatttattattgcctcaatttcagaacgcattattgatctattcagcaattcatttcctttatggttcagtcttagaggggagaaatgtgttcaataatttatccatttcctctaggttttctagtttatgtgcatagaggtgtttatagtattccctgatggttgtttgtatttctgtagaattattggtgatattcctcttcaaatttttcattgtgtttatttgattcttctctcttttcttccttattagtctaactagaagtctaccttttttatttttatttttttccaaaaaccagctcctggattcatttagttttttggagggtttttcatgtctttatctccttcagttcagctctgatcttggttatttcttgtttgtttgctcttggtttgctagtttttttatttgagatgttaggctgttaagatctttctagctatttgatgtgagcatttagtgctataaatttccctcttaacactgctttagctgcgtcccagagattctgataaattgtctctttgttctcattagtttcaaagaactgcagaggtggcagctggtcttcctcccagaagctctgtcccagggagagatcagagctctatccattgaatcctgggtggaatggctgaagccccctcagggaggtcccacccagtgaggaggatggatcagggtcccacttaaagaagcagactggccacgatctggcaagggttgccacacactttcaaacaaacaaatctcatgagaactcttatcaggagagcagcaagggggaggtccacacccatgattcagtcccctcccaccaggcccttcctccaacactgaagacagaattcaacatgaggatttgggtggggacagagagccaaaccatatcataaaataacagcataaacaaaatgaatttaaaattaaagaatagctgaatagttcgtaattgcaactacagtcatatgctgcataacaacatttcagtcaacaatgaaccacatatatgacagtggtctcataatattattatactatattattttttacttttatttttgcttcagaggtacatgtggtggtttgtcatatagataaattgcatgtcacaggggtttgttgtacagattatttcatcacccaggtaataagcatagtacccaataagtagtttttttaatcctcaccctcctcttaccctccagcctcacatagaccaccgtgtctgttgtccccttctttgagtccgtgtgttctcaatgtttatctcccacttagaagtgagaaaatgtgatattttgtgttattgtgttagtttgcttaggataatggcctccagctccatccatgtttgctgcaaagaacacaatctcttttttcatggctgcatagaattccacagtgtatatgtaccacattttccttatccagtctaccactgatgggcatttaggctgattccatgtgtttgctattgtgaataatgcttcaataaaacatacatgtgcatgtgtctttagggttgagggatttatattcttcttggtatacccaataattgttattgctgggtcgaatggtaattctggttttcgttgtttgggaaatcaccaaactgctttccacggtggctgaactaatttacactaatatcagcagtgcaataaacgttcccttttctgtgcaaccttgccagcatctgtgattttttgacttcttaataatagccattctcactggtgtcaaatggtatcttattgtggttttgatctgcacttctctaatgattattgatgttcagcattttttcatatgaatgttttctgtatgtatgtctttttctggaaagggttcatgtcctttgcccactttttaatggtgatgtttggtttttgcttgtaaatttaagttccttgtagattccagatattagacccttgtcagatggaaagtttgcaaaatttttctcccattctgcaggttgtctgtttactctgttgatagtttcttttgttgtgtagaagttctttagtttaattaggtcccagttttcaatttttgtttttgtttcaattgtttttggtgtctttgttatgaagtctttgcagtttcaatgtccagagtggcattacctgggttatcttcttaggtttttatagttgttggttttagatttaagtctttaatccacctcgggttaatttttgtatatggtgtaaggaaggggtccaatgaataggcagtccttttcccattgcttgtttttgttgatttcattgaagaacagatggttgtaggtgtgcagccttatttctcgactctctattcttttccattggtttatgtgtctgttttttgtaccatgctgttttggttactatatccttgtagtatagtttgcagtcaggcaatgggatggttccagcttttttctttttgcttaggattaccttggctattctggctcttttagtggctccaactgaatttttaaatagtctttttcttattcagtgaagaatgttattggtagttttttgggaatagcattgaattaaaaagtgctttaggcattatggccattctgtcaatattgattcttccatgagcatagaatatttttccattttttgtgtgttatctctgagttacttgagcaatattttgtaattctcagtttagcagtgtttcacctccttgcttagctgtattcctaggtatcttatttctttttgacaattatgaatgggactgtgttcttcatttggccttagcttaaatgttgttggtgtgtaggaacactagtgatatttatacattgattttggatgctgaaactttgctgaggttgtgtatcagatcaatgagcttttgggcagagactatggccaaagtatagaacctcatcgtctgcaaacagggataatttgacttcctctcttcctatttggattgcctttatttctctttcctgattgctttggctaggatttctagtactatgttcaatgagatttgtaagagagggcccccttgtcttatgccagttttcaagcacaatgcttctggcttttgcacattcagtataatgttggctgtggactttttaaagatggttctaattactttgaaatatgttccttcagtgcctagtttgtcgaggatttttaacatgaaagggtgttgaattttataggatgccttttctatatctactgaaatgatcatgtggtttttgattttttgttctgtttatgtggtgaatcacatttattgacttgtgtatgttgaatcaacctcgcaaccctgggatagaagctccttgatcatggtggattagctttttgatgtgctgctggattgggtttgctggtattctgttgactatttttgcatctatgttcattagggacattggcctgaagttttcttttttggttgttgtgtgtctgccaggttttggtatcaggacaatgcttccctcatagaatgagttaggaaggagccgctcctcaatttttgggagtggtttcataggaatgataccagcttttccttctatatctgttagtattcaggtgtgaatctgtctggtcctgggctttttctggttggtgggctttttgttcctaatttaatttcggaactcattattggtctgttcaatgattccatttcttcctggttcaaacttggaaagttgtaagtttctagcaatttatccattgcttctaggttttctagcttgtgtgcataggggtgttcattatgaatagtctctaagggttttctctatttctgtggggtcaatggtaacatcccctttgtcattttttattgtgtttatttgagtcttctctctttttttctttattattctaggtagtggtctatctttattattaattatttcaaagaaacagctcctagattcattgaccttttctgtgcttttttgcatctcattttccttcagttcagctccgattttggttatttcctgtcttctagctttggggttagtttgctattgtttctcgttccttgtgatgttcgttttgtaattagagatccttctaactttttgatatgggtgtttcgtgccataagcttgcctcttaacgctgctttgtgtgtgtcccagagattctggtatgttacatctttttaaattttcattagtttcaaataatttcttgatttctgccttaattttattgtttacccagaggtcattcaggagcagtttgtttgatttccattttaatgtatggttttgagcaatttgcttaacattgatttctatttttattgcactgtggtccaagagtgttgttggtataattttgtgggttttaaaaaaattttctaaagattgttttatgcccaactctctatatcatatttttattgtacctttcgatatgtttggatacacaaatacttaccattgtgcctacactattcagtatagtcacatgctgtacaggtttgtagctaggagcaataagctgtaccacataggttggccgtatagtagtctgtaccatctaggtttgtgtaagtacactccacggcgttcgtacaaggacaaaattgtctaaggatgaatttctcagaatgtgtcccagttgttaagttatacatgacttgtagtgattcctaataaactggagacagtggtagaaaaaaagtattttattttattgtatgtccttttgtattctttaaatttgctttgatgtacttatgtttctttttttaaatgtgcattttttaaacaagtggaagagaagatggaaagaaagaacttcatttcttgagcatagtttgtttttcccaggcctatcaaaataacacaatcttactgcaagaagaggcacaccctggaataatatcaggatgctggcaaatgctcttccaatttttctcagaatgagaaaatgtaaattttaaagtttaaatctttttaacatatgtaatcttatgagtaagaaggttgagtatagaaaaattcttcaaatttccctgagcgtttagaaaagatagtggttactgctgatatttaccattatagagcacttattttattcagatattatatcatttaattctcaaaaccaggactggctacataatttgtgggcccagtgcaaactgaaaacaagggcttcctgttcaagacctaagaatttcaagacagtggaagcagagcttgaaaacaagcatggaagcctcctgagcaggggccctgggcaactgcataaattaccagcccatgaagctgtccttgcttgtaacacacctgtgaagaaatgtgttactcttactttaaagatgaagaaaataatgcatagatttgagataagaaccaaccagccccaaatgtcacagtgtataaactatggatctggtgtttaataattgtggagactggctccaatgcctctacttataaccactctaagaggaatcagctcccaaatgtaaagacaagtatttctaaactatttcccatttttactagggaaattaacttgcagttaaaatgaatagtattttaaaaagaaatgtattttcttttcatgatatcattttagagtcttaaatagactcataatcaaaatgaagaaaggtgactgggtaaaagtatagttagctagatacaaagattgttgaatataggtcaaactatattctattctagttttgactctgccatattaaacattttagtgaaggcactacgttattcttatcatgcttgaagttttcctcattctaatgcattgagtgacaggagtatgattccatagatcttaatatataaatagaaatgatagatttaaaacaaacagtttggcaaaactttcaaaatttttctttgcttacaaatgcaacattttgcagataatatcttatagaagaactttggaaactaaaggaatacagaaatatacactgtgcaacagaaattttctctactttctctgtcaaaaatcaaccaatgtttatgtctagcattgtttactcaatagtgtaaagcaaacgttttccaatgacattaaaatatttgaaatataatactccatccacattcatataccataatgtacttaaaccatcatctatgacatgaggttgtttccaaaagttactgttagaaagaccctataaacaaggataaatattatatctagccttcagcatcaaattaaatctaaatgttaaaatgctagctgagagaaatctgttttcataacatttaaagagaaaattacttgattactgtatgtttggtgtatgtaattattttgcatactggtatttttcacgtggcattcatcttcacaattatttgtgtgattatcatcgtccctattttgccgtaaggttcctaaatatggagtttctattttactcatttctgaatgtcctatagtgaatatatattcaataaacattagaattttatagaaaccttgtggttcagctgctgaataacttacacagttttagaattctttgattgactatggtgtccaaagccaagaaacattggttttggatgacgaatcaagttatatctacttctagcaaataactggcattatagagtttgaaaatgatatttatcagggtcatgattattagatttcaaatcttagaatatcaggtagaaatgatattcaatttactctgctttcattcagaactcaaaacaagttttaacaagaggaagtcttaatcaggcaggattcctctggttgttaagaacatctttcccaatggggaaagtttgcttgcatgctaagaaaggagctttctgtttcagggagtagtgagctctgtaataatcaggaggtcatgttaaatggccttcgtagtccctctcctgtctatatttcctaatgattctaacacataattaagtgtcaataatagttatagtcaataactataagccataaggaaatttagtacatgactgattgttttttattctgattgtatgaagtaggttttgagagtgattattaatttgttatatgtaatgagttctaccctatatttacagggtgaatgcacagttttcttatttctccatcccgaaggaaatgaagtagtatttttcaattacagtgtagtagtgattattatatagaacaattacagactcatgtcttactactcttttattaaaaatgattcatttttctttcttaaaaggttgagtatatttttaaatgccgcttcacagtatatcatgttgtcatttccctttaccctccatgggcacatgtatccaattttataagtagataccacgaaaatattaatattacagaaattaatttaagagtcaaatttttagtagcacaaatgttctatgagattggatataactgcatgaattagcttggtattttcagaatctctgcattctggtctgtatgtttaaaattaggtattttcttaatctgcaaaatattatcttctagcctccactgtatgcaaagaaagtgtgctcatggttaaaaaaatattcaaataaaaaaataaattatcttgggatcctactaaaaactgcattttctttgcaaagcaagttttctcatggttaaaaaatattcaaattacaaagtaaatgctcttggaatcctactaaaaactacattttctttttgactagaaataaaactaattttatcacgtaatggtcattttgtgttgggtgcaatgtttgagtttatattttaagctttttttagagctatgttgctttctgctttcatcttgacataacttgtcaacagacttataattaaagttgtttgaggttcagtgattcattctaaataatgaatctatggagatcctagagaagataaaacctgtgcttggcaaatgtagaaactgtaattcttagtatccttttagcctaccaaaatggaaatccttcagtccctcacataggtaaagatatgtctttaacaaaaggtagcctttttaagctatgtatgtcaaagcaatttttacttaagacatcatggaaaagattttattccttcactgttcattgccaatttggaagctgaaataagaagatcctgaggcttttcccatttcctcacatgaaaggaatcagtcctcgtgtatgaggcagggagattactacaaacccttcccttacctcttggcaaattcaggaaaattgctaaaatgaatcttgacccagccagatccctgctcctttgcttgtaaccagaggcagtttcaatgcaggcctcttgtgacttccttggaaacagaccttgcatataagttggattgccagaaggataatgattaccatcccaagaggtaacgttacaatcgtcatgagaggagctctgtgagacggagaatatgataaggaatgattgtctcaccattatatgacttgtctatctcgtaatgcccatgtattgaggtgatggcctctcatgtcttggctcacaaaatgtattattccaaagatggatgaactgttgcccccggcccgctgccaaaagtatgaacaggaggtaattgagattctaaaccaagaagtgtctccagtgatgaatatgggaactcaaatatttgaacataatcactaatttaaatcaaacaagagtagtgtgttttttagcatttgaataacattcaacataaagatatatatggactaatacatactttatgttaaccttttattgtaattttaaaagctgtttcacttatttgattaaagagtcgttcattaccaagttgaaataattttatttaaaaatgtataacataaaataatcaatgtgtatgataaccaaaaatgcattctacaaactattaataagcatttaaaatgttctaggcaatggaattggtactgatgtacgttagtaacattcatattaatgtaaacattttaaacagcatgtagaattaactatcagaatgaattatactctacatttttctcctctgcccccaccccttatttcctacagtttgaccaatatattgaaggggcgctaaattgactttcgatgttgagattactttcccttgctatttcagtgaaccaaacttaagtcagataaaacaattttatttggcttcaatatggtgctattttgatctgaaggtcaatctaccaacaagcaagaacagtttctcattattttcctttgccactccaagcagtctttactgaagtctttctagcaatgtctgacctctgtttcaatacttctcacagatttcacaggctgtcaccaccactcagccatcactaacacagacaactgtaatggaaacagtaactacggtgaccacaagggaacagatcctggtaaagcatgctcaagaggaacttccaccaccacctccccaaaagaagaggcagattactgtggattctgaaattaggaaaaggtgagagcatcttaagcttttatctgcaaatgaagtggagaaaactcatttacagcagttttgttggtggtgttttcacttcagcaatatttccagaatcctcgggtacctgtaatgtcagttaatgtagtgagaaaaattatgaagtacattttaaaactttcacaagaaatcactatcgcaacagaaagtaaatgcttaatggaaatggtgttttctggggtgaaagaagaaactatagaaactataggtgataaactactgtggtagcattttaatcctaaaagtttctttctttcttttttttttttcttccttataaagggcctgcttgttgagtccctagttttgcattaaatgtcttttttttccagtaacggaaagtgcattttcatgaagaagtacacctataatagatgggatccatcctggtagtttacgagaacatgatgtctcagtctgcgcatcctaaatcaggagtaattacagaacacatttcctgttctttgatatttataaagtcttatcttgaaggtgttagaatttttaactgatctttttgtgactattcagaattatgcattttagataagttaggtattatgtaaatcagtggatatattaaaatgatggcaataaaattttatgagtgcaaagctggcataaaaattattttaaaaggtacaatttccctttcattccagttattgtaattctaagattaagaaagaacgttaaaatctgccgtatgtttttaagcagcatatgtttagaaactcatggaacacttgacattagaatttgtgtataccagggtagagaagtttgaaaagaacacacatctaaaaataccatgtcagatgttctaagaaaaaaaataaatctagagaagttattcaaatatattatttgggatgtttagtacttctctattaactaatgacttatgacctactttgataattccaaagtaaatcactgggccttttctccctggttgtgtcagcttggctaagcaaatccactagtccaggggtcaccaaactaagacctgctaaccaaatttagcatgctgccagtttggtatggctcatcagccaagaagtgtttttacgttttcaaatggttgaaaataatcaaaagaaaaataatattttatgacatgtcaaaattacataaaattcaaatttcagtgttataaataatgttttagtggaacacagccaaactcatttatttatcacttatgattactttcgcattacaacggcagagtttgaatagttgtaacacaaactgtatagtccacaaagcctaaaatatttattacctatcctatcacagaaaaagtttggcgacccttgctccagtcaaatggctctcaaactctatgaatattagcattctttttgtggcaacaactttcaggaacttccaagcactctactcacgatggtaatagaaaatctaacaaaaattgatggagtgaaaagcataatggcacaaatccgtgaagcttttgatgaatttcttttattattcctagtaagatgtacattaacttgtttgttgtcacattaaacatgtgtttatagacaacgcttagtggacatacagatttatggatactttgcaacattccaacaaccctccaacagttctccaaacagagtaatagggacacctagttgcctaacacttttaatgtcttcaggacttgcctaatacagaaattaacagagcaagctgattcatgtcaatctctgtcttcaaaagcttattattggctcctgtttggagaatggattgtgttggaaaaaaaaaaaaagtgtgttctgacttctttttgttttcaggaaagagtggctagtggtgaaataccttctctccaaaatttgtttgtatcataagttttcggcaatttttgtatgtgcctaaatgagaagtcccattgggcacatacagaaagattcttcaaataaaagctaacataaattgaggatttattatgtgctcagtagtagattcagtgctttattggcatcgcatgtatttttcccagtaacctcccaaaataggtatggctataattactttataaaattatacacagctacagtgtacctcagacaggatttgaactgaggtagctacaaaacctgggctgtatagtaaaatgtctttttcatagatatatgactaaggtaatcctattgatttacctgaagccatcccagttacacctgttgtcccagcataattatatatagcatcaactttcactctcaagtgtgtcctgatttggacggcaaaattatctgaacacgctatatacgacacttgattgataaatttagactgaacgaagatagcaaaaaggcaaacatttaggaacaaattcattaattgataattgtctacagggtggaatcttgttaaagtattgtaatgattaaagaggcatcatgcaaatataaccataagctttatattagctagtgccccgtttttgtatcatctgaagcccactaatatttcactgaatattgaggtcttgaccatctgttgaatagtgttttatttaaatgatgtcctcttccagcttctgtgacacactaccagttgtcacccacgactctttacctgacttgttttattccttctgccttattcctatgggagtatcacacagatccatctctttgcctttctgacttcttttattttgagacagtgtcttgctctgtcacccaggctggagtgcagtggcgggatctcagcttactgcaacctccgcctcctggtttcaagcaattctctgcctcaacctcccgagtagctggaattacaggcaccctccaccacatccggctaattttttttgtattttttagtagagacagggtttcaccatcttggccaggctggtcttgagctcctgacctcgtgatccacccacttcagcctcccaaagtgctgggattacaggcatgagccaccatgcccggccttttgacttctttatctggattatctcctctcattgattcgagcctggctctaagtgactgactcccaaatcatgtagctccagatgtgacactctccctcaaattaaagctttatatctctaaagctatttccgcttgtgcatccagcaactgcctcaatgttcatcaaatgcaaacatttgttccttccaattaaccatacctacttatacattgcacacatattttagttataattcattgcctgtgtgtctagagaagtagcaaatatggaaaaaatcattgcttttggaatcagaattactgaggtttgaatgctgccctttttttttttcccaacttttagtttaggttcaaggggttaacgtgtaggtttgttacatgggtaaattgcgtgttgtggctgtttggtgtacagataattttgtctctcaggtaatcagcataatatctgataggtagttttcccatcctcacctgcctcccaccttccactctcaaataggccccagtgtctattattcccttctttgtgtccatgtgtactcagtgtttatctctcacttataggtaagaacctgtggtatttgtgaaacctgcctgttttaattactagcttatgagcgcaggcaaattacttgttatctgtgcctcagattccagtattctcactttataaaacaactgtcatgaggattaaataagcatttaatacattgcctttaaggtggtaaacattcaataaatgcagtggttcgattcttatttggtggtggagaccatagagatgatgaagatggaggaagattgtggtgggtaggaggagtagaagtgatggtgggagaggtaacgatagtagagatgatgatgatggtggtggaggtagtgatggagatggtagtcatctattatcgacagggaaaaattccataataaacattatctcaaacctaagaaatgtaaaattaccttcctgttttcctcttcaaaacagaatttaccacctgacatctctagttctgtgaatttttcttctactttcttttccttatttattataattagattgtattattgggcaagtgccatcatttccgtcatttcatgttcattcgaattgccaagtccataacctgagccatatacctcactgtggagagaactgccctcctttctaattgatttactaaaatgaatatatctaaaatgatgctttttgatgtctctccagacatgcgaattcccataaatccagatacctccaaaataaaacccaagtgcttcctatggcattcagtattattctcattctccactaattttatgtctaccttcccaataatcattattccacttcagccagtaaattacattacattcgttttgttgtatgccttcatgccactcacataaaatttctcattgcccgtcaaaacaaaggaagcctattattacacttctttatgttttacttagattccattgtagcaaataccgtggatacaataagtaaccaataaatgtttgttgagagagtgaatggtatataattcaaataattgcagtaactaaaatttgacatttcaatatcatttaaaaattctacctagctcttcctggaattgttcttaataataaacgtgaccatcctgatgatctttaataattccaattttacccattagggtatccttatttacccaaaacaattaagggatttaaaattcagctttctaccacatagtttcttaactatctaaggtacatttagtcgattcctaaataattatacagtttctacatatgttgtatttattgcataaatttttctctttacactgagatttgcaaaagtgtctgatgatcttgggtcacaagataattatttctaatagcaaattattcctgcaattcagtgatattattgtacacgtaggtaattatcagagtaaggaactcagcctagggtaaaactagatctattatctagttaattggtatttatccaggagattacttcctaatcatgtagcagttattttaagggatttttaaaaaaagctttaatttatacttttgtagcaaccaggcagaatgaatggcaaattgtttttaagtgaatgccatcttaataaagataatttcccccaagtaaagcgttcataaatgaatatctttgtcctcaaggataatgtagaggcattttgaaatgcctcagttcacctggtctgttttttccctccagggtaagcagacagaatgtaagcttgctttctcggctatttcctgcatcctaactacataggaggataaattgactgatctacatacctgaattattattatatattctacttttcagtttgtttctgttttttgtttgtttgattttctttttatggctgctgtccagatgaagttaaattgtgtcacatctctggaaagaaaatagataacagataagaccgctctgcagttttgtgagactcatgcctaaaacatttttgttttagatattgattataacttcagtttctaaactaaaatctgaaagttgtatggcaaaatataccaagttatttgaaggacctaattagataattaatgtgtccgtgaactttttttttttaatgttctatatgataaattgatcctaaaatatctgggatgttaaactcagtaatgacacttttgcctattggcacagcccatagaaacaaaacattttagatgatttgcttctttttttcctaaggagactagacttatgcatgtttacaggttaattgaggtccagaaaggttaaataacttgctttcagttgcaaaataaggactggtgctgactctcctaaatccattctagtgttatagttgcaatgtcatgttactttttatgtattaaaggaaaatgaccttggtcataaattcaaatttcgctttagacactattttttgttaaaaaaaaaaaaaaaagaaatagaaatcttgcataccatcttcacatcctcaaaaagataaccatctattaaatgttcttgagattatgttgtcttatgcatcaagaataaatcaatagcagtgttttgaagaatatagtaatgtgaattctagagaatgctatgggatcagagaatacttagaacagtaatattcaaactgcagtgcatgaaacagtatcatcacctgggaccttctttgaaatgcagatttggagggcccttcccaaacctgctgaatcagaaacactgctggtgggcccaaaaatattttacaagcactctcggtgatacttatacaccataaaatttgagaaccctcgcactggcatgacaacagtggttctcatgcttcagcatgcgtcggagtcaccagagtttctaattctaataggcgtggagtggtgcccaagaattttaatttctaacaaggtcccacgtgattctgctgctactgatttagggcccacactttggaaatcagttcactggagtgtcttgtcatttacagtctgacccctgattctctttccttatgacagcccccataaaggggctttcacgtatgtccgtgtgaagagaccaccaaacaggctttgtgtgagcaacaaggctgtctatttcacctgggtgcaggcaggctgagtctgaaaagagagtcacggaagggagataggggtggggccgttttataggatttgggtgggtagtggaaaattacagtcaaaggggatttttctcttgtgggcaggggcgggggtcacaaggtgctcagtgggggaggttttgagccaggagaaggaatttcacaaggttaatcgctcggttaaggtggggcaaaaacaaatcacaatggtggaatgtcatcagttaaggcagcaaccgggcattttcacttcttttgtgattcttcagttgcttcaggccatctggacgtaaaggtgcaggtcataggggaaaggatggcttagcttgggctcagaggcctgacaggggccatctattcctgggcaggttaagggatgctactgttgcatcttgtgacaccttactgctttatgatgaaatgatctatccatatgcttgtttcatccactagaattaaagcttccctgggccaggatccatttcttgttcgttacctgtgtgatgtcttctgtgtagtagatgctcaattcaagctgtgaatagaaatgcactatattgagaactggtcctatgagatactatatctttggatgtctggctacagtagctatgtgaaaatgtattcttccagaatgcaaggcgtaaaagaatatcaacacgaaagaagacaggatcacattcccagagctgttacatataattttgttcgttttttgagtgaagaaaatggtactcatacttattcatctaaaaggagaagcatagttgagtgcaaataaaagtcagtttttaatcagaagacctgaactatctgtattcccttacggactcctgattctttcctttaccctctcatactctacatcgagcactgaaactgctctcagcaaggtcgccagagagctccttaattgccagctccaaaggtcactcttcagttcttttccctttttgacctttgtcttgtgcttgacagaaatgattagtcccttcttgaaatttttctctcctgcagtttctgggacattgttctctcctgttttctttcagagtatatcttccctgtcttctattcctgccctttaatgtcagtctacataagactcaaattgtgattttattttcttcttatgatgctttattttttggggaaatatcatttataatctttatcatcacctatatttttgattcacaaattgatatttctacctctccctctctcctgatgttcatccctgtataattcaaatgcttataggctatgtattcctggatttctgactggaatctaaaatatagttttggagtttagatcgtataactctagagagggtcattcacatcatagtctctaagaatggtacatcctgaacttgtgcagtgagcaacctgtgcagccattcacagtggtcttgatatctgccacatcactaaatccctccaaatgtacctgttaaattctctttagtttgttatttttttctacatccttgctgccttcactctagttaaaactgaaatttttctgtatgaaatttttaactgatttctctgcctctgatctcacctctcttatccatgctttttacagcctcccgagggatatcttaaaatgcagttttaattagattattcccctgcccataaatcttgaaatgcatggcgtagaaattcttttgtgatctttagctgcctacctctccagcttcactcccttctcctctgctccttttttaaaaaaaataccagtgctactccaaataatctgcaaactttttagtaccagtccacaattgagataagaagcttgagccagaatataaatcaatgtactccttcctttgtcaagaaagttcggcaattaaaagcaaaataagatcaaatcgtttgttcagtgactcagttgatttatactctggtgaaaactcttttcttcttacagactaatagcaaacagttcactgtctgctaaagtctgaactttgttccgcactgccctatgctttagcttaaattaaccactctttgatctccaaatgctctgtgctttcttaagcttctgtttctttgtacctactgttttctctgcctaagattctctttagatacctttctttttcccattcccatgttacctgccaccgtgctactaaccaccttgtctttctggttatctaaccttgcagaggcagttctcagccatttgtgtgttttttttttttttttttttttttggagacggagtctcactctgttgccagtctggagtgcagtggcgcgatctcagcttactgcatcctctgccccgtgggttcaagcgattgtcctgcctcagcctcccaagtagctggcactacaggcaagggccaccatgcccagctaatttttgtatttttagtagagatggggtttcaccgtgttggctaggatgggcttgatctgttgacctcatgatccgactgctaaggcctcccaaagtactgggattagaggcatgagccacagtgccaggccacttctcagcctttttaacacttctattaaaacacttgccaaattgtatggtaatgactttatttttgcatgcctgtatctccagtaaacgccttgagggaagaaatcatttcttgtcatctgtacacctataatgcataaagcagaagtcagctcatagtaggtattgaataaatatttattggatgttgatgagggattttccaggttttgtgcgagtcttgtcagaaaaacaaaatcactgtgatttaaagagaggaaacgtaatataaggaattggctaagcaggtagtagaaaactgagacgcagcgcaggggatggagaggcaactcaaagcactagtaacgtaaggaagctgctaatatccctagagctggagaaacaatacagaaaaagtgatattaccagagctcagaagctggggctttctaacagagattaaactaaagttaggactgccaggcagaaaattggattgttgaagagggagctagctatccagagaaaacagaagccacagcagagatacatctgctctagaaatgccacccaaggtagttggagaagaaaaaagaccttggcttttctcttcctcccaccttccaatattctgccattgcctccaaatgaacaattaggagggcaagtggtgttgggaaatgtatatccctctaatacagaaagtacagaagaaatgtggggaatagatctgagagcagatgggcatattactgcacagatgggttctggccgtgcatcttctgctcataaactatgtgacttaagccacttaatctccccaagaatctatttcgtcacccctgaaatggaatgtatatggccttccctgtttgccctcacactgtggaaattatattacatgtgtttgtcttgaagaacgtttacatttaaaaaacaatgtctcctttccccaggagaaagttgagtttccaattattaattcagggatggtatcttcccatgaccacatttatatattattcttattctgacatcttctgagagtattcttagtaaagtcttccctggtcagaaacctgtctctttacaaatgaacacatattatgctaccacagagatataaaaatgatgccaggctgggatggcctgaattgtgtcctccctaaattcttatattgaagctctaatctccaatgtgatggaatttggaaatggagactttggaagataatttgatttagatgaggtcatgaagatagggctcttctgaggagattagggcccttataagaagacacaacaaagagcttgctggctctttctccctgccttgggaggacacagcaagaaggaggttgtcttaggctgttcttgcactgttataaagaaatacctgcaactgagtgacttacatgaaaattgatttaactggctcacggttctgcaagctgtagaggaagcatggtggcgtctgcttctggggaggtctcaggaagctttcaatcatgatggaaggcaaaggggaaacagtcacatcacatggaagaatgggacaaggagagtgagacagtgcagggggaggtggcacacatttgtaagtgagttctctcaggagaactcactatcgcaaagacagcactaagccgtgagggatccgctcccatgatccaaacacctgccaccaggccccatttccagcactggagtttacaattcagcataagatttgggaagggacgaatatccaaactataccagaggctgtctacaagccaggaagaaggctgtcaccaggaactgatcctgctggtaccttaattttggaattgtagcctatagaactgcgagaaataagtggctgttggttaagccacccagtctatggtattttgttatgtaagtgctagctgactaaaaaccggctttgttaagcaatgagtattacttctgttttgactaaagttcatagtgatgcttactaacacagtagatggattgaaacaggtcatgatgctggcagtggggcattaagtacacgtcagattgaaatggctttccacattgcactagatccttttggaacccgggttggaagttatttaaacttgaaagacccacaagcatgttgacttctcttaaactcaaggacctttcacactgagagagtttaaagtttaaattgcctcccacagggtccaagtcatcatccaatgcatggtgggtttctttgaacacttctgtagtcattatgagtccacatcatttcaagaaagaagagacagcaacattagttttcatgctaattttcctattcactcaactaatatctaatggattgctatggtatgtaaaacactccagttactttaactgtaaatctaagctttccctcaggaagcttgcacccagcataaactgtcatgaagaagtactaataaaatgttagaaaagttttaaggaagaaaagttcacttcctgcttgagaggcatggaagacttatgggaaaattagcatctgactggataattaaagagtagggaagcattgggctcaagatgaggaaagtgacaattcattgcaggggaaagcctgtatgcgaacaaaacttacatgggattaagtattcttgtttgcctccagcagaagtatgaagtaaaggaagtttagaagtaaggaatgaggttgaaaaggtaggttgagttcataataactaaaggtattcaataaaagattaaggcatgtagacttaaaccttctggtcatggggagccattgcatatttttgagagagagaaatatgatatggctactgtgaaccatatcattttgatctcacttgagagttgggagagagaggccatcttaccttggtttcatagactgggaagggggaaagaaaagttttctctaaagggccagagagtaaatattttaggttttgtgtatcataaaatttattttaaaactactcaactctgctgctatagctagaaagcagccataaacaatgtataaatgaatgagcatgactgagttccagtaaaattttatttaccaaattagatggcagaccatatttgtcccatagaacatactttggggattccggcactaatgggtaaaatgagactattttgctgttgatttttgtttatatgtttcattgtctttgttatagctgtgtttgcagtttttattcttgttattccaattgtggcttttactttatcagtcattaagaagacactaaaacaaatatgactactctcacacgtgagaaagtgagaaatggcatagggcttaaagccagttaaaaaaggatcatggaagatattaataacaatagctaatatgtatatggcttctaccaagtatttgctacatattaatgtatttcacacttaaaatagcattacgaagtaagttttattattgtcactctttgccaatgataacaatgtgtcatagaaatttcaagtgacttgctcatggtcacatagtttacaggaagcatcgcagctaggatttgaacccagacagcctagcttagggtgttgccttcggaaattcctcgccttgctatgttgtaataagttaaaggtgatttcatcaaattatttagctgaaataaaatgcttgactgggactccttaagaatttgccaaagtctatggaagctgcacttattctagattatgtctgttctacattctgaagtatcattgactctagtgtcccatggcaacacttgattatctttaaatacagagacctttttcactgaaaagatttctttaaaatttagatgtctttttcagcatcaaaaataagtggaatttccatataattgaacttttttttccaagtgcaagacttttggagctcaccatggtcttaaccacattatataataagtagtaacttttttcatctatgcttaatattttctctgatgtgagaaattgtatcatcagattagaaagttgaggattttaggaaattaagggaaattccaaggtaataataaattgggaaataaattattttatattgccattagggtacaaagtatacaactaaggatcatattttaatgaaaaatttcagaattaatatcctgatattagagacttcaatcaaattctcatataatccaagatagcgtagtcaaaaccactaaattactgtactgtgtagcaatgaacagtaattctatattgacttatccttattttttttttaagatgggtttctcgtttatttggaacaaaagaaaaatgtagtgttgtagaaatctttggattcagacagacctgttcttgagtcttgactcagtgcttcactgtgtattgaaactaaatgaagatcttcaacttttctattcatgatcaatctgcaaaaataaaagctattacagataacatacaaggtttcttgagcgattaagttttctttttgaaagcctgtgacctgattaagatgcttaaaatgatatatatgtctcttttctgttctttaaatttgaatgaaagtttggcattttaaaaaactttaggtgatttaggagtataattttaagcagatttttagagtacgagtgtccacatatttaactaaacattcaaaaattagttaaaatcaatgaacttgggaaggaaaactacttgctacataatccagaaaattttactaaattatttgaactaagcatgactctccaaactgtggacatattttctcaagggattctatgtattatggcttcaaggtacttttgtgtgtacctcaaaatggctgaaggcattttaacagtgcatctgagagtgtcttacttacatattatttgtacactattttatctatatctttggacattttatatttctgtgtaagtaaaacttccatgaaaatttcatttgtcaccatattttcgttatgcagataagaaaacgaaagaagccaaattgaagacaagctctgaaagggaatgtgcgccctctagtgacccacatttatttatcataaggacataggcagcttttgggtttcatcattttaaataaactttacatttgattttaaaatatatgactcaggattttcaacttgagtatattatattgtatgatcatagatttattactctgacaggatttcatctatcatttaagagaatatttctattaacctgtgttaaggtgattttcttgcacagaagtgtgtttcaaagggactttcaatttattgaaaatgaaaaataggctttaggcatctgtggcttagcagcattttatttcccatcctctgggtcatgcagtttttgcccacgtgttttcacactccttggctttataactaattcctctaatgtagcagtatctgacattttagaatttgtgggggtttcttaccttttaatttttaaggttgtttctctcaaagatatttaaacaaaacttataaatgtgacatctgttcaatcatgtcacactttagaaataaatattaccaatgaattttgaaatgattaagatttaataccaaattaaggtaggaagattattttaacatcatttctacctaccagacgtcaaaatattttaggtaagttttactttgtgcagagaagcaatattttacagcagttttattctcttcactgcaatcaacgattctatgggtgccaagatgaatatcaataccaaataactcagacatttttggcattaatagcttaaaacattaaatcattcaatttgtatgcaagggcatgtattttaaaaagcagaatttttaaacatactaagtatataattcggtatgccataattgataataaagaagatgtacaattttaaggacaatattttgtgcttggactagaattcagcttttgaggcacatgttaaataggcatattttaggacaaggtaaacgccacagaaattgattttttagtatcttttaaagatgcctttcagtgcaatctgaaatcattaaattttactgtactgaaacatattattttatgagtgatgtgcttaaaattacacatataaaactagaaatacatttgagaccatgcaaatataaggaaaaatagatttttgataggaatgttaatatagcagtttccactaactgaagacagagtcctctgtcatctgtcacattgttccaggtgctgtgtaaaccactgaagagtttataggctttttattataactgggaattataacatctttagattttatttaatttgattgctagatgaatagactaatgtaattggaatatgaaagccacaatataagcaaagctgatctcagtttttgtatcttgggtcaaaacctctttaattagagaggtaagtaaacatatttacaagtaatttttaaaaagcatttgtattgtagacccagaaaatctgagacaggtctcagttaatttagaaagttgattttgcctaatcctaggtactcgggaggctgaggcacgagaattgcttgtccccaggaggcgggggttgcagtgagattgtgccactgcactccagcctgggtgatagaatgagactttgtctcaaaaaaaaaaaaaaaaaaaaaaaaaaaaaaaaaaaaagttgatttttgccaaggtggaattcgcgcgcctgtgacacagcctcaggaagtcctgacgacatgtgcccaaggtggttggggtgcagcttggttttacacattttagggaggcatgagacatcaatcaagtacatttaagaaatacattggtttgacctggcgcggtggctcacacctgtaatcccagcactttgggaggctgagtcgggcggatcacaaggtcaggagatcgagaccatcctggctgaaacagtgaaaccccgtctctatgaaaaatagggaaaaaaaattagccagacgtggcggcaggcgcctgtagtcccagctactcgggaggctgaggcaggagaatggtgtgaacctgggaggcggaggttgcagtgagccaagattgtgtcactgcactccagcttgggcaacagagcgagactccgtctgaaaaaaataaaattaaaaaaaaaaaaaaaaaaaagaaatacattggtttggtccagaaaggcaggacaactgggtgggggtgggggcttccaggctgtaggtaaatttaaacattttctggttgacaattggttgagtttgtctaaagacctgggatcaatagaaaggaatgtttgggttgagataagacattgtggataccaaagttttatcatgtagatgaagcttttagctagcaggcttcagagagaagaggctgtagagtgcttcttatcagacttaaagtctgtgttgatgtaagtgtcagagaggtataatgaggcatgtctgacccccacttcccttcttggcctgaaccagtctttcaggttaaattttaagagccctggctgaggaggaagtccctttggagggggagttagccttttatttttggtttacagtatgtttttacttcaggaccagtttgataacagcttttaaatttttacaatttaaagcaagaagtcgctgaagatcgaagaaattaatttacccaagaaaataccagaaagataaaaattagggattaaaacctgtggtgcctgatttacacacacatatatagctatgttatttttttttcttttttgagactgagtctcgttctgttgcccaggctggaatgtagtggcacaatcttggctcactgcaacttctgcctccctggttcaagcaattctcctgcctcagcctcccgagtagctgggattacaggtgcccaccaccacagctggctaatttttgtatttttagtagagacggggtttcgtcatggtggccaggttggtcctgaactcctgacctcaagtgaactgcccgcctcggcctctcaaagtgctggaattacaggcatgagccgccacgcctggccctcagctcagtatatttttaaatgcacatttactttacatttaaagcaacttaaacatacacacaaacacacacgtatcacacatattacaaaatacaagacaatcatgtggccctatcttccccccttccacagagggagacacacttacactatacaaacgtgtatgtgttgtgtgtgtgtatacaaactatcttgatttggagagggaactatttatctaaatattagcttgttttcttttggttaaataggatttcccctttaataatattctgtaattccaaaaatataataattgccatgtagtcaatgcatctcaaagtcctaaaaatatttttagaactaataggatttatactgaatttcatttgatatttttataagatctatttgatgcaaattgaatttgtattctattactcgatttttttttaaagcaaatgccatgtggaaacaagcagagagggacaagttttcccagaaggaaagttgaaaggggaagagtagagagaggttgatcaagaaaaccttcacagatgatgtgcatcttgaactgagccttggaagatgaatagtaggtcatcttcaaatggttggggatttagggtcaggaaagtgcctgtatagtaatatggaattaaaatgtcttctcacttcggaaaactctgaagaagaaaggtgatttttaaaaatacagcaaagttggaaaatcttacctccaaaattatttcttctttaataccaacaaagaataattatagttttgttcctattaatgttaaaacttgcttcctagctaattaaaatgttcattaagaattggtttcataaattatctggtctaggcctagagccctgggaccctgcaatggttaacgtatttcacaggcatcagcattttcctttcaggtttctaaggatgaggcttataagtttttatgaaattctacatgctaagatgtttaaatatgtaaaatggccattcataaacctagttcactaatcaaattagttaagtctgggagcttggaggacttccactctcaaagtttacacatttgggaatgatgagttgcaacttgtatattgaaagtgactgaattaaaatttatgtaaatgtgtcatcttagtttaataggttatgtggcagtcactgtaaagaaaattaacagaacacagtgcccatcaggaggctcttctgacataattagcacagttatatagcactaattcatgtaatgttttactattgacaattcaaaattgacaacttcttaaatggcaaacatttctctagttctttgagatgtttgtatgtgtttttgcctttgaatttattttaaacatttatatacacaggtatctctcagtatttaccatatgggatgtaattaacctaatttacatcatttttatgggaaattcaactggatgaggctgagtctgtttgtacaatataatactgagaaaaattgtcactctctgaatatttggtatatatgccccaggcttttgatattttgaaacttccaaaaaatggaaggtctttttgaaaaattgtcttggtgtagtaatacacttttgccaagaaaaaaaaaaatcaaagacttacttgccctgtatgatgggactttacaagttttaatttcaggggtttctgatgagtatatttgtaaaggagaaaaaaattgtcgcttcactgctaaccataaataataacaaattgaggttttaagatatacttgaagaatagaggacagaatattcatcaataattatagaaataatcattttgtgaacagagaatgagaagttatttttttattagctaaaggagattttaagctaggtaaagttagactgcatttaagggatagagtctgataacattcggaagtacgttaagtacagagttaagtatatgaggaaagtaagttaagcactaaggaatatattagtggactgattccaaaggtgtagggacacattatgagcaacttatgatacataagttcattagcaatggttttatgtgagttgttaaagtggggaaaaaagaattattagaaacgagtaattttatgaagaagcaaaaatacatgtacagaatccaacgttgaatatggcattgaaaataagtcttcagtgttttccttgagggttttaaagaaggtaactgagttgcatctgaatgatatatttcgttcgtaattaaatacccaggctcacttagtgcaaagtatgatagaaaatgccatctgcaaagcactgggaagagtagatagcacccaatttaaagcatgaagacatttaaatcagaggtgtctgttcatttgccatgcatctcagcaaagatatctgaggaatatctagtagcagtgaaatacatgaaaactacacgacaaaccacaaaaagtgatgaagcgatagttgctaaattgataaggaataaaataaacgtgcaattgcttcttggaagccagggtctgagtaggatccgggaaggagactgagttcattgtgcattgaaaatgtcactgaacctaaaactaagcgttggatgtaggccattggcactcagggagagtacatgggaggccttgaaaccctgcctctgcttcctcttcacccttccatcctcattgctggcataaagagatgaggctatccactggcagaatattggagagaaaacaatgctagtagctgacagttaactcccagaactctaagagatggtggtacatgttaagtattagagtgtaggctgactgcacattatgtgtggacaaaaagagttttagcaaggaaatcagagatgtttgaaggaagaagtccaaatggaagcaacataaaataaatattaagattaggttaggaatagctcagagcttgaattgtgtaagaattgggttcagtgtccacctgtttcccatgaaatcaagatatcacaataatgatagaaatgaaagggaagaactccaacaggtgagaagagtccaaactcattaatatgtttctttgttccattttagaaaagaagtataacattaacctctgtgcttatgaataggttattttccttagacaaaacgctctcctcaccactgccctagtaaaatttgaaattgcctttttaaaaatctgtacatcaaaaaacgagcgtaatcactctccatacgatctttgtataaaagggaagttcacgcactgtatgtgacccctttccaaatttataaagtcagacaaaaaattgaatgaggaaagacctttctgtagaatttcacatcctgttgtttgaattgatttgaattatcagaactacgtgccaactggtgtccaggcctcccttaaaatcttcacagacagagaagcaaacagacagttaccatggtgttgactccacaaagccttctttgtgtggagataaccaatatacttggcagagcctctaggctagaagctgatttaatcctaatttacagagaaggtgttttttgattatcctcttaaaaagaccagtgtgagctgagccccagttctgtgtctaaaccatttttatcttgtcaaacaaatgcttcactaaaccaaattacttgataatgtggactaatgcattctcgtctctgttctttatggagttaatagcatgtctggcacatagtaagcacttagtatatgctttatgaaggggaaaaaaaggagacatttgaccgttttaaaaggaaacatacaattttgcctttttcaggaaaatacacctctaaaagtgttacaagatttcttctggggccgggcgcggtggctcacgcctgtaatcccagcactttgggaggccgaggcgggcggatctagaggtcaggagatcgagaccatcctggctaacacggtgaaaccacatctctactaaaaatacaaaaaaaattagccgggcgtggtggcgggcgcctgtggtcccagctactcgggaggctgaggcaggagaatggcgtgaacctgggaggcggagcttgcagtgagccgagatcgcgccactgcactccaggctgggtgacagagcaagactccgtctcaaaaaaaaaaaaaaaaaagatttcttttggaatgaaaattatttactttcaaactaaaaacaaacaactttgtttcttttttctgcagtgaattggaggtggtggtataacagttacatcaacatgcatgttataggagcagaaaggctgtgatccctttccttcctccttatacaggtcatagcagacattcctataacaaaagataggttaacaagagaaaagcatgagatatttatctaataaaagttttaggtgacatgggagccttcaaaaatgaagacccaatgacccaaaggaaaactgtttttatgcttagagttgataaagagtagacagccatgtaggaatgtgattggacaaaaagggaatgatctgatagtaatagactagggacaaccagccaggcctgtctgtgtagaattccttcctcctacacatggggtaggaccccacttgaatgagggtcttatgatctactatcaaacaaaagtatgtcagagaattttttatggctagctaatagagagaaaggtgggcaaaatacagagttataattctggcttttatggttggctttggaggagagggtttttggtttctatgacctaccttgaagaagaagaattctggttactatgactcacttcagggaagaatgtggagttaaagacaggaggggaggagaaggtcagagggaccttggttttgaggctgcttttgaggccttccagtgttctttagttcaaagtttcagcatgccaaagtgccatactttggggtatcgttttctgagcccctacagtgtgcaaacaagagcaatgtcaattcaacgcctagtagaaatctttctccaacataggcttcagcagatttctttcagctgtcatgccagcctagtaccttgaggcacgtttgagtttcagggacctctaagtagaagtgagcaatctttcttagagatagtctaaatcaaatgagggtgagactagagagattaagtttaaagcgtgaatttgaaagtgactggtggatattcctatctcatatttatgagtcagagggtatttgatgtataattgagtcagacaaataaatttcaccaaagtggcccaaatgcattatattaacaacccagttttcaaaatatttatggaagagtcagtgaaggattttattccattggaggaggaacaagaataaagaatagctctgaattactttagaaaatatgaagcgaaatttgtttctacaagtacttgaataaaagacaaagtagaatatacagttaagaggtctatgaaggccagattataaaggatcatgttgaaattttgttctttattctaagaaaaatgagaaagtctttgagtggttttacgaatgaaggtaacataatcagatatgtttttactaccgtatatttcaaagtagctagaagagaataatttgaatgtatctagcatagacaaatatttaagattatggatatcccaagtacactgatgcgatctttacaaattatacggatatgttaaattatcacatgtacccccaatctaagtacatctattatgcgtcaattaaaaaagatagaaatgataatttttccagtagtacataaaagagagagttccataaatactgcccagaggccaagtgaaaagctattgcggtatttttggtcacatttaatggcaacacagatttgggttctggctatggagacaggaagaagcatacatattcaggagacagagaatgtatgtgtgacagattagactttgcaatacattaaacatgggaaggaagagagagggttttagttggtttgctgtaacaaaataccataaactgggtagcttataaaccacagaaatttatgtctcccatttctggagtttgggaagtttaatatcaagtaactagcagatttagtgtcttttaagggcaggcttcctggttcatacttggtgctctctcactgtgccctcacacggtggaaaagaacactgatctcttcagatcattttaaggggactcatttcatgagggctctaccctcttgacctaattacctcccaaatgccccatcttttaatatcatcacattgggaattaggcttcaacatacgaacttttgtggggcacaaaattcagtccatagcggagatgaagataacaaatatgagggatggtgatgctaattactgatctggggaatactgatagagtactagtttgagggagaagatcaaactttaaaccttggcatataatgtttaaggagattttgcagcatgcaagtggagacatccaataggcagatggttatatagctgtggaattcagaacaagtgcctgaattagagatatacatatcagaatcattgataaatagattgcaattcaaggcatgatgactgatgtgttttctggtgagagatagtagagtagaagatgattggtaatgaactaggtcttgacatctagtacataatgatagggtggaggaggatggacctgcaaagaaaaaattaccaatggtcatagaaatagaaggcaaattagaatagagtggcatcatgaagccaaaggaagaaaaattacaaacggatagtatggtcaacagtgttaactgtagtcctagctacttgggaggctgaggcaggggaattccttgaacccgggaggcagaggttgtggtgagaccagattgcaccactgcactccagcctggtgacagagtgagactccgtctcaaaataaacaaatactagaaattggatggactcagatgcttgagcaaaagtaagagaataaagttcaaaatgtaggtagtgggaatgactttaattaaaagaagggaaactcaaatgtaaaagaagggaatgagaacggtggctacatatgcgggtctgatggtgtttggaaataggaagtgaaagaagttctactctgataattgcacttgtttctgtaaggtagggaacaagatcatctgagagagctgcagaaagaggatgggccagagctttgataaaaggttttaatagttcctgtagagacttagagcccaacttgggaaaaaaaaaaaaaaaaaaaagtatggcaggatgctaggttcatttgaggctgttgattattgccttagtttgggttgccccaagagtagatctgaagagaaggatttaggtgcaagcagtttatttggaaagtgatcccaggaaacaaagtagggaagtgaaataagaaaaataaagcagccaataaagtatggcacaaatatagggatcaggttactgctggaaggaactggggctcaatcatgcagggaaccccttgagacactgtgtatcatacttcaggattgtccaactgaggggcaagggagctgggaaattcaccaattccaagctctcactggttaagggacacccctaaagtattaacattccagcactccttctctgtccaatatactggcaaatagatgcttgcagatagagagacacaggaaattttatgttgggccaaagcaaaaataaaaatgttttaagacattatgatgataaatatgcataaaagatgattgaaatataattcactggtttgggtaggtaatcaaataaccatagtaggagagtatttaaggagttaacatcgctgaagagagtgtgaaagatttttacagcatataattgtactgtatattttaatcaacattatgaatgaagaaacaggaacctgatagtcaaacttgtggataaaaaatgtaggaaagataaaaatcatatatgacacaataaaaatccataaacatttgtaatgcatacacagataacttactgacattcagtgacatgggatttagaggaatcaggatccctagtctcttaatttcaagttggatagcctcgataaataacaactcaatctgtatgctatgaaccgtcaagtttctgacccatggtattgaggtcaattaacttaatttctctgaagctccatctcatcctatgggcagctggaattggtgatacctaaccaaagaattttgtgagaatataaaatgcgaatatgtttttctaagggctttgtgttccattaatttctgtatctgtttaatttttaaacaatagcctgcaacaaatgtgagaaattctaactggtttatatgattcaaagtcccaaaactggagttcaatagatcaggtcatatgtttgtgatagtaattaggttgtgatataactggtttaatgatagtttatgtgaaaaaattcctagaagttttaagtcaattgaattgcaatgtgagttgaaagtctaatattgaagtgaaaatatttattgaaatcatgggctatatcaatgaaagtattataaaccagaaagataattattcttccctgtttattttacacactgctgatatgttccctttaagtacccaatttaaggaaactaagataacaacaagccatagaatatccgttgaagtaattaagcatagggtaggctgatgatcaggtatctactgataaatttaaagagcggatttcaaatatttataattttgtatccttttgccaatatctttccaactactctccacccccaccagctcctggaaatgaacattgtcttctgtttcttttagtttgatttttttttttttttttttttagattccacttgtaagtgagatcatgtggtatttgtctttctacacctggcttatttcacttaacataatttcctccgggttcatacatgttgttgcaaatgaaaggctattcatagtcttaaaggcttaatactattccattagacacttgggttgattccatattttggctcttctatacctaaatcaccagattagaatgaataatttatccctggtggctccaaagatctcttccaaaaaaaaaaaaaaaaaaaaaaaaaaaggtttgaaaataacaggataggtgatctgatatttatggcagcataacaactcacaccaaaatgtagtggcttaaaacagcacctatttattatttctcctaattcttcaacgtaggcagtgccctttgggtatttcttttctctatgtggcatcaactggagcactcatttgtctgtcttcagctggcattgagatgggtcacagagggctttatttgcatgcctggtgccccatgcttcttcatgtggcctcttcacatggacagatcaagtttccttaaaacatgatcacctcaaggtcattgtacttcttatataattgttgtcttctcagaatgtgtgctctaaaaagtcaagctctgacatgcaagcacttctcaaaaccttacttgcagtactcttactattgtcccatttgtgatagaaagtcacgtggccaaacccagaggcagtatgattggagactacagaaaagcatgtgtttcaatggtgaccaccaacaggaattttttttttctcataaatactttccaaaaagaaaaggttatcgtgggaagtagtactttttcaaatagtggaaacattcaagcagaggctgggtaatagcttacaggatatattgtagaagtgatttttacattgaggtgaataaaatgacctctgtgatcataagactctagatcaaagctgactccaaatttgagtctacctaacagggaaaatagtgctgctattaatactaatagaggtgtcaggcaggagtctcagattgagaaaagaatgataaatgtggataaattgctttttttaatatagaagaaagagataatcaagaaataatgacttttattttttgctgtcttaggttggatgttgatataactgaacttcacagctggattactcgctcagaagctgtgttgcagagtcctgaatttgcaatctttcggaaggaaggcaacttctcagacttaaaagaaaaagtcaatgtaggttatgcattaatttttatatctgtactcattttgtgctgcttgtaaactccgtgctttgttatctgtgattctactagttgatagattaatgcgatatgataaaatgctgtttaatatgtcttaaaaatatattttagatagcaagcaaaatcaaagtttagcctagagaaatctttctggattcttctgtgactgactagggatgcctttcataaacttgccttaacttacatattatttaactataaattaacaattttatgacattaattcatgttgattcctttcatatattgttcagttacctcaaggctaggccttagcaagcttgcacaattgtgtagagtagaatagagtaaaatagaatagaataatataatagataccatacttaggactatgtctatattctcactgttatcaaaaagttattctttatagtcatcaatccctgtcatatattataagatatttaaatttcccagatatttgtgtattaccttatctaaaaggtgtccagcctttctcagtatttacatgtggtagcagatgctttgttgttgttattcccttctgagatggtataattttgaccttcacaaataggaagttttattaatttaatataaagtgtttcatctttagggaaattgtcaaggctttaatttttcaacttcaacaattataaaacatgcatctttgtatatgattggcaacagtttgtaaaataatttctaacaggcagagtaaataaaatgggcaagctaaggaagcagtgattatgaatgaaaagtaattttatccatgggaagatcacatctaaatgtgtatattagctctgctttttctctccaggattcaaatcatgaagttcaaaatccattgtatttttacaaatacgacattacctcagttacaagctaatgtttgctgttggggttggaacttttggagatcaacaaaagatatatatatattctggaaaaaaaatctattttttaggctgcttgaaaaagggaagacaattttgtcaccagttcttcttagagttaactacttataaattggaaagctattttaaattacttattagctttataagacatgctgttgtcagcattataatagactattctaaattgtttcaagaaatgggaaatatgaaaactgaaagataatatataattgtagaaaattagctaaatgtcttttttcaagtatacttctttgaaggtaaattgtttgctgtgatttttgagggaaattctcttagtagtagaaaattaattagagaacattaaactctaattttcaaacatcatgttacatatttgaccactgaaagtatgaatcacctttagcattttattagctaattaaaaatgattattgatctgattctcacaggtttctgtctgatactctgtttctttatcttaagacagctttgatcaggcaggaaaattgagtttcagtatttcaggaatataaattttaaaagttcctgttatcatgtggttacctatgaacgatttgcattttatcaatagcgggagcatgacagactaaaagtgctcaaaaatgtacagtgttttataactggttttctgataccttgtgagtcccctttatcaacctgaactctcattttctgaaataacaacatcattcttaattgcctactaaaatgggacatgaaatgatttaccttgatgtttccctcaggctaaatacaatgtatatgtattaaaaatccttgagagaaatacataattacgatgatggatattcagtttaggtatccattaattttcttactacatcacctgtcggtttatataggttattttaaactcatggcaggctcgtgtcatgaacttgagtggtattaatccatttttaggctttcattaaaaatggctaaatattaccaactcttttttttttcacttgatttcttcatttactcctttcaaatgcttttagccagttagcatatcataggccattatcagttcaatttcacatattttaaaaaatgcaacttttaaacctaagcataattttttccttgtatattcaccatgtgttttattcatataattaacaaaatgcacttatttaaaagctgacttctgggggacctttctaatcaaaatgtccctggaccaccaatattgacattatctgggagcttgtcagaaatatagaatctcagaactagtaaatcaaaatttgcctttgaacattttccaggagtgattcctatgcacataaaggctcgagaatcaatattctaggacacaatcttgggctttacgtagcagttacctctcacattcttttagtatcactgcagttcagactttttagctgaattaacagattctaacaactcgaattttttccgtgagcacatggtaacgcaaattggtaatgaaacaaacaaaaaaaatagcctcctttgatcacaaggggatttgataaggtgtctgaaaatctggagcttctgtgaggttctcttgaaaccctccctatcaagtcgttatggtcatctggctttgggctcttcctcggatctgcacttgattaccctctttcagaatcaactttttaccaactcccgctggaaatcatcaagccagttaatgcttccaatttctcctatctctgttatctgtgtttactacccagagtataggtacctcgagtctatattttcttctatctttctctctctgctctattgcactttcttttccttgcttcacttcctctgctttcccacactctcactcggcaggctcaaacactttttcaagacaagccttctatatacttattctactcatacgtggaaaccaattttaccctcgaaaacagcactatgactcatccctcttttgtacccccactactttagaatgactgactccctcacctaacagagacaattccaaagatactgctctcttcatgtaaaaatacctctttccttgcagttaatgacttctggccatctcttatctaccattttatcatattttctcattgaagactttggcactaggttagtagattttttcaaccaatttgttctttcattcttagttatttcagcatccctgtgggctctcctgctatcactaaaagctgttgtttctctcatctcctcaattcagctacctgctgtcatgattgtatgtatgtagatgttgtcattgtcaggcattactccatttctttaataagattatttttttgagacggagtctcgctctgtcccaggcgggagtgcagtggcgcgatctcggctcactgcaagctctgcctcccgggttcacgccgttctcctgcctcagcctcctgagtagctgggactacaggcgcccgccaccacacccggctaagtttttgtatttttagtagagacggggtttcaccgtgttagccaggatggtctcgatctcctgacctcgtgatccgcccgcctcggcctcccaaagtgctgggattacaggcgtgagccaccgcgcccggcactaacaacatattttaacaaaaccagcagttcttcataagctttccgtgcatcctaagtatattttcaacttagtttctctcaacaattatttcaagcttttgtggggtacctaaactttccccatcattcacagtaaatgatttcatctcctactttagtcgaaataatatttctcaaattgtgggtatttgtgctcatagtatcttttttttttttttttttccacctgccttagtggaagaggctatccttcacctggttgaggctcatctctgggtgtgtgttctcagcagcatcactgactatgtattaagccacctggttccattcagctgtatatccagattgtcaaaaatctacatcccaggtctttatcattagcttttaaaccggttgtgttttcatcttttagaacgtgtcctctcctataaacatgcatgtgaatacttaacgtgccttatcttactcaatccctctgtagaactagaacctattaacctcttttccctcatgaaattctttcctcgcttggcttatgggatactgctttctcctgattaattctttcacattcttggccatttgttccaattcagtttttctttaatattgatattcttcagagtccttgtgtttcttctctggatatcctcattcattcccattcaaatagtgtctattttcaaatgaacccttctcccatatgtatctttagctcatctctttcttaaaacccagggtgatatatctgactgcctaatagacaattttaattgatgtttgcctgatatcttaaatctcattatttccccagacctcctttattctttctccttcctttcaccctgcaaacagcctaatccagaaacctgaaagtgaactgggtcacctagatttttcttctaccattcacaagtccaatctttgacaggttcaattaatcctgctcccttaacagctcttgaaaatgtccagttctctctattcccatcaccaaaaccctgattaaagctaatatcatggcttacttctatttaagatgacaatcctgtagctggtcttccctgctactaatgttatattcctttagaagtttccacatcacctctgccaaagcgaacatattaaaacctcagtatgatcttgttatgtctgtgtttataatcatttgagaaagataaaatcagctactgatagccaggagctggcttggcacttcagttaggctttggaactgctagatgttgccttggtacttgcagccagtctgatgttctctggttgaatataaataattgctagggatgccagcatcatacagggacacgctatggttgtgatgaatcaagataaaagcaagaccactttgtaatcatatcttaatacagtaaaaaagaatagcattgtccaaaccacgcctaatgaccaaatatccctcatcttcattaatgtgacacattatgcttctttactaaacacagctttagcctctctgcattcctcctgccatctagataaaaattttaggacactcaacatagaattaccctacttccttacaacatccaatcaaaacaaagccccacttccttgatgccccctatcatgtaacacaagcccacatcttaaaataagctttttctaacatactcttagagacagccccatagttccctgtgatgcgctgtctctctcgttgcagcgtgtaaatcaggttaactttgataacctacaaatatgttccagtggtctttgtctgaagagtgttgacaaagtccatgtcttcatattgccctcttaaagcctacaatgatctaatttttgtttacttgcacaaactaatttctagccattttcatttcaattccattgttggtttctagaaatcaggacttgaacgtgaagtggctttggttttatgtgtgtgtgttttgtttttggtgtccccatgcctaacacacaaaccaataaatgtttaactatatggatatgtgatttttttcagttctgcagttgcatttaagataggatctattaccaatatgaaggatagaacaacttctgaataaacatttgagtgaataagttactcttcagtcaaagggtaaaacttcattatagaatgttaaatgagtagattcttaattacttctaatgtcggagtaggactgatagagatccataacttattttcataatgttagagaagatacagaaagaggaggcttttaagaggtgctaataaagaaggaggaacagaggtctgaaagaggttttaatcaacttattgaggaatttgtgaacttccctgtgttgtattctttgcttcaaattattttacttttcttccttttattgaatattatataacttagttgccttttattttgcatttaggttacccattttagtatttataattcttcatgatctctaagaattttcatgagcccacaataatcactcatttctgatacattgatttactgatgccttttttagcttctgtatactttacttgaaattatgtgtactaaataatttagaatccgagtagtggcttctaaacatgtgatcatatattaagcatatattgagtaaagtatttagtattctatatgttaatagcataatttaaaaactgtatgttatgaaatatagatcctttcaagattaaaaatgtatatgcatgtagacacatatatgataaacagctctatagaaaaacacacatacagaaaagctggatgacttcatgaggacgaaatttaagagaaagataatattgtcaagggcagaggtatttttatgaacatggcaatttcgaggaggtaattgtagtttttatcagtactgaatgttgtaagaagcatttttcctaacaagaagaaaattaatgactttcttttctttttttttttttttttttttttcccgagacggagcctcgctctgtcacccaggctggagtgcagtggcgcaatcttggctcactgcaacttctgtctcccgggttcaagcgattctcctgcctcagcctcccgagtagctgggactacaggcacgtgccaccacgtccagctaattttttgtatttttagtagagacggggtttcaactgttggccaggatggtctccatctcctgaccttgtgatccacctgccttggcctcccaaagtgctgggattacaggcgtgagcccctgcgcccggccaaattaatgactttcacaaaataactttttgtacagtagtgaaggctgaagtctgactgtaggtatttggagtaatattgaaatactggaatttggactaatatggtaatattagtccaaatttcattgaagatgaaatatataaaagaaaatgaagactgtggttgaagagtattcagatgatacccttggtcttgaaaacatgggaaaggggtatatatacagtatgtatgtgtatgtacatatatgtacatacacacacatagagagaggaggtggaagatcagagccatgaaataaaaacagagaggtaagattctaccaagttttgactcatggattgtatatggtactctttcttttctacttaggtattggtttattaccagtatcaggacttgagctgaagaaaagatggatgtgcccaactccctaactaatatgcagtttctagaatactttgatttaatccatccttcctttactgagcttgcagcacctgtccccatgtactggttttatggccactttatataaagctattagagttcgttatgaatttgcactttaagagagcattgtgggtaaggggagagaccataatattgtatatggacgcgttacgctaaaatagagctcgccttattatgtacctataatgtaccagccactttcatggagacttgggatagagtagagaaggatatagataaggatacctgaccttatatagtttacattctagtgggaaagatggaaatgaagcaagactaatatgtaaagcatgtggaatgttagtgataagttccaaggagcagaataaaatgagagggtatgcatgtgcttgtagacagagtggcactaaaaggcctagctgaaaaagtggcatttgatgggggaaaatgtccaagtaagtaatttagggcctttttaggcatggggaaaaataaatgcacagccgtgtaacagcagcatgcctgtagcatcagggaaaaggtaagcgtgtggctgcagcagaaaaatcacgatgtttagcagcagaagaattcagaaaggttaaggaagttaattaagatcagaccatggtaaggacttgagcttttattcagctgtcagcgagttgagctgaatcctgttgtctctgtctgctgtgttgataatatataatcagagaacaaagggtgaaatataaagacctttagtatcctattttgaaacattcatacccctcagagatgatggggtactttgtctaatgtggtagtagtgagcaccatgataactcactttctggctatgttttgaggttagagccaacaggactttgtgatggattgaatgtgaggcttgagagagagaggggagtggaggattctgtttttggcctaaacaaaggaaaacacagattgaggcctaggacactccaaagtgcgagctcagggacatgattaggaacctgcaaaggagatggaggaaaggtgacctctgaagttggaggaaaactgtgttcaagtagtacgtgaagccaaattagcaaatacttctaagaagaaaaaggaatcctctcaatcaaatcatggtgataggtaaagtgagaactgaacatcagtcattgaatgcagtagcttgggggccaatggtgagactgataagagcagttttgatgggactgagtaagagaatagatgtgagagccagtttttgtttttgttttgaaccagtttttactttgcaagatagacctgtggaaggcctatgttcctctttgttgatacacagtcacttaaaatgaggacagttatcttcctttttcagcaaaatatatctctttagactttgtttttggtttttgtgcttttctgtgctttttaatgtatatttctgtgagttaatgggagacggtagaaattttaggaactactgatccaacctacctgaaaacagaagttcatatatttcatttgaggacgaacgtatgggtggccagatcccaggagaaatggcgattttcagtgatgtttatttacttaacctttttttttttttttttttaacactttttatatgtggttatttggacatttccacgaacaaggtactctcatcatctcttgtgtcaaaaatgtttccgtggccaggcacggtggctcacgcctgtaatctcagcactttgggaggtcgaggcgggtggatcatgaagtcaggagatcaagaccatcatggttgacaccatgaagcctcgtctctactaaaaatacaaaaaattagccgggcatggttgcgggcgcctgtagtcccagctactcaggaggctgaggaaggagaatggcgtgaacccgggaggcggagcttgcagtgagccaagattgcgccactgcactccagcctgggcgacagagcgagactccgtctcaaaaagaaaaaaaaaaaaagtttcctaaatttctttttaagattattgaagttacctttaagtagaatgagcacatatttcagtttgtcgggtatagtcttagcttatgtcaaaccatttttctcagcttaattattcctagctccccattttactataaaaactatctcattttgggaaataaatagcgagcttcctttaatcccctcagaagtcccacatggtaggtatctttattgctattttacataggaaatactgaggttcagaaaggtcgaagtactttattagggacagatagtaagcagtagagacagaactgataacagcagagcaaaaagggtgactgcaggcccttttgttgtagtatcttctttaacatctctttgttatactaaattttattatttttaatcaactatctacagctgtgtctgaaatgaaatgttttctgggctcttcactgtctcattcacactcttcaaggcatacttgtatgcatattcctcttcattttgcaatgttcctcttgaaagtaatgtgccctaacagaacccagatatcgtctgaacattgacaaatatgcagataccattgactgcttctttctggggtctatgtgtctctttatgcaccagttattcagtttatttgagctgtatacagagttggtaatcagcctatagactgtcagagaccattctgagtgacccggcattccttgtgatatcttgttggccctgctgaattaatagttaaatatgttgaacatccctaatacatccaaactataagctctgtttgctctgatatatattctgatacgctcacacctttttgaataatatccattgaaatacccctagcaacagcagagcatgtctgaaagaaagctgaaattataagtagaagagcagggttctaatattgaatctaaaacttcctaatatgatgacctttgatatacgatttaatcttactgatgctcagttttctcttgtataaaatggtatacaacaatgctgatttcttctttcttacaattattatgacatacatatggaaattatgtacataaactataatttggtagtataaggaatcttattttcaatgtggctattgcattgttttcaaaattttcacaaacctctctgtgcctcacttccctcctctgtcaaaatgggaaagtaatagtacctactttatagattattgtttttgttgtagttgtggtggttgttactgagactatttatattagaataactggaacaatgtggttaacaagatattaaaggtcaaatatgattcctgagatattcaaatataagttttgttctctgttagtaatattaattgattctagtaagcttagaataaagagattatgatgataacatttagagggctattgataatttattttcaatatttataaagaccacatagtgttctcattctactttttatatcatttcacaaaaactaaagcaaaagctcaatgtagataaaatagaaacccctctgataggagaagataactctaaaagtaactcaaagaacatcactttactcagcttgttgtcattgttcctttatgtgttgtattgtggtatatattttttctttcatctgtatattgttttctggataaagttcaaattctggacaccccaaatcctcctgtctttcttgatatttacattacatatttacttaaatgtgcttattttttctcctctaagatgctcagggtgctttccatataacatttaccttttaatggagaataaatgtaagtagtgaaaaacaagtatgccataagctgctaaggacagataacttagatcacaaaaactaataagttgagaaaatagaaatattggagcttcatctaggatcttacttttaactagatgttgtagctactctattttcatggacttttcagttcaaccaacaaattagaaccatccatgattgtgcacgttcctggaaacaattcaatactgtctttgtgaaactgaatttcaagacaactcagaagttttacctgctaattggaaagggatcctgggaacataaaatcacaaaataccacaaactgggtgctttgaaattttcaagtggaatgtaagatattaaaaagtgtctgtcactttcagagtttcttaactaattagacaaaactgagttttcatttgttgcccttcagagcaccatgtaaaatgtgtatctttcagctaagagataggtatttaagaaaataaaacaaaattactaccttatagattttttttaaattttactcttaatttattctcagttttaattagtattttatatattacagctattcctgatggagtttattctgtgaatgattggcttttttttttttttttagcattttgtactcttgatattgaatccagtattcctaattcatgaaacctttttttgtgattttaatagactccatttttagagtaattataggttcacagcacaattgaacagaaggtacaaaaatttcccatataacccggctcccacagatacatagcctgccccactgtcaacatttcccactagagtggtatatttgtttcaacagatgaacttacattgacacatcattatctcccaaagttcatagtttatacattagctttccctattggtgccacacattctgtgagtttaaacaaatttacaatgacatgtatttatctttagagtgttatgcggtgtaatttcactgccataaaaatcctcaatacttttcccgttcatctacacttctctcctaatctctagaaaccactgattgttttgtagtttacatagttttaccttttccagactatcatatattcggaattggaatctagggtgaaatcctgcggtaaaatatatagccttttcagattatcttctttaacttagtaacatgcatttaagttcttccatgtctttttatggcttgatagctcatttttaagcactgaataatattccattgtctggatgtctcacagtttatttatccattcatctactgaagaacatcttgattgtttccaagtcttggcaaatacaaacaaagctgctgcagcattcatgtgcaggaatttgagtggacatatgactcctttgtgtaaatgcctaagtgcatgattgctggatcatatagtagaatgtttacttttgtaagaaacctccaaactgtcttccaaagtggctgtgccattttgcattgccaccagaaatgaatgagagttcccattgccccatttctctgtcggcttttggttttgtcagtgttcttggattttggccattctaataggtgtgtagtggtatctcattgtttaatttgtaattccctggtaacatatgatgtgaaacatattttcatttgcttatttgccatctgtatacttcctttggtgaggtgtctgttaaggatttttgcccatgttttagtttgtttgtttttgttactgagttttaagagttctttgtgtatttcggataagaattctctaccagatatgtctttcgtaaatattttctttgagcctgtggcttttcttttcgttcttttggcagcatctttcacagagcagaaccttttaacttagtactattcaacttattaattctttctttcatggatcatccctttggtggtgtatctaaaaaactatcaacaaactcaaagtcacctctgttttctccactgctatctgctaggagttttatagttttacattttactctagagtctgtgattgattcattattaattaactttatgaattatatgaacaccacaattactttcaagcagttacacaaatttctaaattcagtggaaatgtatttatttttggtatgtttatttttcatttttattttattttttataatttcaacttttggattcaagagtaaatgtgcaggtttgttacgtgtgtatattgtgtgacactgaggtttggtgctgagcatagtatccaatagctactattttggaccttttcccctcactccctccccactctagtagtccgcagtgtttcttgttcccatctttatatccatgtgtatccaagaaaacatggttttcaaccataatgctgtgttccacaaaaatatatgttcatgttattttattttatttatttatttttgagacagagtcttactctgtcacccaggctggagtgcaatggtgtgatctcggctcactgcaacctctgcctcccgggttcaagggattttcctgcctcagcctccagagtagctgggattataggtgcctgccaccatgcccagataattatgtttgtatttttagtagagacagggtttcaccatgttggccaggctggtctcgaactcccgacctcaggtgatccacccgcgttggccccccaaagtgctgggattacaggtgtgagccactgcacccagcccatgttatcatttgtacagatatattcaatgttgaaattttaaagtgaatttgtgataaaattcacaataatgtcagatatttcaccatcaaaagtataaacttccaatgaagttgatccagtgaataacatgaaagtaaataaattggaattaaataattgtaattaaaacaaaagaagggtgtaaggtttatgcctagataaacttttttgcatgtagatgttgtgttgttcaggaccatttgtttaaagactttttctccactgtattgccttggttcctttgccaaaaatcaattgattatatttatgtggatctgtttctgagctttctattctgttccattgatttacctgtctgttcttttgccaatattactctgtcttgattactgcagttttatatcaagccttgaagtcagatatcgtcaggtctcccacttaggaaactctttaaaataaatttttaagaaaacctttattcaggccaggcacggtggctcacacctgtaatccccccgccccaccccagcactgagctgggcggatgatgaggtcaggagtttgagaccagcctggccaacatggtgaaaccctgtctctactaaaaatacaaaaattagctgggcgtggtggtgcacgcctgtaatcccggctactcgggaggctgaagcaggagagttgcttgaacccgggaggcagaggttgcagtgagctgagatcatgccactgcactccagcctgggcgacagagtgagactctgtctcaaagagaaacaaaaacaaaaagctttacatttgtagctatttctttaaattagatagtcttttcagatacataaaaatatgtggattattgtataagcatttacataatttaatgtgcttagtaaatagtgttgtctagatgattactttttctctgcaactatttctgatattgccatattatatgaaagagtttccctctgtcgcccaggctggagtacagtggcgcaatgatagttcgttgcagcctactcagactactgtgctcaagcagtccttctgcctcagattcctgagtagctgggactacaggctcctgtcaccacgcctgactaattttttaaaattgtttgtttagagatggaggtctctcgattttgcctaggctgatctcaaatccctggactgaagcagtcttcctgcccaggccttctgagtagctcggattacaggcctatctcttaactatttgcttttaaaggaatgtattagatctgcgctgtacaatcacagttaacactggtcacatgtaacctttaaattttaaattatttaaaataaataaaattagattaaattaaatattcttttattttcaagtcatgctgaccacctttcaagtgctgaatacccacatgtggttattggctatcatattggatgacacagatacagatcatttccatccctgcacaaatttatactcaacagtggtgcagactgtccatgtatctgttatttgccctcccatctgtactccagtattttacctggaaatatttttttaaatgcctgtggatgtaaatgaagtcttaaaaaatagtctcatgtagaataaccttctgcctcaaattcaagagaaatctttgttataatatgattgttaagtcacaggtgtgttgttcttactatattttaattgcgttatagttatttgaatagttatgttttaggacatacacattgttatagtcaacacttcttgatgattatagtaatgtagttctactctgtcatagtttaaaatttatgtctccataggaatattattagctaaactcaatagtatgaaattctggctattgttaactgaaataattttgcatttgtggttcaaaatgtaactcttaagggaaataaaggaattcagaaagttttttgaaactcaatcttgtcttccttggaaataggagtactttgattatttttgaaagaaaaattagcctacagcctggtatttaaatatatatgtacatatattatatatttctgctaaattatttatggtagtttattttttccatcttatatacatactggattctcaatttgatttttaataccgcctatatacttattagtaatttcaatggtgtatctttaaaagataaatttcattttagttatgtgacactttatctttcattgttatgaattgcctttttactttttgcagtcttgcgttgaaatgtatcagaaactataatgtaaaaaaaagctgagtagaaatcttataattaaaagttgtagcaagtcatgaaaatggctcatgcttttattgccattttgatgtttttgatggcaaaagtgttgagaaaaagtctttagattcacgtgataagctgacagagtgaaacatcttaaggcttgaaagggcaagtagaagttataattattgtgtagattcacagtccttgtattgaattactcatctttgctctcatgctgcaggccatagagcgagaaaaagctgagaagttcagaaaactgcaagatgccagcagatcagctcaggccctggtggaacagatggtgaatggtaattacacgagttgatttagataatcttcttagggatttgataaacacataggttcatatttatcagctgaattatatcagacaagcacttgttaaatacaaatttaaattaaaaggtgtttgtatgttttttattattctttttttaatgctaaggaaattattaggagaaattcaactttgagttcattggaagaaaatgggatgtggtagaatattttatcagtctgtagcagagaaataaattttaatgcaaatctgctagaatttatccaaataatttaagaaaataaggttaacagaaatttgaaaacattaacagtcatgttatatgtgtaaaactgatcatcatctgattttaaatcatttttgcaatatgtttttccaaacactaaaattatatggaatgttttaccgtcattcctgttttgtaataatatatatgacattttctgtgttactttttatcacttcctctcatttaaaaaagaagtctcttcgggataacctttacttttaagtaacttttttagagtgagataaaagcacaaagctagccaagtttttgtctttctttttcaagaataaattaaaattaatcttttctaatactcagtgcctcaaaagttatgtgtaccaaatgtgtcattgacatgatatgtaaacaaccttctttcaaattatcattgctatactactatatttccagataaaattttacgaaaatcagggataatgctatttccaaataagattatttttcattttgtagaagacgtttacaagaacatcataaataaatacaacaaatgtttttgttgtgcatgtcagcttttttcagaatctgcctgcattttggggcataaattctgtgtataagttattttttgccttaattgcaaatttggcattcaaaagttcagtggtcttcctagaaaatcaattcattttcttcttctaatgagtcccatgactgactgtatttggttaaaaatgaaaacaaacaaatataacaggtgagacttgagtgaacaagtttaagaacaggtaatgaaaataccagtagatttttatttagatgtatgttgcttggtaattttaactgatcaacttaacagcatattcatgttaaataaaattatgtgatctaaaaatattctcctagttgttatgtaagttccccctagaaactgtattatcactttttcattttaataagctgatgcaagagctatactttaaatggtctcatgtcatagttatatatcaagcttacctacactgaattaatcagaaataatttaaacatttagaaattacgggaatgatttttaatttttggtaagtaaaactacatgcaggatttaaatgatcgtgtgactagtgagaatattaattttcttgattatttccctcatagttctaatttttggaggcatgtagaaaagtcaggacacatagtaggtgcttagtaaatattaattgaccagattctgtttagaaaagcaaaattaaggcagtcgttgaggtaataacgttggtaattttggtgtgaaaataataatccatctgaaggaaaatgctaactttggcagataccagggaacactggggggtaggggtgtgatttgagacattcctgtttggttgactgtgttaatcaaattttatgctacccttttgttctaccagtaaagatatggtcgaactgatacgtcattaggctcaagtttgggccataactaggatgactacttaaaatgaccatagctctgtttccccattaaataaaataatttatgaaattacttaaaggctcaaatattctaacttatctatttgttccgtttttgtcgttcaaggaacaaattgcataatatttattttctgtgattgtgcaaattgtgagataagctagacacatattaagtgcctgaagtaccccttcaggtgtatttcagagggactgctaccctaaatcataatagctcctttagtatagagcccaaaagtacagttgagtggtgtagctcatgaagctgaaagacaaatgaagctttctgtaaactaggagtccagcaattattgcattaaagctcttaaatttataagtccagaatcttccttcccaagcttaggctatggagatataataaatctcacaaccacgtaagacacatacattcttgccctttttgtatagaaaggaaaatgagagctgaatcagtgtgcttcatttaggacctcatgtaaatggctgttcctcttaaccacgtatagtttcctcagaagttaagataaagatgaaccactcttgtataaaccactcatattattatgccactaataaaaatatgtgcgtatatatttataaatttgatgtgtgcttaccacagtgaaaatatttaacatatattcatagtgtaaaaatatgtagaatagcataagtatagctattatagattttaaaaaattctgtgaactatattttatatgtatctatactggtatatgcatagcaaactgaattttctacttaaaataatttgccctaagattaaactactttttaaaaatttagaataattttgtaattcatcagtttgcttttagaatgaaattccaagatggaaaaaataatttctcataacttaaattttacttcagttttgacctgaaatggtacatcagacatatttccaaatgatttctgtccgtttctaaatgtctatgaagcattgaagattcaacatcacttaagtaatgcagaaaacaaaatctgtttgtcctgaaggcaatttgttgaaggaatttaagacatatgctgagaagacaggatagggtgttaaggttgttgaaagtacaaaatttaccatggttacaatgtagaagggaacctcatttgatggtgcaaagtattgttaaaaatcagttgtacgttctagaaacagtatgtctagtaacatatgtacagtttttcagtgtcacatacaagttttatgatcaattggaagatactttttattttcactgtattttatcaaatgtgaagagttgtatgcagaattttaaaacagttaatattaaccatatcattaattttacagcaataatttgtatattaagagtttattgaccgtaagagattcttactaatttatttggaatttttaaccaaagaaatgagttggccaaattccttgcctgctttaaaactatacatggacgttttccttatggatgttccagttcttttggtcagagtagaagtgatctttcacgatcatagactaaaaagagaagctactaaaaggagagtgttaactaaaaaaaaaaatcacgtttctggcattttggcatgaaattttggtataatttttaactgatttatctctatcttagctgtattttttgtttgaactaacattaaaattaatttactgttcttatgtcagcattaattggttggataaatgtgacagaatattggatggtgcaaagtacctctttttactagagacatttttggatagctgtaattttcatgcagcttaccgtcaatatgtaagctttggatcataaccctggtctcaggaaactgttaacttaatgagggcaagtgagaggctagaccaggtatctagtgatgtatttatatattcatgtagctgtgcatattgaaaagggagtttccaaattctttattttactttttaagaaagatgtgatataactttaaggtttatttttacatttcttaatttaaatacaaaatgttataaataatttagaaatttagaaaaatttagccattaaatatagtaagtaatctttctaatgctttaataatattgctaactaataatggttttctaagattttaatttgaacagtctttaaactgatgcctttcatgaccaaggcctttcagtgtattattgagattgtggagttttaggacaacctagggctaaaataatatacatatgattatacctaaacatatgtctgtttttatctatttaggattagacgtaatcctttttgtaaaacagtgttctcgcatgagtacatacagtctcatcaatcaggcataacacaaaaaagcctagtttagataaactggttttccatattaatactgaaattaccaaaagatgaccatatcaaaacatttatttgaaaacatatgtaggcgtagctcaggttctcgttctttagtctctaagatcctttcaccataatttctagaggagatactataattatgtaatagggttagttaaattgtgattcattttcaatttctatttgtagttttctgtgtgttaattaagagtctaaggacagtcacatcaaggacatgtttaaataaaagtagtaattattagtatattagactaaagaacatctcaaaactatcattccctgagtgctagattatagtgtttaaggtgatacctgataataagtatgctaactgttgtaattaaatggcacagaatgataacactgacgagagctcttcttatccataacattaaccaagtaactatctttttttcttgtattttggttcatagctcattagataatttcacatgaattatgttatttgaggtgggcaaccagattttgtcagatgggtgagggtagggattatggtcagtctggctcatctcaaagctaaaactctcatgatcactggaaaaactttcagtagcagcaagtcttctaatcatatattttaatggcaagacatattgcaaatagtctgtatacaaatgtggcatggagactgtaccacttgtagtagcccagccccttcatcatgaatgagtagccttccacagttgcatatatttcctcttctcttattccttcctcagtactgggcagtttgatttatatttcttctttctccacatgacacttagtataatgctctacacagagttcacattcaataaatgtttttaattgacaggcacatttttcttcgtttaagtctaatctccaaaaggaagagcctctgtgggtgtgtgtgagcacggcgtgcatgcacgggtgaactcgcatgcgcagacatgtgcgtgtgtgtgtccatgtgtgtgaaagaaagagactgttgttgtcactgttgttgtgggaaatgagtggccaaaacaaatatgagtaaaaatctgactttttttaattttatgatgtttgaaaataaaaacgcaaaagggctatattagtaaaatttatattgccctcactaggggtattacttttatatatactattaatttttaaaagctattactttaagtcagtgtggtcacagaaacctctaaaatttagcctcagaacttgtcttcacaggttttgaatatctctatattacattttagactattacattgaatgctaaatggacttgtaataaccctcacttaaagttcagcaaaaataggagactgtttattagcagctttattttaagtttctattccaaatattcttttaattcaagagctctggaaacacttgttttgtgttattctaccctggcttcatggctaatgatgaatatacttgatgaggaatacttcactttaagtggcagttctgaagtacttgcatggaaggtggtgcacatttaacattattctaacagtctgttatgcactgtacacaagtaataaaattaatggatacacttcaagtaatgatccatttcctctgggtgcaatatatttattcacagactatttcaggggttgtttagaatatgagatgtgaatggattatgatccattatccctgagattctaatgtgctacaacaaaatggtttccataagtattgctcataatgcctggtgtgttagtatttgtattcttaaatagctaacacaaaattagaaaacagatgctcagatgattgatacttaaaacttttcagatatttacacttacaaactcttagaaaagttaaaattttccattgagtcaaggagcataattctatggaatacatataaaacaattatatataataataaaatccatatgcaaatatttacttggataacgctttgaaccctttttcattctagaaaggttttaatggactttcttagaaaatcaacagtagttctggcatttagatggtcaattaattcataaagttgaagtaatagcatttctcattttaattgaagagaggtacattaagtaatgtgacagtgtcggttattaacgtgacagtgtcagtaagtaacgtgaccatcctctccatcccctgcccaagtattttaaagcaaatttgatacaagagagattgtgtgcttgtttgtgtatggcttttggcttcagtgtacattggtctcataatttttatattcatatagagtacactattgatttggtattgaatgagttcatgagtacagtgtagttatactctttctactccaagctgagaattctattagatactgccagtggagacatttcctataggagtttatagtttagaaggacagtttatgcccttgttgagcaggcagcatattcacaatgaattaatacaatgtttgcatacaaatccttcatagcaagacttctgattttctgtgcccaacattatgtcttttctagtaacatctagaaatttccacgttttttttgaaatgttttcgtttctttataacttcaatctcacatgattataaatgtggcagaatattccaggattcccaaataaactctttttatttttattttagttggtgacaggctcttgctctgttgcccaggctagaatacagtgatgcaatcatagctcagtgcagcctcgaactcctggtctcaaaggatccctggttattgataaaacttctttaaaaaatgtataaatacaccttctatatcccatattagtcatatattatataaaattaggactaattttaaaatagtattattaactttttatacatgtcctgtttcagtcattaagaagacttcctctccccctaattttcacacaagagagctggtcccttgttttctgaatattctttttcatttcctctatatggcattgtctaatatgtctttgttgcctagtatgtgtcagcatttgttataagtaagttatatatgttaactcagaactttggtaagtatcctatgaggtcgattctatttttaatcctcatttcatggatgagaaaaacaagatccagtgaaattaagtaactgaacccatttcacacatctagtaaggggcatcaaatttgaactccggtctctttaacgccagaattctcaccggtcatttctctgcctttctgcctgcctccccctttttgctattatagatgtcgttcttttacctatcactgcattttcattgcctgcattcagttataaagatcaatatgcaaataaatagagcgtattataaatttcagtgttatgaatttgtacaaagctgacttttcttcaccatttaaatttcttttacagtgatatattgcaacattttttggggggcaaaacatagagttttgtgtaatgatcaacaatgactcattaaaacctgtccctagattttaacggatactgcagagcctattggtacttcactgtagttttatcatttaacaaaattaacatatccatattgaaaatcaacttatagtttcattttttcatttgctacgatttgtatggttgacctttctcagggacacaaagtgatttctctctgtgttcccgtctcatttagacaaatgttgaataagactcaatccagcatcagtctatcggtccctttaatttagcatttcttttttgcctgtttaatacctggttcatgttgacgtttcacccttcatggacttctaactgcttgttcaagttcaacatatgctgaaaatatttctcctaaatatctgatcatttagatccatgccacattttttgttattaacataatttaaaaattctgtccagtatattttctaattatctttttattttccagaaatgttaacgttttatcataatacttttttcaaacggagtgctcatacgattgaagtttcatattcttctcttacactttataccaaatgtggtcattttataacaacagttacttaatcgcatcgcttaacaaatattttggtacaatttttgatcactcctcaaaatctaacgatcaaaaacagcatgtcacaattgcttccttaagcattaggaggatattagaatatgtagctcctgtaggccacggacttcttttatacttagatatatggagccatgtatatattctttttacattctattatttccattgtatctcattaaaaatatatcagggaagaaggaggggaaaatagttgacgataatatttgcaaagtttgtctccttcaccgccatcctgagtagcattatgctttgaaattagtgaagttacagttgtgtttcaaatgaattgagggacatggtttggcagcattaatatcattatgacaaatagaacattagactatcagggcagagggaagtgaaagaggataaaataatatagttgttgaattcacatctatattttttttagtctttaaaaaggataaagtgggaggcatgtgcaagttagcaaaaccacaggccttatgtttctagagacgttcttcagactttttaagaacttagcttccctttaactaaattatattaccagaaaattaagtaaaatgaacatttataaaagtagattatcttaggcaacctactcttctaccaaactactcttcgaacttttaggtattttaacctagagaaagaaccttacagtgagtttatgttcttttgagatctctgtaggtacatgagggaacataaaacatttaaatattcagtatttccaaagtataagaaagttatcagtgctaatgtagctatgtttaaaaatgcatgatatcatatgtaatatattttctcttttatattctgtcattaagaaaactatataagctaataaatctaagaaagtctaaattttgtaaactaactttagagagtttgaatattttaacccatagcacagcgtgatgttgccatgctttcatgctatgtatggaataatatgtacttggactggcgttcgtcatatatgaaatgacatagcatattccatggtacatagtaggtactccagaatggtaatggtgataatgatatgcttgtgtttccatttttcccttgataaagttttctgggtttggtattactacagatgattttaaaactttgagatcaacttctacatttataaatttaaaaatgtttcacattagaaagattatttttcctagtacttgtttttcttcctcgcatccatggacaatatgagacagagtctcgctctgtcacccaggctggagtgcagtggcgcgatctccgctcactgcaagctccgcctcccgggttcacgccattctcctgcctcagcctcccgagtagctggaaccccaggcgcccgccaccacgcccggctaattttttgtatttttagtagagacggggtttcaccgtgttagccaggatggtcttgatctcccgatgccgtgatcccccacctcggcctcccaaagtgttggaattataggcatgagccaccgtgcccagccgacaatctgtttatttctaatcttctgtaaatgaaataaagaataatcttggattttttttcctctttttaaaactatgaaaatactatttaaactaatttccaagcccatttttaaaattaaaaatgtaagttagtttggggaagtatatttgagtaatatgtatgatatgtaaaatgtatctgaaaacatccaaaatgttacttgttcatgcagccttccagctcccatcagagctttgagcacttttgtttttatttaagtttttatttaatattttatttacatatattctaattttctacatcttatgtcttattacttgatggcattgatattcattgttgtgacgcaagtctgataattcacattgaataatctgaaatcatatttacacatttatatcttagaaaataattgatctggtttgaaatcattcatgtggtgaatacttttataattaggatgtgttggctttcagatcatttctttcagtctgtgggttcaggggatatatttaattatttttttctttctagagggtgttaatgcagatagcatcaaacaagcctcagaacaactgaacagccggtggatcgaattctgccagttgctaagtgagagacttaactggctggagtatcagaacaacatcatcgctttctataatcagctacaacaattggagcagatgacaactactgctgaaaactggttgaaaatccaacccaccaccccatcagagccaacagcaattaaaagtcagttaaaaatttgtaaggtaagaatctcttctccttccatttggagcataatcaataggtatttcttggcaatttccaagaagacagtaacaaattatttagtaatgaaacgttcaccttctaaggatttagctaagcgcaataaagttcaaaatgtaagcaacagaaatctgtttaaatatgtaagacgtagatacccggattctaaaattgtatttggcgtagttacacagcgctaattgattgtgtcggtttgcgtaagcatgaggcagtttaggagtgtggaaaccacatgtatcctgtaaaaaatggcctctcactttggaactctttctttgtgacgagtgaaacatagtcattttgaaaaagtggaatccatggaaatagttagaaacacgggtcaacaacaagcttggatgcagtataactagatacataaggaaaatatttaaaactgatggacctctcaaattacgataatttgaggaaggtttctttacaaaaagatatttttaaaatgtagctggagtacagaggaaccacaccggatagtgtagtaacccagcatcagagttcttaccccttttagtccagaaaggatcagtgagagagcagttatagaaactcagaaggagacagtcagatcctcatggtaaaagcagcatggccggcttaaggaatcctcatagaaatggagtcagacaaataaacaccccacttcacttttttccctgcctccagaatcttgtcagggctcctcactgactaaacttaatcgtaagacaaaggacaaggaaccgtcatctgtaaatatcagtctcctgggtaacaggagaagagcggacagtggatctggaggggcaaacaagatgtaagtggacaaaagggcctgagaaagagatgaaaggattatgccttcaagtgtaagaaaacaagagctgtataataatgaaaatagcctaaactgttttcattgttactatgagctatgtgcttttcgcggggaatgagaaactgattagaggatggactaaaacgtttccaggatgaacgtttagtgatagatcgagatgattacatttaatacaaaaggcaaggagtggagattcatttgcatactgtaaaaaagaatggcttaaataaaggtagaatagacatggaaaggtgacaaggttgatttagaaaaggtattggacccaaaaagtgatgagaaattcaaagctattttgaagagaaaaacaattgaaggacttaatggttcttcaaatatcggacctgtagcattattaggttttctgttcttgtgttagtttgctgaggaaataaactcagaaagtatacttttggataaagaataccttggataaggcacttgacttgttaggcaaatacacacatctaaggaatttctacattgagatgcattttgtaatttaagaatagaaccaatgccgcttttcctgtgaatcagaggaataatccaaatacattatttcttgccacaaaaatctgatgttaccttatccgattcttgagattcagatatagtagttagtaatagtacctacacagtacattcatgcataaaatatatacattaagtgtctctaatgtgtttaagaatgctactgagtgtattaatcagctgagtctgccacaataaataccacagactcggtggcttaaacaacacaggtttattttctgagagttctagaagtgagagaaagtccaggatcaaggtttggtagggttcagcttcatcttctggtgaaggctgtcttcctggcttgcagataaccaacttctcactctgtcctcacatggctttcctctgtgtgtatacatgcagagagagagaatgagggctatttttctttctctctctctttatctctgcctccttttataaagccaccaatccctaagggattagccccccaccccgccacccttacccaaccctgatgacgtcatataaacatcattacctcttaaaagtcctatcaccaaatagtctcaccaatggttaggacttcaacatgtgaattttggaagacacaattcagcccatagcactaagttttgggaatattagagtgggcattcatggactctgcttttattgtatttacggaaagcagagaagagagatatgaaacaatggaatcaatatttttaaatttcctgctaggaacagtggtttaaactaagatgcaaagctttgggagaatgagtaacagggaaaaacgaacctgatacagccaccaagggcatcttccttgagggaggaacatttgagttgagacttttgtgataagttagaattaggtaagagaacagttaagcaagattccaggcagaaggaacatggcaagagggagcaataaaggccaagcacctgaatgaagaccattgtaaatgctgaacatagaggggcagatgaatgagaggagagacaaacaggaatcagtcaggtatataggagacaaaccaatgacttctgggacctgctagtatcttggtcttgatttgaggaacaaatggagatcaccagaggttttatatattaaatattgtctggaggttgaggaagtcatcctaagggaaaatacttctcttactgcatccaaattccgttgtcacctccttatcaccccttactctttctctcagacccattggtgtctattaatttgaagaatcactttaggtaaaatatttagcaagataagcttaatattattcatacaagggcaaatatatatactgttctgctgagattagtgataggtaaataaattataacatgtttctcagcgttttattttatttggagaagttttataacattagagcgcatatttagctcatattctaatgatcggcagaactggtttttaatattgtgggggttagagagccttatcagaattggaaaaaattcatgaaccctttcctgtgaaaaatacaaaagcttccatgagataagcatataattttaaagaataaacagactcaaaggagataccatactctggaggaccaactaaaccaaatccttttatggaaataatggctaattgttcacatctttttaaacacagaatacttcagttgaaaagtatctcttctatgatttattctcagaacattaaggtctcaactgaacatttgcccaaatgttttattagtttcaaagtcccctttgtttttcagagcacacttggctataatgttggctctttctatagccccctgaacgggaaaaatggcagccctccatctggccaaatataaatcaggttcttaatggttcacagtagatgccaatgctgccatttgtaaatctagcatacaaattatttgtatatatttctgtactataaatacagaatattaccctttacctcttgtcttatttcttatccatggatatataccaactttctagcactggtttgagaggatttatatttgaaagagaaatataggtcaccttccattttgctaaacgtctttaatcttcacccaccaaaacgattgaatcgtcagagattattttacctgaatcagctcataccattataaccacataaacacattcctctgaaagctgtatttatgtttttttaatgagaataagtggcattgtacattagtcttgcaaccatgacagaatttatgtgataaatttctcagcctctcctaatacaaaagttactctctcccaaagagtatgaatgcctccataaatattaactttttttttgccttttcactttgattttcaggaagctcagatttcaattcgttcagaattggtataattctttccattttctctttcttctaatgggctcatgttccaatttttaaatttcaattttcctgttgttacatattaaatagtaactaaccctcaagtatttttttctaaagacagcatatatatgaattgtaagtaagcagccatgataataacacttttaaaaagggcagtgaaaactttgagttcaaattatatatgtattaaatacgaaacaattccaacttcactggaaacaagaacatgaaaacatttatgtagagaatagcatgcccttcgcccactttttgatggggttgtttgtttttttcttgtaaatttttttgagttcgttgtagattctggatattagccctttgtcagatgagtaggttgcaaaaattttctcccattttgtaggttgcctgttcactctgatggtagtttcttttgctgtgcagaagctctttagtttaattagatcccatttgtcaatttgtcttttgttgccattgcttttggtgttttggacatgaagtccttgcccatgcctatgccctgaatggtattgcctaggttttcttctagggtttttatggttttaggtctaacgtttaaatctttaatccatcttgaattgatttttgtataagttgtaaggaagggatccagtttcagctttctacatatggctagccagttttcccagcaccatttattaaatagggaatcctttccccattgcttgtttttgtcaggtttgtcaaagatcagatagttgtaggtatgcggcgttatttctgagggctctgttctgttccattgatctatatctctgttttggtaccagtaccatgctgttttggttactgtagccttgtagtatagtttgaagtcaggtagtgtgatgcctccagctttgtcctgttggcttaggattgacttggcgatgcgggctcttttttggttccatatgaactttaaagtagttttttccaattctgtgaagaaagtcattgtccaaaagaaatacagtgctagccacaaattcaagccacatatgtaatttaaaatggtctagaaactatattaggaaaggaaaaagaaacggtaattgaatttcaatagtacattttatttaacctgattcatcaaaaatattatttgaaagtgtaatcagtatttaaaaactttgagattatgttcttagcttttcttaatcttcagaattaaacatattttggtaatttcatgcatctaaatttggaccagccacatttcaggtgcccagttgccacatgagctagtgacagtacagcagtgttcatgtgattttatcatacaaaccagggtactactgagagtgaaacagggtgctactaataattatgccaggacaacaagaggaaacctggacagccaccgtaatttaaaaagtggcaattggctgggcgcggtggctcacacctgtaatcccagcactttgggaggccaaggtgggtggatcatgaggtcagcagtttgagaccagcctggccaacagtgaaactccatctctactaaaaataaaaaaaatttgctggacacggtagcgggcacctgtaatcccagctactcaggaggctgaggcagaagaatcgcttgaacctggaatgtgaaggttgcatttggccaagatcgcgtcattgcactccagcctgggcaacaagagcgagactctgtcccaaaaaaaaaaaaaaaaaaaaaaaaaagcagtggttgcctgtttggtcaggagaagtaatgagaccatacaaaacatagaagattatagatatatttttatatttgggtgtgtacatacatatgtataagtattatatagattttatatgtgtgtatataatctatataattgtatcaaaatatatttataattatagtatacacatatacatatatgtaggtatatatgtaatttatattttgcagaaatgaaagagaaaatattgttcattgagtgagcttaaaatttgaagcaagcgcacatcattttgatataagaggggtgcagccaaacacctatatttgatttatggaaaggatttaaggtcatgcatagtatttttccactgtacgcattcatacccattaatgctctaaattatgtcatcttgaaatttaaatatcattatataggatgatacatattgaacaaagagccaaggtatccttaaatgtatggctggtgatagaggcttgtctatactgtcatggatgtttcttatcagatatttgtgaagggtattaagctaaacttgccttactgctttttaataccttcttttgcaaaatgtaatgtatgcaaagtaaacgtgttacttactttccatactctatggcacaggatgaagtcaaccggctatcaggtcttcaacctcaaattgaacgattaaaaattcaaagcatagccctgaaagagaaaggacaaggacccatgttcctggatgcagactttgtggcctttacaaatcattttaagcaagtcttttctgatgtgcaggccagagagaaagagctacagacaagtaagtaaaaagcctaaaatggctaacttgacattttccaaaatggttatttgtggggaaatccagaaggtactaacatgaaacaataatttctgtaaatggaaccattctccctacaacctgtattaacaaggaacgaaatactggtgtaacagataagctgtctgtagatttttttgtcctcataataattttgtgactttgagaaacaaaacatgttttgtatgggaatagcttctccttgggggattgtagatttcaaaatcagatgttttgaatatagaagaaaataaaagagcagttgaggtcatatgaatacacttcaattaagtctggctcgctgtatatacaaggatatttgctaggcatcttctaatatttctgtcaatttatctgaagagtattatagctttagcatacatgtggcaactgaaactcagcaaaggacaaattattctttgggctacattttactactggatcactataattacataaatcctattttttcctttgatgataaaagataaaagtggagcaattatgcaaattcatgccatgcgactagcaaatttttcaagatgtttcttttgtctcttcctgaattgctttaataagatgatgttaatacatagtatctgctccaaaatatctctactcatcaacttagttttaagacaaaaattcttttcagagacagatgaatgaccacctttaagaaatagtaaatggggttttgattcactatatacatgcatatatgtgttcatgtgcacacaaaaggaattattgagtaaaatcgggtttgaaggcattaagataaaagtatttttctgaaaaaatctctgtcccaaatttgtcatgagaagcacaggaacatgtgtttgtttactactaaaacttaaattagttggaaaatatattatcctattgcttttctttgtaaatatttaaagaattcaccatataatatcatttccagaattaatgtagtgatacacaacgcttttctcatttcccagcttttcattttttacaaaaatgaaatgagctaaataaagcaaaggataaatactttttttttttttttttttttttgtacttcagagtcgtttttgctaaggggtttattttcctgtacaggtagtaaaactttataaatagtatcagctccctctagtggatttcagtatacttgttactgtgcctctgcaaaatcaatttgggaaaatattttaaatgtcctagattttcaaatattgacatatttaacaataatgtattttcacttgtcattacatacataactcccccttaaagttaaatacatttagtggctatgcagcaattgttgtgcaaaggagccatttcactggaaatttactttaatctgtatatacctcttaatcatattaaagttcaactttttatcatttactttaaagatgttcagaatagcaatgtttgataactgagatttgtctatgatgttacaatataaatacgtaataatatatagtctctattcatacagctctccatccatccatccatccctatcatctttcttctcttttttaaatttcatacctacaaacgatgattgtttataaaacttcctaactttttcactgctattatatgtaaacaaattgtccccacttccactgtagctacacatctttaattttactattcacccttttggaatgcttgtctagattaataaataaccctttaattaaatatggtgtatatatatatatatatatggaatgaaaaatgtagcatatgaaattacatagcagttgattttgttaatttgaaattaattcaaataattgcacatgtgtatgcattatatccgaactggcaccagggagtaaatctcatttcttgtattcctccacagtactttggacgtattaagtatgcaggaaataagagctaacagaagtgcctaggcatccatactgacttttatttcctctttacttttttaaacttgctttttcacacaaaaacctggcttttaaaatatactatcagtgttggaaaatggcataaggaattggtagttgttacctgacataagtgatagaagaaaataatataaaaagataaaattctattttcaaagcactttttactctatgcataactaatttatacatcattttacctaaccctcagagagaaacacattgagtatttgttattacaactatatcacaagtaagctaatggggtttgaataactaaaagcatggatatgggatgctgtaagaactagatcgtatacacgaatgtccataacaacattattcataatagccaaaacgtagaagaaacccacatgtccatccagtgatgactatatgaagaaaatgggcacatccatacaaggcagtgttactgagcaataaaaagggagaaagtactgatacatgctacagcatggagtacccttgaagacattatgctgagtgaaagaagccagtcacaaaagatcatatgttatatgagtctcttgatataaaatggccacaataggcaaatctgtacaggcagaaataagattagtggttgcctaggtctgggaggatgagggggtggaattgtttcccatgacagttgataaaatacttttctagagactgaaaaccagtaaactcatgttatatgctagatgaatatagaaacacagcatctagtctgttgtagataattgtttcaacaaagaaaaaaatgaaaccttatttcttaatgtaaagaaggaaaaagattggtcatataatttgagtttatttcattaacaatttggaaatcatgttaaaataattattagggattttattggtttggtttagttttgcaaaaatggagaaagtgacattattagttatgacaaagccagtgttttgactgttctaaagtttcaaaatgattctcttctgttctacaccattagattgctttcagaacagagtcttgctcactttttcactaataaattcaagaaatatttttgaacacctggtatatgccgtaaaagtgctgggcactaggtaatatacatggtggagaaaatcaagagcaatatgtcttcatggagcttattgaaagaaagataataaaattgaatatctgaatattattgcagattataattactttggcgtctgaaaccgtgattctggggagatgatgttagaaccaaacctggagaatgtgcaggtgccagctatatgataagttggagaaaggacattaggagaaatgaaaagaaacacaaattgccaaaggtgaagaatgagggcttggcatgtccagaagacataagggaggccagaaaggctggaatgtaacaaatcaatgaaagattaggacaagatgagggtagaattgctcttatagaacttctataacaggtttggattttaagagcagtagacatttccgaaagaatttcaattgaggaaattaagtacccttagttgtattttttcaaaactcaccctctagctggtatgtgaagaagaaatgcaatacaagtctgaggagaagcaggaagacttgtggaaagaatagccacacagaggagagtccattgaaccttaaactacagttgtgataagataaagaaaaatcatttcaacccttgaagaggtgatgatctggggaggtgtagcacagaagatattcttgccagaattgaaagaaaataacttttacctcttacagagacagtagaagaaaattttaagggtagccagcaaggatgctctccatggccacaatttcaagctctatggttagtctctacccctccctgttaggatgctgagactgggaattaaaacaaagtttgatgtgaggtaactcttctagctgcagttcaggaaattgacctaatttactttattaaaattttaaattttttattttaaaattttatttttaatacatctaggcaaaggaatgttttgttccagtagacacataatctgttgcattgctccttcactccagaaactaggtaaactgtttgtaaatgttccttttaaaaattgtgttatttttatcaataccatcaagagcaagcatagcagacatgtttatttaagcaagctatgtgcttattgtgagataaaagaattgttccctgacctcaagaatcatgggaaaactcgctaaatgccaagttaaagctatacatatatatatacacacgctgtgtgtacatatacgtatatgtacacaagttgtgtgtgcatatacgtatgtacatatatacacatactgtgtatgtacacacacagacacatactgtgtaaatactcacgtaggcaaatattgtgtatatacacacgtagacacatactgtgtatatacacacgtagacacattctgtgtatataaacacgtagacacatactgtgtatgtacacacgtagacacatactgtgtatgtacacacatagacacatactgtgtatatacacatgtagacatatacacacacacacacacacacacacacatttataaaatttatgtgacaggaacctcatactattttccaaaatggctgtactaatttacattcccaccaacaatgtgtaagtgtacttttctccacagcctctccaacatttatctttcatcattttgaaagtagccgttctaattttaacatgtgtaaggtgacacatcattgtggttttcacatttttctgatgtttagagatgttgagcattttttcacatatctgttggccattggtgcctcttattgcgagaaatgtctgttcatatcccttgcccatttttaaatcaggttatttgttttcttgctgttgagttttttgaggtttctatatattttggatattaactccttaccagatatttggtttgcaaatattttctcttgatctgtgagctgcctcttcactctgttaatagtttcctttcctgtgcaggagctttttagtttgatgcaatctaatttgtctatttttgcttttgttgcccatgccatatccatttgagcattattcataacagccaagatacggaaacaacctaaatgtctattacaggacgaatggataaagaaaatgtgatatatatagtgatatatgcatagtggtagatatatatagtgatttatatatactgatatatagagatatatatactgatatatatagtgacatatatatatagtgataaatatattccagtgtctatatatgatatatatatgcaatggaatactatacagtctttaaaaggaaggaatttctgtcatttgccaccatgtagatagaactggcggacattaggctagctgaaatgagccaggcaaagaaagacaaatactgtatgatctcacttatatgagaaatccaaaaaaaagtcaaattatagaaacagaaaatagaaaggtagttaccagagactggggggaagaggaaggttgggaaagggaaggtgttgatcaaatgatagaaagtttcagttagactggaggaataaattgtagcgatctctagtactgcgtggtggacacagttaataaaaatctatgtttcaaaattggtaaaagaatagattttaatatccgcatcacaaaaaaagataagttggtgaggtgattaatatgttaattaacctgagtgaatattttacaatgcatacatagatcaaaacatcacatgataccccataaatacacataattattatttgttagttaaatatgaaatagtttaacatgatattttgaaaataggattgctaagtggatagagctgcttttagaaaaagggaaaattcagcaaaagaaaaaaactcttaaattctaataaatatttctgtagtgtggtagtttatacttacacaaagttggtcagaaaaatgagacttacctggaaaataaatcagttgtccaggaggtgaataatagagcagtatttatgaaaatgaccccaatttcagttggttcattggagttttatgacttataaaacaaattctatggtgatcttagataaaattcctataaacccatctatttcactcatgtcagaccacaccaagtgccctttgtgagaatggagcctgagcagcagcgactttcagcagagcaagttgcataagcaaaaaggcgtgaagtaattaaaaggcatattttgactggaggatagaatattgattttgataggaaattgggctaaaatgttgattgaattcccaatcacaaagatccttgtatttcaaactaaggaaacaacttatatattgacattagaaattcaagttatactcagacttccttgcacttgtaattatctgaaggaccattcctagtatgttaatcatcatatatcatgcatgggtcctgttgtatttcttgacacctttgtcagtgttcacattttagagaaatgcttacttttgtcatggtctatgttatttaataaagtttggagcctttgctgattgcattatctccttgactttagattgatcatggggaatgaggaaaaaggtgggatctggttggcatggaattaaaggctcaagttgagcattttgccgaagtaggtatatgtcattagttcagcttcttcacacatgtgcagtgcatttttttccccacaggtaataatggggaattcaaattggactcgatttcatattcacaacaggacttctaatgtttttaaatgctgtcaatattaagactactaacatatcatctctttctccccctaaatggattacatgggtgccttttccagcttctatctaagcactatccaacagaaaaataatgtgagccatatatttaattttaaatgttctagaaaccacattaacagatcaacaggtaaaagtcatttgaaaatattgtttcatcttagaattaaaattttaaaatgtggaaatagctttacattctttttgtatgaactgtccaatatctggtgtgtctttatatatacaaaacatctcaactcaaactggccacgtttcaagtgcttaacggacgggtagccagttgctaccttattggttggcacagttacgtcttccttctctctattgtacattctctgatgcttaagtgcctattttctgagtagttctatttttcaagaggagagattttttttttcagtaaagtgttatatataaccgattgctctggtatctctttatctcgatagttatgtctctcagaattttcaatatacttctctgtttactttgctttccagttaaagtggtttgcccttgacatagactcatgtgtattagaaaatgtagcatctaatttcatacttagctcttttgttatcacaaaagaatcttgctttgcctctcttggtctgtcctttgctctccttttttctctcttcttttccctttagcccctccctcttttaagagttaaagacaagcagtttttaaacaaaaggtgcagaaaacttcttttttgtattcctttactataattttagatgtcagtttgcctatactttatcacttccatccctcacatggctatattaaatgtctagatattaatggaatttttttttttacttttcaagataaacagtagtgcaggataggagcccttaatttttattttcccaataatttacagcacgtgcttccaagcttgcaatcacttatattgattttcattttgttgaatatatttcactaataaaaccaaaaagatatctgcatttttaaagtggtcctttagcagccgaatagtagaaactgtcataggaatactttctttagagaaaaaagttacatatttataagcaatatattggctaaacgttaaatcttcaggccatatttttcctgagtctgtgctgagtctaatgatgtcagtagaactctcgaggtcttttaagatggtaggttattagattggatatgtttattgtcttattgctgtcagtaaagataaacttatctgttggattattaatctctatttctacataaaaggaaaaaaagtgagtttccgtagatggagctggtctatttctgctcctatgttgggatcacaagggcagcatctacagatatctcaccagctagtaggtggggcagctcatactgtgtttgcccttgggtacattagcttctgtataagactttttctttcttcttatctgaaacagatttagaattcttcactggcattccctggcctgcatggtttaaatgagatactctataccgttgcaaatttgtcaagcatttcctgaaccttgatagcaattactgctgtcattacatagtgtcattacattccacataagaaaatcagaaaaagaaattgtgatatttatgttagtaggtgtgtatttttttttccagcttgcctcacaaactatattagatggacaagttcccaaaccaatctttggaagtttatttcttaaagctacaaaagaatttccaagagattagattttttgaaatgaccagtttcaaatgaatttaatacaaaactaggatgagggttggaatgcaaggaggaattaaaatatgcatgttttaattatagtttaccaatatgaagtgattcctgtgagattcagttgttggacagatcagaagttatacagaaaaagatcaataattcagagactgaagtgtttcagttttcattaaacagaaagaccagaaagaagttaaagaggagacatgttcaagttcaattaaaccaaattttatgaagcttatgattcatccaacataccgccatgtgtctgcccatagtcccctctccttctagatcatttgctgaaatgacatctcagacacaatcatttgcttcattgtaactaaatacctctttacttcactgctatttataaggtcccttttggattttgtttattaataatcatctagaattcaaataaatgcatatgccactcttgccactcctcttcagcatagtactagaagtcctagccagagcagtcagacaagagaaagaaataaagggcatccaaatcggtaaagaggaagtcaaactgtcagtgtttgccgactatatgatcatttaccttcaaaaccctaaggattcctccagaaagtttctagaactgataaaataattcagcaacatttccagatacaagattaatgtacaaaaatcagtagctcttctgtataccaacaacgaccaagcagagaatcaaattaagaactcaaccccttttacaatagctgcaaaaaataaaataaaataacaacaacaacaacaaaaaacttaggaatatacctaaccaaggagtcgaaagacctctccaaggaaaactaccaaacactgctgaaagaaatcatagatgacacaaacaaatgaaaacacatcccatagtcgtggatgggtacaatcagtattgtgaaaatgaccatactgccaaaggcaatctacaaattcagtgcaatccccatcaaaataacagcatcattcttcacagaattagaaaaaaaattctaaaattaatatggaaccaaaaaggagcctgcacagccaaagcaagactaagcaaaaagaacaaatctggaggcatcacactacctgatttcaaactatactataaggccatagtcaccaaaacagcatggtactggtataaatataggcacatagaccaacagaacagaatagagaacccagaaataaaccaaaatacttacacaaactgatcttcaacaaagcaaacaaaaacatacagtaaagaaaggacacccttttcatcaaatggtgctgggataattggctagccacatgtgggagactgaaattggctcctcatctctcacattatacaaaaaccaactaaagatggtttaaagacttaaacctaagacctgaaactataaaaattctagaagataacattggaaaaaactttctagacattggcttaggcaaggatttcatgaccaggaacccaaaagcaaatgtaataaaaacaaagataaatagctggtacctaatttaaattaaaaagcttttgcacagcaaaaggaacaatcagcacagcaaacaggcaacccatggagtgggataaaatcttcacaatctatacatctgacaaaggactaatatccagaatctacaacaaactcaaatcagtaagaaaaatacaatcccatcaaaaagtgggctaaggacatgaatagacagttctcaaaaggagatatacaaatggtcaacaaacttatgaaaaaatgctaacattatgaatgatcagggaaatgcaaatcaaaaccaccatgtgataccaccttactcttgcaagaatgaccataatcaaaaaaattttaaaaagtacatgtttgcgtggatgtggtgatcaggtaacacttctacactgctgatggggatttaaacaagtacagccactatggaaaagagtgtggagattccttaactaaaagtagaactaccactcgatccagcaatcccattactgggtatctacccagaggaaaaaaagtcattattcaaaaaagatacttgcacatgcatgtttatagcagcacagttcacaccagcacaatcgtggaaccaatccaaatgcccatcactgaatgagtggttaaagaaactgtggtgagtgtgtgtgtgtgtgtgtgtgtgtgtgtatgtatgtatgtatatatgatggaatactactcagtcataaaaatgaatgaattaacagcatttgcagtgacctgaatgagattggagactattattctaagtgaagtaactcaggaatggaaaaccaaacattgtatgttctcactgatatgtgggagataatctatgaggacacacaggcattagaatgatataatggactttgggaacttgtggggaaggttggggggagagagaaaagactacaaatagggtacagtgtatactgcttaggtgatgggtgcaccaaaatctcacaaatcaccactaaagaacttactcatgtaaccaaataccacctttacccccaataacttatggaaaaataaaaaataaatgcatcaggttaatagagaaacatattatttatgtaaattaaaacagattttaagtactacaaatatcttttaataagaaatcagaagtgctcagattaaatataatctcttaacatttttatgagttcccaaataaatgcaatataaacatattgaaaaaaattatccatttctaacatttcagcatccattgccaacacactctctaagattatcgcaaccatctgaatactacattaaatacatgcaaaatactttcctatattcttctcatttagtgtagaaggaattggtatattgaaatgacattcatatcccagcaattaaaataatatgatttagataatgttatttgatgtggtgatataaaccaggactttgcagtgtgatttcatgtatttagaaacattattagccattatctgtttaaatatggcttctgccacattctgggatgcatatatattagaccgttttactgtgttctctatctttttgtgtctccatgcttcattccaggtatttccttctgaatcttaagatttagtaattttctatttacccctgtcaaatttgctgttaaacccatgcacttaattcttatttttcacttactgtatttttaattctagaatttcttttggattatccctaaaatatgttatgtcctttttatggtttacagttctctgcagcgttctcaatcttgtgtctaatctctttcaatatagtccatgtggctgcttaagtcacatttcatatatatacatatacacatacatactttaaaacgtataaacttgtttgtatatacatactgtatatctctatataatactttccctaatataattatacatataaaagtatatacatacacatatgcctctttaatagcctgttttctcaattgcaattgggattaacaatgtatatgtctcacaggtttattataagaattaagaatgataatatttatggggttattactagagttcttgatacatatactaagcatgcgtacatgggtgttctttcagtaaaattagacatgacatgatataatttaaaaatcaaggtcttcggataatgatactattttttttccaaggcaaatgataacactgagagagagtagcctttcagtatcagatacaattggaccctgctcggtttctgcaaataccatctgtatcaccttgggcaatttacttagcttctctgtttttctgtttcctgcccttatctgtttttctgtttcctgaccttataaaacgaattgaacaatatagattttacaggctgatttgtgaatttaatgtaatatgtgtaaggtccctggcatattacacatgtagcaggaatgtatcttcataatcatattaaatatatttttcagattttctaattttgttaatatttgaaactagtaatataattgagtttgctgacaatttaggaaaacatggcaaagtgtgaaacaattaagtgattctcattcttttttcccttttgataaagtttttgacactttgccaccaatgcgctatcaggagaccatgagtgccatcaggacatgggtccagcagtcagaaaccaaactctccatacctcaacttagtgtcaccgactatgaaatcatggagcagagactcggggaattgcaggtctgtgaatatttgaatgtcaaaacaataaagcacgcttatcaagcattcacattgatataacctttaaataatattagaatttaagtcattctgacaagtatggtagtttgcccattgagcaaatgaaaatgagactttacagtattatttatgcatatactctatctatggatatatatgtatgggcatatatacatgctgtttttgaaaacaattgtatgatctatttatgaagtatatttttaatttagcatgcattttcagatgtattgattttgattattagaaaaaccattgttttattccccacctttgcttctttatttgtaactcctgtcacattctcaaactggtgggtaaaatcagtgtacagtcatcccttcgtatccatggggaagtggttccaggaactcctatgaatatcagaattcacagatgttcaagtcctttatatgaatggtgtaatatttgcatataacttatgaacatgctcccatatactttaactcatctctggattacttataatgcctaatacaatgtaaatattatgaaaatatgtgttatactgtattatttaggaagtagtgacaatgaaaaagtcttacatgtttagtacagatgtagttatttttgtcaaatattatctattagtagttgactgaatccactcattcagaatccacaaatatggagggctggctatatttataaaattggtttaaatttaaacattaattttctgtaatgtaatgagacatttgaattctaatagctacatttttttaacatccttctatcaggaaagatatactaatatgggaaatgaaagaaataatttgtaagagattttataatacttttcctactttattttatttttagacggagtttcattcttgttgcccaggctggagtgcagcagtgctatctcggctcactgcaacctacgcctcccgggttcaagtgattctcctgccttagcctcctgagtagctgggattatagtgcgtgccatcacgcctggctaatttttgtatttttaaagtaaagatggggtttcaccatcttggccatgctggtctcaaactcctgacctcagatgatctgcctgcctcagcctcccaaagtgctgggattacaggtgtgagccactgcgcccagcccttttcctacttattataaaatactacattatatgttcaataactttttatttctgaagacatgaaaacgtattagttatatttagaagctgagataatatgtgcattttaagaaaaatgtttaaaaattcaaatttaaactttatcacatagaattttttttggataattaaatatttttttgaagtaatgtattcaaagaaaaatacatttaaacaactttcattatgtattgtcctatttagatatttattctactacaataccaaatggtagctgtttcaccttttttgtttccttttgttgtggtttttaatgcttggcataatgattccaaagtctatctggaaaaatgtgttgcctaatagaactagtaaacttttaaacataagaataaaaatgtgcaagaataagagtggagaaaacacaagaaaaggcagttagatgagcagaagagactatttccactgaaaaagataggaaagaaaataattgttcataaatattattgggaaatgtattaactaactaaaaaaaaagatatgaacatttcccccaaagttacaccaaaataaaaaccacatacaataaaatgttcaaaaaatgtggggaagcccaaattttggaaaatatttaaaataataatgttataaaaatttaggtggagaagcataaaaatcgatggaaacaatcacaaacattgtaaaaacaccagagacaattttaaagaaatatgataccaaggaatctttttttttctgtgagtaaggaagaaagtcttgagtaaggtatcctccaaaaagagacatatatgaataataaacctatgaataattgtaacttaaattgtaaaggaagaagtaaaaaaattacaagatgagaattttttttgcatactaaattgcatacacacaaaagatataagtaccaatttgcaagtggtgaaataaaaattgtctcttactgctggaaatgtaaattcaatatgaattttactgaggttaactcttcagtgcatcctaataacatacaacattaatataatttccatgaaatctgtatctgatggaaataatcagaatacactcaaagatgtaaatggaactggagatagataggatattgattgattgagggatggatggatggattagataggtaggtagatagagataaacataatttacaggagtggaaaactagaaatgaatgtgtagaactaataatggaaattgttgaactagaaaagccattacaatttttgtttttgaaaaaataattatttgacatgggcaaatgctcacactaaaacacctagctcaaagtgtagttatatgctagatattgtctaaataatcagtcataggggaacaatttgaaaaagtgaaataaacttaaaaaagtaaagtaaaaaaacaaattaagtaccaccaaataggcataggatactatgaaactataaaacttagatatttgacaaattttgggttgatataggtcacattataggggaaagaataactgtttatatgtgcatacatgatcatatatttaatatttagctatacatagaacaaattgaaaatttatataaagtactagtagttctggtttttttttccatttttgtcatgagcctttattattttataaagtaaaagtaacattaaagtaaatattgaacaggggaagtctaaagttatgatcctactgtaagaaattacatgtgttatacagaataagtataaataaattttataaattctccacaaaactatccttgaatcccaccataatactacataacagaataacattttttgaaaatatattaagtacatagattgttcaataagtttttctattccatatatcaatattattagctatagttttatgtagagtttactttcctgaaagctcagtataattaatttcaactccattaactgtatcacaaatgcagttattaatatatatacttaattcagtaaaattagatgcaccaaaactttttggctctgtaagatatagttttgagatatatttgacattgttcagaaaaatacatatggagtgttaaataccactaaataatattcaagttactcttaggataatatgtaaaatttaaattaccactagaagtttataactgatagaagatcatctactttgtttacatgtttgaatcatatagatttcaagtacagttaatttcactaaaactcatcaattattattcatcaattagggtaaatgtatttaaaaaattgttttttaggctttacaaagttctctgcaagagcaacaaagtggcctatactatctcagcaccactgtgaaagagatgtcgaagaaagcgccctctgaaattagccggaaatatcaatcagaatttgaagaaattgagggacgctggaagaagctctcctcccagctggttgagcattgtcaaaagctagaggagcaaatgaataaactccgaaaaattcaggtaattcaagattttactttctaccctcatttttatttacttgttttttccctaacgatacactgtaaactgtaaaggtacataagcatttgaccttcagcatctttcaaagttagtgagaagatgaaaagacatgagtcttttacaaaggatggcgatttgcttattccttctaggaaaagaataggagttttctcagtgtttttagaatgaattttctattttcaccattaccaataggaattaaacatgtttttagtttaataattttcaaaaccaatcatccatttagtctggttgtcttttaagatacgggtaatcatttagcttatgactagaaaaaagttatgtatatatacattatacagaggtatattgtaatcattttatatatataatgtatagtatgtatatgattatttcctatattacctttcatttctgctgttttgctacttataaaaagtaggagtcaactatgctgtctatatgtgctattatatataaaatatggtgatatgttcataaaattgcattatatattcatcccattatgtataactccatatatgtatatgtgcagtagaaatgtaggtgtattaatgtcctatgatactcctaagaaattagcagaaatttaatggcttcaaacaacacaaatttattacattactgttctggaggtcagaagttcagaattaatctctgtgggctaaaattaaggtgttagcagaactgtgtctgttttggagactttgaaagagaatgtgtgttattggcatttttagcttccatatatatatgtatatatatacacacacatacatataacatgtatatatgtgtgtatatatatatatatatacgtgtataatggaattatatatcatgtacatatatacatatctaatgtaatatatatcacatatgtaacctgttgtatatgtatattaatgttacatatgtaatatatagtaataacttattttatcaccatatcgaatttgtaattatatgcttaaattttaccacatcaccttcttcctgaaaccaaattcccttgacttaatttgtttgaatagtgccaccatactaataaccactcaagctaaagaaaaacagtaaaccaacaattgcattaaggtctaaaagcctaaaatattcaataaggtaagtaatgtgtcccttgagtggtcaattattgtgacaaatgttaatgctgggaaggaaatgtcgaaaacgttatggtatgatggaaaaacattgcaacaatatgctcctggatttaaatcccagtctagctgcttagtttttgtgcttaccttttacaaaccaaagcactaagcaaacctaaaacattttttaatgcatagcatttctttacttataaacatatgtgtacatgcatacctatgtaaatactgcatgaaaatatctattatttgtcaagaccagtggcctaagagggcacaattacatggctcttgttatcaaggagcccacattctagtgaaggaggaaggtaggtgtattcatttcctatggcactcctaacaaattgccggaaatttaataacttcaagcaacacaaatttattagagttctggaagtcaaaagttcaggattagtctcagtgggctaaaattaaggtgtcagcaggactttgtctgttttggaggctttgcgacagagtctgttttattggcatttttagcttctagaagcattccttgtctcatgtccccatcctccatcttcaaagtcagcagtgtaacatcatctagtgtcaatttctctctccctgtctatctccctctccctctctttctacctctccttctcaccttcctttccctatcctgttccctgtgttgacttccttttaattaggacctttgtgattacattatgccctggtggatgatccagtataatctccccatctcagaatccttaatgtaatcacatctgcaaagtcctttctggtaatatactcacaggtttcagagattagggtgaggacatcttgggggtagcattattcagccttgcatggtaaataaattaaacagtatgggaaaggttgtcacagtaggcaggaaggaaatccaacataaactaggaaaaaggattatgaaatattatcggaacataggttgtctctgctatagattaaataggtagaatttagttagctaataccgagaaagaaagagttcttgagaaagcatagcagcattttcagttaaatgatataagttcaacactgggtagacaatatatatggggattaataaaatattatggttggaaaactggattgagagtagacagtgaatgtccttggatgctatgttttacaatctgagttttaatctagtggtgatgggactgataataataacaataaaaacttaataagaaaaaactgctattggttaaagagggaaataatatgattccacttgtgttttcaaaacattcccaagatgagaggaaggaggagaggagattactggcatcactgtagatcagtaattagaatgaggtgagaccgaggcagatatcaaaacgagccagtgcattaatggagtcactaatgagacctgaacagcccaggcgtagtggctcatgcctataatcccagcactctgggcagctgaggcaggtagatcacgaggtcaagagatcaagaccatgctggccaacatggcgaaaccctgtctctactaaaaacacaaaaattagctgggcatggtagtgcacgcctgtaatcccagctacttgggaggctgaggcaggagaatggcgtgaacctgggaggtggaggctgcagtgagccaagattgtgccacttcactccagcctgggcgacagagcaagactccatctcaaaaaaaaaaaaaaaaaaaaacaaaaaacaaacaaaaaaaaaaagacctgaacaaggacagtgaagatgtgaaataagaacaaatgtagacttgaaagataacagcaaggtgatcgtcttgaagttctcttagataaatagtttaaaaattattattaataatcacattaaaggggaaactttctgtggagcacatattttcaatgtaaatttaagtaaaacagaagaaaataacacatgtagacagcatagttgaatcatactttttagaagtggcaaaacagcagaaaaaaaggtaatacgggaaagaatcatgggtgagagatactggctatttataaatgataaaagatgatgatttttacctgatcattacttcgtactggtcagacaaataaaagcaaaagctctgtctttgaagatgacaaaatattagtccaaaagttcccaactggaaggactatttaaactgtcatctgtagaaaataatttgtgaaagttcgggtttagggaggctataaagacaccattacattgagtttattgttcatagtttgttttatgtactgtaaggacacatttttagtattctcatgagttgttttgtaacttaaaatttctctagagggggatatgatttaatgttctcgagagtaacatcataaaaccacatttggtagtaattttgtatttttaacaatagcagacttcacacaccagtgctcatacagtagaccataaaaatgcagtcttagtaaaaatattctttgcctcaagaactacttagagacatcctttaaacatgggaattgtttttgggcctgtgtttagacataacacaatgatgaattgtgttaaaagtaatcagcacaccagtaatgccttataacgggtctcgtttcagaatcacatacaaaccctgaagaaatggatggctgaagttgatgtttttctgaaggaggaatggcctgcccttggggattcagaaattctaaaaaagcagctgaaacagtgcagagtaagatttttatatgatgcctttaatatgaataattttgtatgaatattatttggttagatcagtgttttacagctggggtggattttgctctcctctccccagtggattttttttaatgtttctagacgtttttgattgtcacagctgggttgggggtggtggttagatgctactggtgtctaataggtagaggagagagatgctgctaaatatcgtacagtccatagaacattcctccagaacaaggaactgcacaatctaaaatgtcactagtgccaatgttgagaaaccctgggttgagtaaatgaggaactgacaaaacattgccttgtactcaacctcatttgataacattattttactataaaatgcagtataatttaaaggtaaagaatcctttgagctacttgttatttcttatgataaattactattcatactgtgttgttctcttcatctataatgcactgtactataatataacacagtatgcattttgaaataatattcattataccattgtcatgcagcaggaagaaaacaatcttgctctttaaggaaatttttttacaatacaagctaaaaaagcaaatccacctcacaaataaccttcacacccattacactgtaaacaatttctgcagtatcctgtgtttgaaaatgaaaatactaacaaagataataaagtatgaagcccatcattttcacacatttttctaaccagaaatattaaatttatttccttttgtttctgatataagtagaatacaaataattccccactggattcatgccataataaccattgaacatttttgcaagactgttaggcagtcatctatatcaatatctctgtatctcagattttaaaagacaaaaatccatatgcaatgccatcagtcccaattttacattttctagctatgtttcatatctaatatgtggcagtaatttttttcagctggcttaaattgatttattttcttagcttttagtcagtgatattcagacaattcagcccagtctaaacagtgtcaatgaaggtgggcagaagataaagaatgaagcagagccagagtttgcttcgagacttgagacagaactcaaagaacttaacactcagtgggatcacatgtgccaacaggtatagacaatctctttcactgtggcttgcctcaacgtacttaactaagatttcctaatgtctcccttcaccgttacttttggttaaggctttgttcctatgtttttgctttaaagcacaattaattctgacaaattaatcttttttctagcatatctaaatattttcatggtatatattttaaatagtacacattcatcttattttgatcctaaaatgactttcttgaacacaactgtcatactaaaaaatgaaatcctattcttagtcattatttccaatccatgttttcttcagaacataaatgtataataataatgggattaagaaaaatttgttacacggagatatttggtacaaaataaaatgcatggctaatatatgtgtatgtagaaataggataaataattataactttcgattaacatttccaagtttggcctcttcgacacatttattatttatttattttattttttgggacagggtctccctctgtcacccaggctggagtgcagtggtgtgaactcggctcactgcagcctcaacctcctgggctcaagcaattctcccatctcagtccccacaagtagctagaagtacaggtgtgtgccaccatgcctggctaattttttgttattttttggtagagacagggtcttgctgtgtttcccaggctggttttgaattcctgggctcaaacaatgctctttccttggcctcccaaaatgctggaattataggtgtgagttaccacacctggctgacatctagttttaaataacaattaagattcagtaaccattaagaatagctgaatttcaaaaaaaaacacacacaaaatgactgtacactcatatttgagtttctcatttttctacagaagaatattttatagatatctctcttatatttaaatattcaattacggatagtaagatatattcaaaaatagtgtatatcaaatacttcttgttcgaaagataaaattttgaactaaagcaatgaatacttttaagttcaccaatacattagtccccgatcatctgcagttttgctttccctggtttcaaatgcttgtggtcaattggaatcctaaaatcggtgagcacagtaaaataagatattttgagagggagaagaagagagataacttgttctattttattagttgttaatctcttactatgcctaatttataaattaaattttataggtatgtatgagtaggaaaaaatctagtgtatatagggttaggtatcatctatggtttcaggcatctattggaggtcttggtatgaacatatcttccaaagatacaagggaactactgtacctttttggaaattaataaggggtttcaatttacgtgttagaggcagttggtctttggttactgctaagtaaactttcaaaatagaaaagaagtaatgtcaaaaggcaaaagctacatttgaaaatgaaaaaaaaaattagaaaagtcaagggaaatcactcagctaatacaatcactgacaagtgttcattggttctgttaattcacagatgagctgtccctgggtcagctagctcacattcttctcctgaagtaagtcagtgctagaagagttgtttaggaaaaaaaaaaaatattacttaaataatagattataccattgatgttttcctggaaggccagtgtgaaaggtatttgttttttgtttgttgaatgttcttaatggatgaataaaaagaacatcaccaatttatgtagagcaaggggaaaacatcagccaaaaaaaaaaagtataaaaccaacaatattactaaaacctcaaggtttttacattttacaggagtacaatttgtaaaggctctctaaaaatgtctttgcttaagaccttatgtctgttatatgtactaagaatttgttgttcaagagatatattttaaacacactcatctgttgcatagcaaaaaagctatagatccaagctatgttctgatctccattttctaatcttagaatattatatgtatctgtgcttttcctacaagtatcactctggccatgttctgactttgtagccaaatgagttaggttgtaaaaggaaggaacaatggcgctcaaggagaagaagaagacgatgcggtaaaaacaaggaagccatatgtgaatattgttaccaattcagcattccagagagaataatggaaatgaagtgtaaatctatgcattacagaaatatctacagacaaaataagtgtgtgatacactcttttgggttaaagataattccttttttgtcaccagatgccaatgtctgcgaaaacataaataatttgaaacaaaattgtccaaatatctgatacatttgaagatgctttcacatcccatgatctaattttgggtatataaaatggttattattttaaattttaaagggtatgtatataagtttaaaaatctagattctagctatttctaaaaaaatgatcagatataagtgagggaataaaatagacattgtagttaccttcacggagataatagtttagtggtgaaaatggaaagtaaataggttaacacattatcacaacaatgtcttgtttgaagtcttgcttacactctgaatgtagcaataagaaccctttaaatgagagtgacaggagcaggaaaactactttctattgggtagtcagtagagtgttttctgaagaggcgaaattaaagctgatacccgagtagtaggaacttgacaatttgttgtgtcaaggaattctgccagaaaatgaagtggagaaaacatctgaggcaagagagggcttagcatgtttgaggagctcaaaggaagccaggagaaaaagagtgggaaaatgagtcagaaaggaatatggaagccacagtgatgatttagtcattatgtcaagtactttggaaagtcatctgacttttaagcataggagtggcatcatttcatttcatttaaaatggttgttttaagtttgctgcatattcctattagaagaagaataaatcaaaagggctgaagtggaagcaggtagggattgcaattgtccaggtagaaaaaaaaaacaggcaggaaaaaggggatatttgtggatattgtagttttctgaggaacctccatgctgttctctacagtgactgtaccatttatattcccactaacagtgtagtgtagttcctttttatctgcatccgtgccaacaattattttttgtctttttggcaatatacatcctagctggggtgaggtgatacctcattgtggttttggtttgcatttatttgatgattaccgatgtggaatttttttttcatatattaattggccatttttttcttcttttggaaataactgttcagattatttgcccatttttgaatcccatcacatccacatatgatatgatgttttatatcataaaatcgttatttttctttttatgatatctgagtttctagcttctgcacagcaaaggaaacagtaaacagaatgaaaagacaatccacagaatgggaaaaaatatttgcaaactactcatccaacagaggattagtatcctcattacatttttgatgaggactttcacacttacatctacccagaagtattattcctatcctaacatgacacattcctttattctttttaacagatcccattagatctggcagtacttgctgaaggagagtgtttgttgatagtctagaggaagaatgagggaagaatcaaagtgttttcagatatatttctgttatgagctacattgtaggtcattgtgattttaaagaaagagtgggtactaagagaagaacaaaatggaatagcttactagagtgactagcggttccatcttagccatatttatttcggagaaaaagacaatcagacatgtatctggaagtcaagtacacttttcaaactgggcatataaacgaggtacataaaaataaagataacatgtatataagatactgtttcttgcctattgagaagatttccccatgctcccatccctaaaatgcttggtcaaattggataattcgtaaactcttagagatggaagagaatctatttttgtttaaaccactttgttgaggtatgactgacataccaaaagctgtacatatttaatttatacaacttgattagtttggggataagcgtatacccatgagacttattaccacattcaagatgataaacttacctatcacctccaaaagtttccttctgccccttaatttatttattttttttgttttgtgataagagctcctaagatctatcctcttggaatatttttaacaatacagtatttttaactataggcccaatgttgtacagtagatctgcagagctaattcatcttgcataactgaagctttgtatcctttgggcatcattttgccattttcccctctctcagcctttggaaaccactattctactctctagttctgtgagtttgactattttagattctagggaatggaaggaaatattcacaaatcatatgtctggcaaatgattaatatccaaaatatataaggaacttctaaaattcaatagcaaaaataaaactgaaaaataacctgattaaaaatgagcacaggacttgaatagtcatttctctaaagaatacgtagaaatgaccaacaggtatatgaaaaggtgcatcactaatcatctgaaaaatgcagttaaaagccacaagaacctcttcatacctgttagggtggctattatcagaacaaaacaaagcaaaagatactaagtgttggcaagaatgtggagaaaagggaattcttttatggtgttggttggaatgtaaattggtgcagccatttgggagaacagtttggaggttcctcaaaaaattacaaatagaattcccatttgattcaccaatcccgcttctggatatatatccaaaggaaataaaatcaggatctcaaggaggtatctgcacccctatgtttacagcagcaatatttacaatagccaagacatggaaacaatctaaatgtatattgtcaaataaataaaacatggtatatgcatataacggaatattatgtagctttaaaaaagaaaattcttccatttgcagcagcatagatgaacttggaggatagtatgctaagtgaaataaaccagacacacgcggtcaaatactggagaatattttttttgtggatggaaaggcacagtgtgtaagaccagaagctctgagatcagatcgcctgggtttaagtctatccacatcataaactgcctgtgtgattctagaaaagttgtttaacctttttgtgcttgagtctcccaatctttaaaatgtgatgatattaatacataattcataagtatataataattaaatgaattcatcttttcaaggtgtatagagcctcatctaacctagattaatcactgtacatgtttgttagatagaaaacaaatagaaacctacatatatagaattataaaacatgtatactttctaagtaaataatatatggttatatattttaattattagtggctttaaatttatagtaaatagttatcaataaatgggatttagaggttacgtggatgtctttctgccagcttgcagatcattgtctttctctgggtcagtatactctttgggtgtagtgatccccagatctctttcgtcagatctctaacagtctgtttttccatctttctgcaaaaaactagcttcttgttttaccgagaaaatataagcaatcagaatagaagttgcagtactcccactgacctgcatataagctcacagactctactttccctttgtttacatagatgaactttctgtgcttttgtctaaggccagcttttccacttacgtacctggatccctttcccttgtctctgcacaaggacattgtaacagctaatgaacagccctctacctcctacatcttctccacgctacatcattcccatcattcccatcagtagagaattattctgtaatatctcctgtcatttaaaagaatcctcaattggacaacaatctctctagcaacctctccattcccgtttccctttacagacattcctttctctccatttcactccttcccttctctcttgatgccaattaagagagctaatcaaactgttatcctcactattctattaaagcagattttgtcagggtcatcagtgaattcgtattactaaatcgctaaattcagttggcttctgtgtcatcattctttcttaattatctcttagttttccctgaccactgtcaatatccttggtggttctattgccctgaccactaaatttgaaagtgttccagggctcagtctgtggactccttttttttttccccctattaccacccactctccgggtcaacttatcaagctccatagttttaaatgtaatctgtaagttgttcctgctgtaagttttttttttttttttttttaacaatctggaccctttctaatgatcctagacctgcatacccatttgcccactcaacacctccacatcaattaataataggcatattaaatctaacatgttaaaacaaaattcctgatgtataccccagtctactaccctagaaatttgcctgttattacaaatggcacctccatctttccacttattcaagccaaatcccacgagattttcttgtctcctatatttctcttacagccgaacatcaaatctatcaccaaatgctgtcgtttttgccttcaaaatttccaggatccaacaatatctcaccatacttgagcacgtgcacacacacacacacatacacacacacacacacacacacacacacacacacacacaaagtatgtatgtgaatgtatagtttttactagaagtcttggctgaattccattagtccctctaatatttttgtagcttcaccaactgccttaaaagattataacagagcagagtttctaagtagaaatttagcagcaggatttcttaatttataaaatagcaaaaatagcagcatgttttcttaagtttattataggttcattgactgcacaaaataacatttataccttttctagtacaattgcaagacatattgttctagatgtgttagggtgaaacatttatttacattgtagtagatcaagtactacatttacctaggtaagtaaagaacctaaaatgaagtattatctatattaggctcaaaatggttgtaaattataaggaaaatcaatgcgatagtgattctacacatatttactattgggcaaagtaccatgaacacttcattttactaaaactgtgcattatatattaatactatgaaaactctgttacttaaaatgtataatgttgtttcaaccagagagaagaataccatcttttgaatagagttactttttaaagtaaaagcactatgtataatgattgtaatactatagagtgccttgtaacaaggtgtatgattttcttttagatgttttaagttttgcatttttctggttaatgagtaatggagtccattgtagaaagttttagttttcaaaaatgcgtgaggctttaaatagcagatgttttctataaccacagacagactcttttgcaacttgcattttacacgtaaaactttatattgagccacttttcatttcagtaaagatgtatttgtgatgcacagtatcccatagtatatatatgtcataatttaatctctcatgaaagcacctttgggtttgttttcaagatgtttggtctttaaagctgaattaaatattgtacatgttagtctctacactttggttggcatgattcactctcaaaaaatggagcagttgactcagattcgtggacattaacatttttatatgttttgccatcttactatctaaaaggttgtattatgttggatatttccctcaacaagtataaaaactttgattttcccacatccctgcccaaaatgggctctttattaattattatttttccctgtcttaacatgtgaaaatgcattaattcacttcgatttgcaatcatttaactataaatggtattagaacatcttttatatacatgtattgccatatattatcttctttgtgaattgccaaactacgttttatgcacttttcgttttttctttttaatttatgagagtttctgtagatacatgattatgaagttcttagaatatttaaaatagtaaaacattatgaaagaacacaaagaataactatttctatgtatgccaataaaattacttttccaactgaaacatattattttaaaaagccttgtttttctccattcacagaaaagcattgtcacacaaacagctgaattatcatcatcgggcaatacgttcattttattaagtatgccaaataaacagacatgtcttattttcacacttatgggaaattgagtgtatctgatccccatgagttattttcttatgcatataagctttttacttctttatcattactatctaagctttctgttatttacatactgatgaaataatataataataatgtttcatcactgtcaataatcgtgttttgtttgtttgttttgtggaaggtctatgccagaaaggaggccttgaagggaggtttggagaaaactgtaagcctccagaaagatctatcagagatgcacgaatggatgacacaagctgaagaagagtatcttgagagagattttgaatataaaactccagatgaattacagaaagcagttgaagagatgaaggtaaaaaaaaaaaaagaaaaactaagtaaaacaaaggaaataaatggaaaaagaaagaaatgcaacaatgcttgaagttgtatacagtctgctctttcctggttctaagagaagaggttgatttttaattaataattttaatttagcttcaagtttaatatacattttaacaaccttaaactgtttaattttaatgcattgtggtcaattatgaaaattgaaaatcacaatttgaaacaattttcccttgaaatcatgtagtattaagagagcagaatcaactcatttcattaactgtctgtagctgatgtaaatgtacgttgaaactgtgcaaaagtattcttgaaaagacaaatttataatgtagtcaacaaactgtgttaatttggtagtttgaaggcatttctgagaatttggaaacactaaatatttgaacccgtagcctttaatatggatagaaaggactgagtttacatgtacttttcttgaaacaataggacaaaatataacattgacttattacgaaggaaactggtatgtagtatgtagtatggatttggaggtgaagcctggacttgaacctacatagtggcatttcgtatggccttgggcaacaatataatagtcaatataatcctctgttttatcatgtttatatcatcatacttcctcacttgaatgtatgaactgttgattgtaactaccatgtgagtaaattgcctaactcagagttggtgctcaattagtagctataatcataattattatttttatgtgctagcaagaacttagagaatgacttgaaatattaatactgtagatctttttttggttcaaggattgtgacaaggaaaaatcaatgtggagccagatacttgagtttaaaacttagttcggccccatgccaactgtataaattggggtgagttacatgagcttactgagccaaattccttcgtttgtgaactgggtatcagaatgtctgctttcagaatcattagagggatgaaatatgaaatttctaacacaatgcctagcacagtataaatgaccatgactcattatttattattttaattgtgaaagggccacatggtaaaaaattatataattaaatggtaattcagaaatatctattatagttaatagcagaaagtaactcacatgaaaactcagatgtttaaatatcgaatctgtcatacggctttagtcaaatgttgaaagtaaatatctaatatactccataaatatgtataaatattatgtgtgtataaaactataatgaagaaaaaattagtataatcatttctagagtattaaaaacacagaattattctaatctagcaatagcatatttatcaactaaaacttattgcatacttactgtgtgccaaacaccctctggctactgaatatagagggtggtgagcaagaccactgccttggaatttacattctagtgttctagcgtgtggtgaggagcaggcaataaatggaaaaataaatgaaatcatgataatttgcctagaagtaaacatggattttgaaatcaagaatgaataatgttcaggcaggatttgagggtggtaggatgctattttagaaaaacttgacttatagagcatttatgaagaattgtatgtaatatgagagaactgaatcataaggaaaagccaaccacttaaaaaaatctttatggaaacacattctattcagagagcatagcttctgcaaagaccctgaagctaattgggaagagaaagaaatctgcctgaaggaaggaaaatgggataaaattacctcagataagtcttaggaggtgggcaaatatctgttaacaaacgggttttgttagagtatcacagtttttattctaaatggacaagaaaaaccattggagtatttcaaaagaccaaaataatttaaaatttgactttggggaggtcacccctgaggaaaactttatcagaatgtgagagctagaaggtactttgaaacttgtgtaattcacacttctctctctgcttatcagaaaactgcaattcccagataggtcaaatgatttagccatagtcacagactttatttgtggtagagcccacaggattgaaggtattttattctatttcatctcttttttcctttcctttcctttcctttcctttcctttcctttcctttcctttcctttcctttcctttcctttcctttcctttcctttccctttccctttccctttccctttccctttccctttcctttcccttccctttccctttccctttccctttccctttccctttccctttccctttccctttccctttcactttcactttcactttcactttcactttccctttccttttcctttcctttcttttccattgtgtgtcactcatatggccttttctcttgtatctcaattcctttctcactgcgtctatttatatatggccactacctcagatccgtaagtagatactatagagtcatttgtgttcagctgctctgattatccctgggttcctttggttcagtgcctcttctggccctcttccctctccctatgagcgatttgcctatgtcaccaacaacccagtcagatctctcttattttcctgtgctctagagtaaactgtctcaaatttttaaaatttgaaaaccatccttgaaatgagtgttccaacaaatttgtctacattgattgacatgttttgataattggtctagctacaaaattggtttagtatgggggtgatagtaaaaagaggtaaactctggaagcctctggcaacaaccactggaagagttggcaggaagatttcatttcttgagttttcagcctgctactcaagacagtttctttaaggcaacttcactacctggaggttagcaatagtaccttgtccagacttctacctgtgctcatttgatagctaatttttctttattgtcagaagatactaacagacctattttgacatctctccctgatactcaaagaagaaatagagacccccccttctgtttatgttctttcctgtgttttacctgaaaatggaagtgctgttttaataacttatttttcccctgaaaaggaaagtttttttgacataaaagaacccagggtacagtttgataaacaacctctgactttaaaacttttatggagatcagcaatcactatatggtaaaactttatactaaaaccctttgaaaaacactctggaaagttattaactggttttatttttttttaatttttactctattataactctagtactagtgcttaccagaacttacacataaagtgagaatagtaaatacacaaataaatttgtataatcactacagcagtgattcctgcatctgaatggacatcagaatcacctggaagtcttgtttaatacacagagtgctgggccctgaccccagaatttctgattcagtgagtcttgggtgaggcctgtagtttttcatttttaacaagtttgagtttgataccaaagaacaagttgcagagtgattccaagggtgctcactttaagaagcacgggtgtgaaatcctagcaatgaaagatggcagagcatatcatagttagattcatggaaagaaacaagagccaccgtttttatgaggatttgtatagaaactgtaccagtcatttagctttctaccttttctcctagtagagaaattcatcatcatcttctttcctcatatgtacctggattaataaattttgctgtttgttcttcgaacctttcccaagatctgagcctcttattaaaccaagaatatatgaagtctaaaaaccatggaaagaagtgttcttcattctacatttttatatagttgcttgggttatttataatgagcataaattgtaattttattcattagactgactacagcatgctccttcttcagctcatggaacatttgagacccgcttaacagaaactatgagaaagagaggatataactctgaggatgatttccttaaactctctgaacctcagttttctaatgtccaatatagaggtaacaaaacacatccgagaaggtttgggtaaagatctaatgaggtagcacttatgacatggctggcacagaacacagtagcacatattaaatgatgaatggtaatcaaacttgttgattatactataattactaaagtcaaaatgcaatttgtgtaaaaacaatctctatgctcagtgatgccaaaaagctgatttatttagaatattgaactaaagatttcaatcaattaaaatcggtgaagttaagcattctatagacaaaacaatttgcattttctgacataatgcatacttttaaggaattgtgggactaaatccaaaggagtagggtgattatgctgacacatacaaaggcattttatagctgaccttatccatatcctgccaataagcccttaccttaaccaccgcattgtatgcaggcccaacttctacattatagaacctgagttcctttacttgagggctttctgtggccactgaatcccacttttgcacttgtgtggtaggcttgcaagtactgggaaattaacatttccccaacagcctttaacaattagggaagatgatacagaaataataccccaatttcttcacccctgaatgggataacccgcaggcatatatttctcagggctttctaacaggattaaactctagtcattaacagtgtttgctgggattaataagtatgcccatatggatgtctcttccctttcttgtctcaattccccattcagctaccagaatttcttttacatggcacacataaataaactacttatatttgaaagctaatgtcaggtttgacccctggaggaacacagactaaagatacagtgtgtatgtgtgtgtgtttctaaaatacatgtacgcatttgaagttaaggagtgtaaatgtctcccaaccgaagaccaccaccaactctcttgtagctgaacaagttgggttcattattttttgcaatgagggagaatacacaacatggaggccagggggtgcgtgtggatgaaaaaaaaaaaaaacattgtaggatttgtgcttgtgttaggggatttgagggagggtttaaaagctttactttggattgcttgtcattagtgtgtagggatagctatatgggtatcgtatcttgtccagaaggagagaagaccagaatgaggctaaagttgcaattaataaagaaacggcgttcgttcatattaaccaggataggagagtgttgggcgttttgtggtttgggtaatgttgatgtttttgtctggattcagacatgattatggaatgatcttgtcatggtcttgatccattatggaaacaaagtggccttttccaatgttgaaattctgtgaaacagtttattttccacttgagaagaccaaggcatagctgggtgtcaggccagcttctgatatcagcagctccttttttggtttctctttctctcatgtgttttcaattctcgaacgaaactttcttttatcaaaatatgttcctaaatatagcatcaaggggacctttctatgttaagtatcctttaacttaaataatgatatttgtgatggtttcaatattattcatccaagtaatttataagtgatttcaattctagactgccaaatattttttaacctagttaatattgaaatatttgtttcttgccttttccaaacaattgtatttatatcaatgtgtatatatttgaccacaaatccatacctccatgcagactacttttcagtctattcttgttacagatctgttgtattcttataataaattatttctttaactttccaatttcaactaaacttaaatttatggaagagactggagttcatattagatttatttttgtaattctcattctaactgggatgttgtgagaaagaaattatatgattcatagaaatgcattttggatgtaaagttattttcatgctattaagagagcattctttatttttcagagagctaaagaagaggcccaacaaaaagaagcgaaagtgaaactccttactgagtctgtaaatagtgtcatagctcaagctccacctgtagcacaagaggccttaaaaaaggaacttgaaactctaaccaccaactaccagtggctctgcactaggctgaatgggaaatgcaagactttggaagtcagttgcttttcttggtctttgtcaatgatatgtcaatacatggtcatatgtgaggcatagtggttaagaacatggataccagtgcaaaacaactttggcttgaattcctcattcaggcacttataagttgtatgactttgggccatttgcttaacttgtgtaaacctgttttcaatctgtcaactagacataatacataattcataagttgttgagaaaattaaatgagctattctctttaaactacttagcctagtactcaatatatgtgagtagctatgcttctaattctcattactattattaggtcataaaatcctataaattttctccagatttatagacaatgatctttattttttcttatttttgtatgtacataaacttatttaagtatctttggggaaaagcattctgtagagaagtatgtttttactacaattgtctttagtaattgccgtgccccatagagttctttgttagacatgttacctaaccagctctatattttttgatggtttgcattatatttatgtattatcacaacttctgctttaacttttatggatgggccttactgtctagattatgcttatctgaatttagataaagaaagcaggtgcctcaaatgatggccatgtaattgcatcaaaaataagctatgacctttcttatgaaaatactgtgccaaggggcacaaaactttatccactacaaatgctgatgctgccagacattgcacatgagttggactttaagcccccttccctcacacagactgagttattttggtgaatatggttaataaagtgttcaggtacctctttacttttgaaaaacattatttagtttgcttcctatgttgagggtttgatatttaaagaaagatacgattcagatcaataataaagtacacctttaaaaatattttaaaatgtatttgtagctaaagtaccccatatattcccaatacagtattatcattttccaattgtaaaatgtgatccgagtttctccattatcagttctaagctcttctttactcatccttattcttttcttttaaatgcaattcactcctcagactcttgaaaagtgccttctatatgtcaggaaatattacagtttctgaggatataatgacgtatcttatgtatcagtgttatgtgagtgctatataaaatataacaaagaatgggaagggaagggatctgatggcactgtacatgtctcaagaaaaccacaattaattcactaacatgttacaatagggagggactttttgtacccaggaaatgctttctgacaatgtttaaataaaacacctactattactttcttatgttcttaatgtccttaaataagcatcattgttccctattattcatgttgttcatttaaatgatactccgtgattcattagaaatttatattggagtacattttccgaagggattttcttaagttttcgtattaataacaaacttttcaagaccaattattggattatttttccatttccttctcatgtataataacatttctaacattccctattcatattgaagttatcaaattattgagttccattttagtcctttttcactggtttggaatatgtactttattttatcttataaatatttctctatacctctctaacaataatatggtggaaacattagcatagtttaactctgaacctacctcttccgttttccgcgttattgttgcctcatatttcattttcaccttatttcccccaaattagtccatataattgctgttgctgctgctgttgttttaactatttcatataatatttatttagatttaccgatgctattttcccagtttttgtgatcagttttgccttttgttcttccctttgcttctgtgttcagtttctttcttgctctttccttgagtgtgagtagcaaatgtgttcagattttacatattgaaaatgcctttattttgccctgagtattggataatgatgcagttgagcaggaaattatgtaaggacaggtttttttttttcctacaacactgaaaatattatttgtcttttgaaattttttgcctttaggaaatctgctgtcaagttattgtttctttatcattttctctggtacctttaaattttctcttcgtcctgtctgctctgcagtttcaccctattttgtcttctacagtttcactcaactttgtctgtgtgtaaatttgctttcatttatactttgtcacctggtgtgttaattagaacagatacgttatttctttagtggttctgcattgtctttgtgaagattttctttttcccaatctcttcattccttcctaagggaaaactttcttagagctattaagactatccccttcttatattccagttactggtttccctttaatattttctatattcttatctctatctgctcaattttggatacttttctaaaatctgtcttccaactctcaaattctcgcttcagctgcctgtggcgtaatttatccttcaatagagaaatagtctcatctttgtctgtatatatatttatctctctacatttatgtatgtgtgtttatattttttcaaaaaacatattttccatttctcaatattttattgagttgtttcacaaatctgttctttgttatggttttcttcttttttgtgattaattctatgtattcctttaaacaacttaaacagataccatctgtttgactgaaatgtttcaacttaatgagtaataaacatgacaccgtcttatttttccaataactacacccaactctgtcaaatttcaccttctgcctggtagttggcttctttaacaatatttctctgggatctcattactttttattcacttttagttattaaaatgtactctaatttaaatttaaatatcataacttaatcaaatatttcacaagtttagattaatctgttgcttcagcaatttatacagacgcaggagtgagaataaatggtctcacagtctcctcctccatcccagtttctggatacagatctactgtcgatataagggagggtgaagagggaaaaatactctcttcatgtgaaagtcctttttttgctgctcacaactgctgttcccttttgttaaaacccacacacatctataatgcctagtctgttgtccctcttctatatattatcaccactgacctggctcgttctctatagacttgattcgctctgttgaggatccagattggccttattcatatgagctttgaaccccccaaaaaagatctcctaggcttttatagtacctcgtagtgtttaacaagaatttcaagctgacgcttgtcaacagctttacacaaactgctcttgaatattatgtctttttaaccaatgctttagtgatgccctggagtctaatttacctaccatatctcaactcagagcctatgggcactggaagtacctatactccgtacctttcaggaatgagaagtttgaaagagttgtttttgattccttcttggccataccaacagctcaacaggaaatgaataccaaccaccccttcctgaatatatccacccagtagatgagtggttttgttttagatcctgtaaataaaatgattcagatgagtttaccctacctatccccataaaagggtgagaaagaagaattgcctaactattcaaactctcttcacctcactcccctcaagtctccgtcagctctctctgtttaaaccagggcttgtgaaaacaagaaagagatgatctcccaaaatgaaatgtaggcaaccaagccctttttcttaggtgtgaattccacttgccagtctcaagcaaataaactctatgggaaacatacaccatgaggctaggcatatttattgtacagttctccaaaattgttctattatctttatgtcataaggtatggattctaccatttgttacaactaatgactccctctaatggaagtgaatttccccatgtggctagtaaggtttttgtttgtttatttgtttatttgcgagctcatctataataggaattgcctttactggaatttttgtctttttttttctctgggctattgagtttttgtattgttgccatcaggattgtagagattttatgctctgccctcatgtgtgatacaagcttaagtttccgtttgttatgggtggatctttatttttcagcccaaaatcccccaacaatagtttccttgctaaatcataatattccaatggctagggatgttctacttcttccttacagggtggatggcacactgcttcattctttcccatttccctggcttgcctcatttcccatctcaagttagtgttaaatgccccagctttgatgtcgtataccctgttctgatacgccagtatttttataagcttgattttccactttctactttcatttccctctttttctttctcacacctgaggttctatatacatgttttacagatcagctatgaattaaaaatgtttcctttgtattttaacatgtattttggtataactgaagcaggatatgttgggagttacctcatcagctccatctactattttgaacagaagtttagttttttatttgtactttccttcaaagccactttggattctgtgatttcaaagtaattttaagatccaaactgttaagcttaacagttattctaagtggcttttagctccaattcgggcttcaagactatattttattttgcaaaggtgacctgtaaagctggtacattcagcctctccagctgtgtccttcagatgcattgaggacagaagaagctatccattctgacagttaaatcagcaaggtagttcattacctcaatctgcaccaaagttaataagacacattaccaatcacgtctccttgtcttcaaagctctaaggtaccctcgggtatttaagaagatatttatattttcccactgggatctttgcccagaatgaagacagcctgtagtccagcaggagctggaaatgacccagattttagatttctatcaccttttaaagcaaaacacttaatttcactttttgcaataaactgtacataagatatcaagcaggtatgaaaggttggtacgtttgccaagcaggtgagactgatacttttcatcagatagagatcgaatactctgtgtcattctaagggctatgaacatagagaactttgggaaatctgattaattttttagatccttctgaaataaatcttcctttcaagcctttaattttggtggtagtgaggcgggggcaggtggtagtaagtggtgatgattgctgcattgtgtttactgtacttataggttcattcaacagttacaaagctaacagaaaatgaccgttgttacattcttatcctctctcgcatcttcctatcttttccccaatagacataatcaccatctagaaagctacctttgttattcctttgtttaaaaaaaatccacacacatatgagtgaaaaaacaattgtgcttaatttcagtattacagtaatggtaaactataatatagtttttttagggctttgtctttcacccaacatatttgtgtctgagattcattcttatggttctttttgatgagatttttcattgtcacgtctgtattctctgtttaaagatgacggtatatttttccattctccttgcagtggacattatttccttttttttgattactacaaaaagggctgaaatgatcattgttgtaacagtcttgttatccatgttaaacagtttctctgaggatgcacatatcaaaaagtggagttgttgtcttgatgggtatgtgaatgttcaccttattgagaataacaaattgttttctgaaatggccatttcagtacacacacccaccaacaataaatacaaatttttgttcatgtatatcttctctcacacgtggaattgtcaaacttctcatttgtgtcaatcaacatggtatctcattgtaatcctggcctacatgtccttgattactaatgagattgaacatatcttcatgtttaatgtatatacatatttctctttaagattttggttcaggttttcttttcattatcgattgggttattcatcttctatttgacttgctggcatttttcatattcttatgtgttacagatgttgcagttgttttcttctattttgagtctgtttttcaattacttgatggtgtcctttgatgaatagaaggtcctaattttaatgtagtcgaatgtattcatctcttttttcttacggtcagttttttacgagatgtcttacttaagatattcttctctatgccaaagtcagaaatattttcttctatattttcttgtagaaattttaaagttctgcttttttatgagtacttctgtgtataaatcagtttcataatacaaattaatggccatttaaaataatcaaacctttgaattagtggtaatatttccgataatatacctcaaggaaataataagaatgtggaaaaatagtccatattcacgatgatgtttaccataaatttataatagcaaacaaaactaaaagtagtctatctaaaaaaaggaaattgctaaactaagatagagccactttaaagaagtcttagattttcattaaaaatatgtcttcttagtaatacagaaaatggtatgatataatgtttagtgaaaagagagctatagttaaactcacttaaattttaactatcaaattatatatgataaatttcagaggaggtcacagaatactggtaacagtgatgtgtgagggagttagatttacatatgcatttttacatatgcttttatttttctgtttcccagactgcaatgttggtgcttatttttattttaaaaagtaaattactgtcttttgaatttattcattattcatgtaataaaatgttttcttaatgacttttgattgtagaggtattagatgatgaaactgtctagctgcattttgaattacctgctacaaagtaaaggtgaaaaatacaaagtgttatattttcagaagttttaataatgaaatggcaaaatttcacatttacttttctaccataatatttaatctgtgatatatatttctttcttaggaagtttgggcatgttggcatgagttattgtcatacttggagaaagcaaacaagtggctaaatgaagtagaatttaaacttaaaaccactgaaaacattcctggcggagctgaggaaatctctgaggtgctagatgtaagttgtaaattaagccaaatgatgataatttatatgcagtattaaaagaggtcaagtaccaaatagaagacaaatccaaagaaaacaacccaagagagtataattactatgttatcactcagcactggtactttggataaagcctttgttccccctaataaccttctaggtcacaagattttgcaaagggtttaaatggcttctcacagaggaaatttgcctttattatatcactaagttctacatagatgcttcacctaattaaatgtaccacaaacctgcaaagacagtgtgaataaacaaactcactgctttagggctaatcgggatgataatatgaaatattatttccagtttaaaagctgcacgtattgaattggaacctattttatacttacttaaaatcacaaatttacaccttacggaatgttttgagttattaaatggatatgctttaatattggaaatatatctttaaagtattcataaaatgtaagtacatttttaagttttactttggagactttcaataattaaatgagtttgcatttataaacttgactttaacttctgacatttaatcattcaagctctatgcattttagtgtacttttgacttatctatatgtaatgaatatgttgttttagaatatgtaatatatgtacgtaaagctataagtagtatagcccctctgtaaatctataaaataaggagcataaattattcaagatgtgaagaaaatgtaaggtatttctttagacagaatagaatttgtaatcctagaacatcagagtagacacctatagatcattttatccaacttcctaattttcaaaaggaaattataaaacctgaaaagatattaaagtacaatgaagtagatctccagtggactttaattttggctctatctgactatgactataaatttgtcgtattcagagaagttaattgaccaaacatttcttgtgaatcagcaatgtgttacatgttctagaaaagttgcagcaaatttacagcacattaataaaaggacagtggccagaacagaagataggatgatgctgttagcctatgaaattgtcaaatcgtacatggagcaccatgctaaattcttgctctcacagtttcagtgatgtgctgaaaaactagggcatgttcacaaaggaatgttaaggaaagagagaaaatttgaagccataatgaagagcatttagaaaagatggggaaacaaaacttaccattactatttactattttagacgaggccctcacaatgcccacaacacagacaagcagggaggaggaaaattgcgagtgctcttatcttttatttctatgttgtggtcataatttcaaattgttcctaattcagataatggagccaataaatgaaattccacagtgaaaaaataaataaatacatacataaaattggctctttggtagtgttgctgatgcttatccaggaggacattttgagtgaaaagggctagatcaccacgtatcaaggatagaaaaactgcacgacttctaggttttcttgcaactcaagatatttataactgatcccttaattttgctttgttgcttttcatccacctttaaaaaaatttaacaaggtatatactttgttaagacttataaaataatgtatccattaaaattatttatatccattttgcaaataaatatttacaaaattaagatttgttagaagtaataaggaatataaattattaggaaaattattaacaatcacattgttctactcaaaaatttgatggcttttaaagtattttacaggttatagtgattttttttaatataaatgtatttaggaagtctctttattttcttgaaacttaataggacaatgtattgagtttgctcaaaattcaagaaaaatacataaacaggaaaaattacaaatatgtattggaagattttcatttttttaaaacaaggaaaacagaagatttaataaatttgtgagaacatatgcccatcacttattttatagatatgtttgaggtccagtaagatgaaattgaatcccttgttttctggcatgcctatgacactgagattcactttcatcatattatctagccaggcaactttgtcaattttgagcagtataggagatgggtattattgggatgtacgtaacagagaatcagacaacggtttaagctcacaaaatgatcttttctcaccacgaaaagaatagtgaagggaggttactcagggttgaggatggttcagccatattatgaggcgagtaggcactctctgctctctcttcctgagcatgaaggacctcacactcaaagtcattgcctcccagtgcaaagatgattgttatacctccaggccatgtatgtgcaaaaaagtaggaagggcaaaaggattcttcttgagagagtactctttttcagaattgtgtcacgtggacaccactagctatcagagaagttgagaaatttagtgttttacctcttctggttttagagttaggggacgtcaaggaaaaaggtggttgtgaatcaagttttaagttctcagtccgcaacactgtcataatcccatgaagattcatatagaatgacatcctattttttgaagcaaaaatgctccttggtgtttttaatcccaattaaaatttgctttaaattgattatgacttaattatatgtaaatcagaagatactgagcatttgctgataatccaatgtatttagaaaaaaaaggagaaatagtaattattgcaaatgtgtttcagtcacttgaaaatttgatgcgacattcagaggataacccaaatcagattcgcatattggcacagaccctaacagatggcggagtcatggatgagctaatcaatgaggaacttgagacatttaattctcgttggagggaactacatgaagaggtatgaagataagtgaaaaatctctttaatctaatttgcattaatgtatagcagatacaggcctctcagataaaatgagcaatagtttaaatattagctcagctttcaggtttcagagacaatccaatgccagacactgggtaaattctttacatgtgtattatagcatgtgatttcacaaaaacattgtaagttaggattcttaaaaggcaactgagacatcccaagaaggttactctgaccacagagttcttttccttactcaagatagaccagtatgtgtgggtatcctttctctctcgctgtctcattttattcctctccctccattccacacacatttgttatgtcacatgtaatctgctaataatacatgcaattctgttagtaccccatattatttattcttcataaataacactacatttcttatagataaattttcatatatcacacatggtgtgatttttcaaatcaaaactaaaacaaaatagcaaatttctcctagtcagtgttttgcatactatctcctaagaatggattatttgtcaagaagaaaacccattttataatgatgtttagttttatattcacttactgagtacatctactacatgtgagatatggttctatggtttgatgagtaggaaaaatttgctaaccttcataacttaaaaacattggttagttaaggaagagttactgatttcctagaatgtgcaagacataaaaacaaataatataacgtatgaagagaaaaaagagaataagggggggtagtaactagggtagtatgcatgaaaccattgactaatgacttattgaatagtcaatgtcggggaccttttgacatgcttacagattgaaaaggaacgccttgagtaggaaaacctcttctctatccaattctgaagagaagtatgtgagggtagggcagatatctgcaaatgtaccagcagcacctccagtcttgaatcctgggtggcatatccatattttatccaaatcaacataaggaattggggattggaaaaggggaattccaaacaatctctggtccttcatcattgttgcactattgctggatctgagtcaaatagatattgctatgtggcaagtaaattgaagatcatttcaatgtgggttgtgatatggaattggaatgtgtttttatttctatttgaatatcagtgtcaggtaggagacagcagttgcatcaaaaaattaaaagtcattgtgaaactgaccttggcttagctgtgaaaagactcaaatttttttttttttaaagacagggtcttgctctgtccctgagactggagtgcagtggcatgatcgtggctcactgtagcctcgacctccctgggctcaggtgatcttcccacctcagcctcctgagtagctgggactacaggtgcatgctgccactcccggttatttgtgtgtgtgtgtgtggaaatgttgttttgccatgttgtccaggctggtcttgaactcccgggctcaagctatccacttgccttggcctcccaaagtgctgggagatacacctggccaagatccaacttcagtgtttgacatttttcagtactcatctattctgtccttaggaatagcttactctctaacttgatcttggtattaactctattaatgtaattatattgcaatcctttattaacacaaaactacttataaccttctattttaaaggtttttggtataaaccctgacatttcccccaaagaaaaaataattcatttcagcaacataccctgattcaacacgtattatcttattttctggactgagtttttaaagcataaacttttgaataagaaaatacttgaaacttgggctagaataacaccttgtattagtagtcagggtccagacagggcacagaaaccactcagtcacttaaacagagatggtttaacacaaataagtattaactacttactggaaattaatttttaataggaaataaaagagatctctaaagaataccttaagcctgaggaatagtacacaaacaaggaactaatatggaaagataggagctcaacccaaggctggattcaaacttctttagaaagtgtgtgtctgcctcccatgggatgacagagaagtttccttcattgacccaatccagaacaagtctatagccagtgagctgaagctagtgtgaagagaatattggaggggaatgctgacaaaattcacagggaagtagcctatggtggggaaccattgaatttgctagaaagctgtctggtgtattcattggacatggtgggaaactacctgtagtggatgctactaaacttgaggaaatgaggtggggctccaggaagctgcctatggatttgccacccatcctcaatttgcttattgggtacccatagaacttgtcaaacacgacccatagtgttgctgaaagtcttctgggtaaagtggggtggatgaggtgagccttactgggcattccataggccagcccagagtcacaggtttgaaaaagaattaaaagcacactgggacagacaaacctctacctcccccattgtcactccagcatcctttactgacagaacttaatatcatgtcagctggcaaggggagaaatgttcccgtgtcaaaaacaggatcatgttgaaaggcaaaaaattgataactggcaaatccctctgtaattcactggctatgtgattttgagtaacagttttaaacttacgtttcctcatcctgtttcatagggggttttttttgtgagcaaaatataaaatacggcacttaaagtactatggttccaggaacacagtacatattcaataaattattcaataaatttaatacatgatcagcctttttattttgactagatgatattctagagtatcagccctcaaaaattgtgtgtgtgtgtttgtatgggtgtaaatatatatatatatatatatatgtaagtatatattaaaatatgtaaatatatatttaaaaatatgtaaatatacatatatatatatcccactgagggcagtgattggtaaataaatgcagatagtgcaatatgaaatataatgaaatgcacatgcctccattagttaaataaaatgtgaagacagataaaaaggatttttatcaccctctaagtcttaaaatcagaagctctccacttgtacctcaatgattaagcagagtgttaaaataacaataaatctaaaataagtaaacttgaaactattatcagtcctagctgtgtttatattacatatttggccagtaataacctgggagttatttgacaatgaaaataaagcatatttagtttttacggctttcatgaaaaccacatcatgttaaacataatatccttctcaaattctgttgtatcagcctgtgataagctgattagacctgaaagatacaatgttaaattaaaacaatgtgtagtaataggacttttgtatttctcaggctttgctcagcactttgatcaatttcaaactacttaggtaaaaaagacacacctaataatttattagctaaatcaatcctttggatatttccactatctagttaaaaagactgttgtttcgatgcagtagaataagccttgggataaattatctgagaggctgaagaaacaaaatgattacagtaactgagtttttaaatcaatttaaaaaattcttgttgtacattaatgtgttataatcaagaattctgaatttgttttaggccatgattctcttgatttttggttggttaaacaaaaaagtttttattttgtggttattttctatttttattttattttatttttttgagacagagtctctccctgaagcccaggctggagtgcaatggcacgatcttggctcactgcaacctctgcctcctgggttcaagcaattctcctgcctcagccagatttgctattaataaacaaagtgccttttaatttgaagatgagccttaacctattttttaaaatcaattaagtgcctatgtcagaggtttgtgaggtttttatatcacctacctaatgtttcttatagctgcaattatgcagaactaaggtaacattcaattgcctgttaaatcagtcaaacagccagacttttattgcctatgaatatttaaaagagatttgctagatcccatccctaatttcagagtgtgagtttgcattcaaataagtaataaattatttccatcacttcaaaaggcatctttcattcttgataatcatatagcactatattttctactcacagtaatgatttgaaagatggttagcaaaccaggcaacatctccaacagacgtaccaaatcatatcatttttacaactattgtaatagctttattctctaacagggtaaccaagcagcagaagatgatttagtaatacaacaaaatgaataataatattggtaatagtatttggttacagaggctcaggtacccttttaattgtcagatatgcattttctcatttagttctcacaatagccttatgatacatggtggtttttgtttttgttttttctttttttgagatggagtctttccctgttgcccaggctagagtacaagggtgcaatctcagctcactgcaacctcctcctcccgggttcaagcgattatcttgcctcagcctcccgagtagctgggattactggcacatgccactacgccaggctaatttttgtatttttagtagagatggagcttcaccatgttggccaggctggcctcaaacacctgacctcaggttatccgcccgcctcggcctcccaaagtgcttgaattacaggcgtgagccaccgcatccggccgatatatggtttttcatattcccattctacagaaattgaaaggatattaaaggccctaggaaaaagctattgagcatttagacccatctctttacacttgaagcctaggcacgtgaccatttggctacactacctccaatctctgtgacccttttcatatattaaaaataaaaactctgctaataagtgaatatggcaattaacgagtttccccgtttttaaggaaagcttaaaacatggccttaaaagtattatggctgactaattaaaataaaatttagagtcttaaatattaaagtcacacattgagaagtccaaagcctttaccacttctcttgatgagtgattatttcacctctttcgtggcttattaatgcccgtatttcagtccctttcaaagatgtctgtaagttgttatgcctgacatgaaatagcaaatttactgaaagggacaaaatctaaattggttaattcttctgtaatagtaacatttatgatagactcagagagggccgtattaatttttcctggtaattatgactttgaatttttccctcagtgtcacatctaccttagcatagatagaccagaacggaagaacattgcttgaaggaagactataaagtaatctaggaaaataagtggcatattatgctttattaatttgtcaatatgttttgtagacaatatctgtctataataatagtaaaagccattactttttgagcacagttttacgtcagtccttttgctaagccgttagaagcaacatcaaacttaaatcccacatttgctttatgaaatagatttgattagcttacttcacagttgttgtgatagggctgacttctgttctcaagggctaggacagctaagtcttctgtaatgccctctggaaagcactaggatgctggaaaatgtctagtagttgtattttatgttgctttcaaagaagtataagtaaacctttaaaggctaggaaaaaaatcagatgaaactgaagtcatgccgtaacatgcctatgaccactgacatttgtatggtggagataaaagctaagactgggaaccccaattttaggtgaattaagtcatttgatggaaaagaaatatgatcctctggctcacgaaaatggtggagctaaacacagattccacataaaactggggttctatcagtaagataatgggcagagagaattctatctgcagagagaacaaacataaaaagacatctgtcttctcactgtgagtgcaaagtaatagaataattataataatgtcacctgaaaatgtgtgttggcctattcttgtaaggtgaggaactcttgagtgtatattatcacaaagggtaaagaaatatccaaacaagtgattaagtcagggtagcaccaggttaggagcgtcctagcattagttagaagcaaatgcaaattgtttaccatgaaaagtgccctcagtgtcctcacagattaaactcaggggaacttgagctcatcataaacacatagacatacacacactcactcacacgcacaagaaaagccctcatgaagcacagtcagcctatacaacgaacggtgagtttacttctagaattccggatattagaattgcaagatgtatagtataaaataaataggtaaaatattatagaaataaatgttattgaagttataaaaaagaaaacattgtaaaaatggaataaagaaatcaaaattaaacaactacaattaaaaattagaaaatgaatatatcatatataaacatattagttgaaagaaatgatttaaaagaaaactaaaagagaatgtacagactgtgttaccaaaaactaaggaggtggaagatgtgaacaataggtaatagatacaggggtggggagtagaatatgaacatataacttatctcaatgggagttttcaaagaggagaataaagaaaatggagattattattattcaatataaaaaaattatataacccaatttaaaaatgagcagttgagctcaaaaggcatttcttcaatgaagacctacatatggccaacatatatatgaaaaggtgctcaaactcattaatcatcagggctatgtaaatcaaaaccacaatgatatatgtcttcacatctgttagaatggcagttacttaaaaagaaaatcaagagatgacaagtttggcaagaatgtggagaaaagggccccttgtaccctgatggcaggaatgttaattcatgctgacactatggaaaacagtatggagattcctcaaaaaaaaaattaaaaatagaattactatatgatccagcaattccacttctagggatatatccaaaggaaattgaatgagaatcacaaggagattatctgcactctattgtttattgcagcattatttacaatagcaaagatatagagacaacctaaatgtccattgacaggtgaaaggaaaaagaaaatgtgatatatacatacaatgaaatattattcagcccttaaaaaataagcaaatcctaccatttcgctgtaacaacatggataaacctggaggacattatgctacatgaagtaagccagacatagaaagacaaataatacatgatcccaatcatattatgaatctaatacagtcaaactaatggaaggagaatgtggaatgcttcctgccaggggctaggggaagggaaaaatggagagatatttgtaaaagggtacaatgtttaggttatacaatatagataattcctagagatctactgtaaagcatattgcctatagttagtctatttacttaaactttgctaagaggatagaccttatgttaagtgttctgttacagaataataataatattagaataggaggaaagttttggagatgatgaataggtttatgtcatagattgaggtaatgtttttatcagtgtatatttatctccaaactcagcaacttgtgtatgttaattatatacagctttcttgtatgtcataatttttttgagaaatggagatggagtaatatatgaaggatattaaaggaaagtttccaagagccagtgacataaaccacttaaacagaaagcacattatataacaggcaaagtaaataaatagaaatccaatctcagacatatcacagtgaaagtgcagaaatccaaagacaaatttatattagcagctagaggtgagatggataacctacaaagcaattaaatttaggctgtcattagacttcttatctacaacaatgaataagaataaaaaagcaatggaaaatattttcaagatattgaaaaaattaccgtcaacctagaattctgaactcaacaaaattagttcttcagagtaagaggaaattagacattatcagagtgaaaaaaaagtgaaattttaccccaatagacccttactataaaaatgtctaaaataagtatgaagaattagaagtagtagaaaaataagttttaaaggttttagatgcaataagtatgatgaaaaaatagttaagcttttaaatacaaaaggcatttgttgcaaaaaatatataagaatatctaatttcatttaaaataatgttgatctaaaatactagattaaaaacaatatggaggggagttacagccacaagcccttttatttagaaagagggtagagatagtgattaaatgtcgactttatgctgtaataaattgtcaaggataaccactaatggagcatccacctgggaaacaatcaaagaatgataaaaggaacagttctcaatcagtacgcagtaaagcaagaaagaaggaaaacaaaacagaaaaatgtgagatgagcataaaataaaagaaaagatggtagaaaaatagaaatagaaaaaaatagatggtagaaaaataccagcggccgggcgtggtagctcatgccttaatcccagcactttgggaggccaaggcaggcagaccaggctgccaacaaggtgatacctggtctctaccacaaatacaaaaaaaaaaaaaaaaaaaaaaaacccaaaaaaaagtatccaggcttggtggtgggtgcctataatcccaactactcgggaggctgagacaggagaatcacttgaacccagggaacggaagttgcagtgagctgagatcatgccatttcactccagactgggtgaaagagcaaaactctgcctcaaaaaaaaaaaaaaaaaaggaaagaaaagaaaaagaaaaaaaaaatacatctgtagtcctagaactatttgctcaatacatttaatatataaatgtagaaattttcagaataaagcatcaaaattcaaaatacattgtttttaagaaatacataaagacacatatatcgaaaatggaaacagattttccgaaaaggattaatcaataaaaagcttagacacctaatttatttccagcaaaatagacattatggtcattatcattattaggcaaaaaatggagtaaaatataacagttctaaaacttgtacatacctggccgggcatggtggctcacgcctctaatcccagcactttgagaggccgaggtgggtggctcacctgaggtcaggagttcgagaccaatctgggcagcatggtgaaaccccgtctctgctaaaaatacaaaaattaaccagctgtggtggtgcacgcctgtagtcccagctgcttgggaggctgaggtgggagaattgcttgaatctgggaggcagaggttgcagtgagctgagattgcagtctccactccagcctgggttacggagtgagactctgtcaaaagaaacaaaaaaatctcgtacatacctgggaaaatacctttaaaacacgtaaagcaaaaatccacagaataacaagaagaaatacacaactatatcagcatggtgggagatttcataatgcctctttctttcaagacaccagacaaaagttagtgaagatagtgatgattaacagttgataaggtggatataaagactgtatagagaaccccaaatcagagtgtaaatttcatctgaagtacatggaaatgtcaatacatttcacatatttggtattattagggaaatactcttaaatttgtaacaagctagaatcaatagtaaaaacttgactaaagtaaataatttgtggatcaaagatgaattcaaaatggatggttaaaattcatagaaccgagtgataataaaaataaaaattaaaactaattggttcctgttaatttttgtagaagagacggaagggctgaaaactagtgagctaactgcccatctcaagaaaatagggaaaagtataataaatgcagagaaagtaaatggaaagagaagaattcaagagcagaaataaataaaaacaacatggaatcaataaaatttaaatgcccatattcatgttttaattagacaaatcaactgagagggaagtaaaaacaaatataaaatcttaaggatgaaaatgttataactacagttataatatatttttaaaatacagaaaatactaaaagctatgcaaataagtttagaaacttacatgaaatggatgaatttctaggagaatattgctacaaaaatgatggaaggggatatagaaagcctgaggagacagaaatttaatcacaaattaaaagtcttcctacaaagactatattagactgaaattattttacattcaaatttgaacacactttctaggaatagataattccagtcatcaacaaactcagtagaacatacaaggcaatatacatgtctggaaaatataaggttagaaaatttttttttttttttaccaaaatcagacaaaaatgaaacaggaaggaaaaccccatgccaatttcagtcataaattaataaggaaaagttctgaaacaaattattggccaactggatccaagtgtgtatgaaacagtgtttaagcttaatgttctccctttcctttctatattcactctttataatactttatgcagtgtcatggctttaaataaaatttacatgctaattattcccaaaatattatctctggcacagacttttgcccttaacttcagaccatatatccagccttctattgtgtatttttctctttggatatctcataggctactcaaacttaacatactcagatgacagctcctatcaaagctacccaacaccgttttctccacctctgttaatgccatctcattcctgaaatttctcataccaaaacttttaaaatgaactttgattcttgtctttctttaccagcctttctcttagcagatctgaaagatggtctcaacagatctagctgttgttttacttttatgttctgggtatatatgcaggtttgttatacaggtaaacagtgtgtcatggggggttggtgtacagattatttcatcacccaggtaataagcatactacctgataggtattttttctgatcctccccttcctcccattctctatcctcaagtaggacccagtgtctgttccctcattgtgtccatgtattctcattatttagctcccacttataagtgagaacatgtgatatttagttgtctgttcctgcattagtttgctaagtagaatggtctccagctccctccatgttcctgcaaaggacacgaactccttctttttgtggctgcgtagtgttccatggtgtatatgcaccacattttctttatctagtctaccatggagggcatttaggttgattctgtatctttgctattgtgaatagtgttgcaatgaacatatgtgtgcatgtgtctttgtggtagaacaatttgtattcctttggctatacacccggtaatggggttgctgtgttctgtttttagctctgccaaactgctttccacaagggctcaactaatttacacccccaccagcagtgtataaatgttctgttttctctgccatcccaacagcatctgttattttttgacattttaataatagccattttgactggtgcgagatggcatcttatcgtggttttaatgtgcacttctctaatggttggtgatattgagcattttttttcatattgttggccacatgtgtgtcgtcttgtgaaaaatgtgtgttcatgtcctttgcccatttttaatggagtagagtttttaaaataaatttgtttaagttacttagagattctggatgttaaacctttatcagattcacagtttgcaaaatatttctcccgttctgtagtttgtctgtttactctgttgacagagttcaacagaggaactctgtgaggaagttgtgtaatttaattaggtctcatttgtcagtgtttgcttttgttgcaattgcttttgacatcatcattacatcttttcccattcctatgtccaggatggtattgcctaggttatcctccagggtttttaaagttttgctttgacattttaagtctttcattcatcttgagttgatttttgtatatggtgtaaggttttattcttctgtatacggttagccagttatcccagcaccatttatggaatagggagtcctttcctcattgcttgcttttgtcggctttgtcgaagatcagaagggtataggtgtgtggcattatttctgggctttccattctgtttcattggtctatgtgactgtttttgtaccagtactgtgttgttttggttactgtagcactgtagtatagtttgaagtcagctaacatgatgcctccactagctgtatttctttgctccttctctcattaaatatagtctctgtgttccaaagtgaggaggaacaactgtgagattaagatttggtaaaagagaaaatgagcagggcaaatagagacaataaatctgtgatgatgaaaaaatgagaaagaaaggccagtaactgaaattgaatagtaatagggcagaaaagatgtgttgttgattttcaggataataaaaatttaagcatgtttgtagtataagggaagatccaatagaaagacataatatataagagcaaagtcttacaagataggatacacgagcaaaaaaaatggaaggattgactttggaagtgggaaagagaaaattgagataatacaaggaggttctgaggtggagagtagtaagtttgagaaagtttatccaccaaggataaatttatccctgagaagtaggtaactctgttttcaggttgtttaggactctgcacggtaaagggggttgggagaaaggagaactggtgtcattgaggaaatgagagtgaaaagtatttggaataggagctcttttgttttaaagattcgtttaaaatcaggagaagtgttagagaataatatcgtggactcagtagtagccaatgaagttattcgcaatggaaataatcagttatctgactttctcccgtaattttctgcaaaataattttatttagaaccacacacatacagccgcatagaaaatcaaaagcgaagggatttttctttgcgttatctttgattagcatctccaggttgtatttgattatattctgaaacaactaggattctagtctgaagtatcttcttccaactatattcatatttgcaagtcattcatctggttaccgccagtatgtcaaatgtgaatttcatgtatttttttttttttttttacaatctctctaacttaaccaatttaattcagatttttatgtcagtcttttagctgttggctgtttttcccaaaatgtcaggatcggctccataatttgggggactcagggaagaaagaaaatactgggtcccatactcaaaaattaagcattgtaagatggcaacagcagagcattaaaccaagcatgggctctcctaagcatgagttactgcataactgcacaggttgcatggctttgaagccaatttcgggtgtcatcttatacatttggttatttgtacacctgaaatgcttttgataaggtttgggagttaacaatttaggctcacttttatagattatcattacttgaaaatatttcattgaggataattaattaacaataaatgctttaatatttagaaaggtgaaatttaatcttattcttagtgtgttaataatggatatagcttctaggtttacatctttccatactttgaattcagggctttctttccttaagtagtaaaaaggatattggatatcttgaatcttgacttctcctaggttgaatgctctgcaaaaaacctttgtctttatataaaaattgcactgcaagcagactattatggcagacctctgtgttcaaggtgactgcaattttcagctgagtggtggactatgcaacttgttctcataataatattaattgaataaatggtcaagagtgattacattttgaggggaagaaacccacttgtgtaatatttacacatagataataaactcaatagcccagacctctttaatgtaagaaaaatagacatgaatgtgtatgctattttctttgtaaattagaaatttttccttctctatttcatgtatcttcttttgttatttgagaaagggatttttcttgtcctaccatcaattgtgtgagttaccttgattcttgtttttaataatattttaaaatacatcttgtattttaaatgtagttaccctctattttatagctacaggaactgaaagagtacatagccttcacaaaagggtctgtggtgaatgtgtttaattcttattttaatcaccatgaatcatggattttttctttgtaagtagtaattccattatttttagatataatttaccctacttcaatcaataatgtttccttggacagtcatatttacttttccgaaatattatataaaacagtagttaaatgtttttgttcgtctgtatgcctattatagaatattagcatttttggggtccagacacaaagggacacacaaacacatatatatacttgcatgtatttatatatacatgtatataagcacatatgtatacatataatcatgtactgcatttcaatatatgattaatatttaagtatttaatattcactctagacaaattatgtttgctcttggagggcattaatatctttgtgaatgagtgttaacatatccatttaatggtatcttgtcttcaaatatctcataatttgatagttgagttatttcttctgaagttggaatagcttttctacaagggcctaccaaaaaaaaaaaaaaagaataataaagttggaataacaaaagagggagttaatacataaaggaaaaccattaaggccgaaaaactaatcagttgtaaaagctaaatcagtagtatggattgataaagtagcattttagtgataaatttttggattgaagtttctcttttaagtttatcaatgtaccttttcagaaaaattcctcgagtttatatctttatgttaatgaaacttgtcaataactttaattatctatgatgattgacaactaatacttaatttctataacacacaatactgttctgagggtacatattcatctctctctttcatcttacgttttaccactctcaactttttaaaaccgttttctttgcaagctacttcatagattcttgagattgaataatcaaatctgttatttaatattcaggccaaatttctgaaaatgtttatttttttaaaaaaaatgataaatggaaaagggaatgttaaacaacatttctttgcagtgtattccagtgtccctagatggaatgaggaataaaaatatttttcaagttcatcatgctgtcttttaaatcataaaatgcatatatttattagtaatttttcattgaaagtatcaaagaaaattggagaatttccttactgtttctacctcactatgtttcgtatattctgaccagcattaataccaatttcatagcactctactgttcgctcttttttgctgtaagcccaactgattgcattttcttacctgttatttttcgttgttgttatttaagacatcttttctttctaacttcggtcttcatagaccttctcaatttcagctcatcaccaaaattacacagatagaagaatatagggactttggtgtacacatacccacttttgactccctctgattttctaatttagtagattttaattgaggctgagaactgtatttggaaaagttcattctgatgattattcaggtttgtgaaccccagtctagatagacctttatcagcacatgtataaggtgcactttgctaaggtgcattatgtgtcaggttcattcccactgtggaccagtaatttattcttgcccaaccactgctcatgacagatagatgatctctgtattccagaaatgaagctcctttccaattcctcaacaactaaaccaagcagaggaaaaagtggttttccttcacagccatagttccctgctgaagtagaatgaacgctttctaggaaactgcagcagatttttgatgacacggaaagggcatcactaggatcctcattatatattacctctctccctcacccgaaccacaatgttgacggaacagatacttcctgtggggaagatgctaagcagtcctgcatggctgtaggcattgtccacatcttaatcttcagctatatctgaggtatgacaagtttaacaatcctacaagttaaagcgtcacaccggaaacctgtttattcttctcccatgccaaataattccagcacgatgggtttcatctatagacgatgagaagatgccattgtggggtgaggacatagagaagagaggaagtttggaaccagtttatttctatttcagcaagcttaatgtattgtaagaacattttgtggcagatgaccctagtctgtaacaaggaatcgattgtaatgcatcattctgccagtgtttatctgttccctatgctcatataaacacacgagtcatctttctgcactcccaacctactcctaaagcactatacagaatgtttcgaaagcagaaggaaaagcagctgttccatacaccatgttcctgctgttcaaggtgcacatcccatccaaatgaatcatatcagagccaaagatcctggtaggagttcttttctacaaaactgcagtcttgtctatcctaacaacttggaggacaaaatattagaaaaccttgtaataaccttaggacacaataatgtagatactgactgagctagacctgaggactttttcaatgtagtgtggataagtaagatgacaggaagccataagcatactgtgccttgcacatcaacttctccagagccatgacaatcatctggagtatttgtgataaataaatattgttaatcttcatgtaattgggtaggatgaaaaaggaccagtcgtcccagacatcccaggagagaggagcatttttccagttgctcagatacaatttcaagttcgaaccaatatgaattacagttgaccacagaggccggcaaaatccatggcactgtagtccaagagaacctgaacactggccttagagtattatgagcctacatcacagtagaaggaatccagcagagatctctaatgcacatcagaaaagcaccatttctagttatcaaggctgtatttcacactgcttgactgaagattggaaactattttattcataggcaacctgtgtggccatccttacctggtctataaaaggaagtgtgatgaatttgcttcccatacatcatattaagtccagaaagccagagatgctgtgttgagtttctttcctgagagtctgaattcctaagtagagggactaacgagttccaaagttctttcactctgagatctttgtcacactactgtactgactggatatcactgaccttatttaagaggactatcaactggctagttcatctacattgtaaggactagtttgctcacaaccaccaacctatctgtaattggcctcagtatgctctctctcacttgggtacttctgtatttggctaattaacctataccacttggcttagaagcaccagctacattttttctaattttgacttctcatcttttccaacttgattttatccccagatttggacttttgtctcatgtataaactttatattttgcttgaacatgtggtctcaatgctgaccaagtcatccctagaatctgattctgtctcactattccatatcaggagacagcgacttaaatattttaattatttcctgtatcaataaattattcactgcctaaagtttagactttaataatatgaacacatgtgcagtcaaagagtacctcgccattgggccggaaaaatttcactgacttagggtggctcctgaaggtaccttgagaaagcttggatatgatgaatcctgtagacttattttatgtttactgaataatgcttcattcactttctttttgaagcttaaataaagcatcagtttgctcctgtcagggcagaagaccaatttcacttgtctacccatgaggataaatggatgcagcaagaatccagaaatgtcttagatatattactctatagctcattgaccattctatcaatgctcaatgctttacttgaaagtgatggctatctgatgtcaagttccattgataaaatgattcccaaacgttactttcaagtatgcttccttcagaggtcacagaagaacttcagtaacctgctaaaacctaaaacaggtgaagttcctattaaccatgacaccaagagttttcacatttatattctttcctggtaaagaaaattataggagctccatgctcacggcttttgagttttctcccaggtgtgttcaaacctagtgacattaacaaaacataaatctagaagcctttcgtgaataatgtaaccttctttattttatatttaaaggatatatatgcagacatgtacacatctttgtaattatttaccgcctatatccctattaaatacattaacaaatatgccacaggaaaaaccactgtaccaaagcccctcacaagagttatatttaaagtgggttaaagcaacatggttttaatttacttagtctttcttgtccaaggaacacagtgtgagacctcctttctttaggaaaaaataggatgaactaatttgaaaacaaagaaagcaacaaagtgaatcttgtgatgagctatgagcattggtaaattatttcttctgttgtaaattatcctcttctccctctgcttttctcttaatctccatttaattcccttttcaaaatcctaactctattctttttggaaaacatttcattaagctggtataagcatatctagacatctggaaatttttgtataacttttaaaggatctattacttaacaccatatgaaattatggaaaataaagtgttcctatctaatcaatctcaaagatttttcaagtgtacaatacaatgtgtgcttcaagtgtcagcttcttttttttttttttttttttttttttgagacagagtctcactctgtcacccagactgtagtgcaatggcacgatctcagctcactgccagctctacctcccgggttcacaccattctcctgcctcagcctcctgcgtagctgggactacaggcgcctgccaccatgccaggctaattttttgtatttttagtagaaacagggtttcaccgtgtcagccaggatggtttcgatctcctgaagtgtcaacttctttaaggctgtcatcttgccggttctaaacaactaaaaattgtaagaaccaatttctgagacaaatagaacattcttagtggtccttaaataattcctgatacttttatggcatgcttctttaaagaccttagaattatgcttcaggaatttaaattggttgttcagcaaagttaccaatcagtaggcaagttgttgcatttgacaggagcaatagttttcacgtggattatttatattcatgtatgttggtagacggatataaaacatgcaacttgcagttgcatgagacaaaagcatcaacatatctatcttagcttttcaatcatgtgatactactataatgctccatttttcacagatatttcttaagttctttatctcttcagacctcccgtaaaccattttctgtcttctgctggaccacattctagatgatctggatgtctatcattctcctttgcctttgctttatttgagtaagtgctgaattcgtggactgtgttagtagtttgatgcgtagtttcagccagatagatcagaaacatgaaatgcttttacatcatccaggtagatggcgccatgaatagatccctttgctttctggcctctgaggtaataaagacttaaatctaattgggttcagcttaaaatctcaatgtcatatttaatttaatatgcttccttgtttccagctcaagcttaagccatggtctaaaagactttctctggaaggcaagtgtggttagattccatcttacacctccactgcctctttttcttttttttttttttaactgcacttcagttatattattctccaatgtcttgggaagtaggagttaaggaaaataggcaaatgtctcctgttaactagctatttgtagctttgagtttatgatttgtgtgtgtgtgtgtgtgtgtgtaacagagatacaaagttcgggtttatttggggtacaagtatgggatctttaagaagtcttgcagaagctcttttgttttccccatctttaagaaggaaaatatgctctataaaaacatcttcaagcctcttgatcctgaggtactcttgctccataaagagtgttcctggtagatagctcaaacatggctgtcttcttccacgttcacttgacctattgagaaacgtttgccacaccaagcactggggagtacaggctgccccccttcttcactgtatcatttctcattcattttttacctatcaagtaggcatataatttctgaagcagacatcttcagaagcagagttggtaattaggtgtcatccctatctactctggactcccagaccctgtgatcagtggtcttggagctccacttacttgcatgggacaaaaaggttgaagtaccatcttcttttcccccttacggaataaacagagggagccatccctactctccctctgggccatgaattcagaagaccgattctttctaaaaccttcagagagttttagtataagtgggtatggtggagcaacaaaggcagggccagttttcccagctcttttgtaagccctttgctatgccctgctatttccatctcttagaatgagagagacttattacttgttattttcagtttaagactatacccaaaattctaagacaacagatagaattcaatgcattcatatccatagtgacagtttcacacttgctcttaagttaaatagaagagttaggtcaggaggaaatagtttatcaaaaatgatatacacccaccagtattcttagtacttggcacttgaacaaattgcaacctgttagtaggtaaaaaagaaacactaaaaggaaatagttggaccactgaactattgcttgatccactgaagcaagtgttgcttggtccactgaagttgagactctgggaaagaaaacttgactggtaaactctgtgaagtgaagcgtggttgtcaaatggagattaatgtcctctcatgggtctccactgtagtttctgaagggcaggttgagtaggatttggttttagcacatctcttgcaggactcctatcccaagacactttctataaaataaaacatattccatattgctctactttctgcaaggtacggacagtcaggttggggccaattaatgcactaccctaagcagaaacttcaagactttgtcgttgctttgctttatttgaattggaatttgggatttagttttcgttagttcatttactactaaaatcactcataaaaatgagggctttattttgacattggcaaaaatccttctttactcagaagaaaatatttaaaactgctggaaattgaaatgttttacatgtctacatcacaatgatgaatacaatgatgagtatttaaacaccaaaaataaaagtgtcttattacgagatgattgtaaacagtgcacccacattcttaatccatttgcaagcataagcttacccatcacctcataaatgcagtaaaattgctttttgtattgagtttaataagtatagtataggatacctagctcctttaatgaatgtgttttttgtaaaatattattaaatgattttttttctaatttggctttttaaagcatgcattcatatgttaaatacattttttggtttcaatattcggttttttatttcacatgcagagttttctcttccagagtttcttagacatgctacactttgatttatgtgtttgtaatattgtggtacaaaggttagtacattatttttaaaatggaaatgtgagaaactgtcaattcattgtagagatgactttacattgccagcaaaactcattaaactcttaaaactttttcttaaacttattttatatttccatagtactttaaagatataaaataattaatttgtgttaacttttacttagttttaattttcattgaaaactgggttaaaatatattatgtgtttttcttggtaaccattactaggattgttttctatttttatatttttgtcattgatcgccagttattaaaagatgtctttctaactttccttatatttgctgtttctgtctagctatataattcctcttactgctaagtggattagctaaagacatgaaataacattttaaaacaacagcggaacagtattctggaacaacaacaaaaaatcagattatggttgaagactttctacaaacttcattcaatgagacagcacaggtcaagcgggcagaaagtcagaaaattcataagcctgacattccatcagggtgcgcctaatcagatgtttagaaatagaaggcagcttatgccatgactagttgaaagaattctgcaagcttgcattgacatgaggtcttttcaatgactgagataatcaaggaatctgtgtaaatcagcctctcttattgactgtcaggccaggaaaagagccaacccacccgaagtcaactctgccatcatttcttaagccacactgttcctttcagctcatagaatctcatgaatagaaaaagttaggtttctaaaaagaattttgaggctagatatgtggtttaatgttattctatattacatcctatacaattaaaatctacagatgtgccttgtagagtacactgtttttgcctttagccagaggaaggaccaaatttaatacctggctaggcaattattacacgctgtgattggaagttttctccaaccacctgtcacaatgctgaaattttatcactagagatccatttctttggaagagctgtgggtaggctgcagccagtctcctctgcaatagaggctctgattatagccctgaacactgttatctgaaatagtaaattacctgatgtaaattttagttgaaattttgactgagaacaaaaggaagctatgtttgaattggaatatagggcaaagcctcggtcaccaatcttggatacagaattttaatagaaagagattaaaattttctccaaataatgtcccacccccattctgacacttttaatacaaaaacagatagatttattgtccaaaagatacatctctgagcagtggtgacctttgtttacaatttcttctgtaaatccattttcgtctttgactatttaaagttttctgtttttctcattaaaatttctccttatacttttcacccagtcataaataaagctattgggcttcattctaggaactggtattgagcaatgaacaggacagccgtaatccttgaactcattagagttgatagtctaaagtaaatgcagaccattaatgggagattaaatatgttatggcacatacaaagtgcaagaaagaacataatgtcatgtgagggaatgcataaatagcttaatttagccatcccgtaacatattcatatattaaaacatcatgttacgtgctctaacttgatagaatttttacttgtcaaatcaaaaaaatacaaaattcaaagaacatgcaagaattacctccctgaacttagaaggtgccagaggtagccacttggaagagatgtccactacattaagaagataaatgtaaattagccaataaaaggaagtcagaattgagattatgccagtaaaagggaacaacatgtttaaggccaagaatcaagagggccacagtgtaggttgggaaataaaaaataaaatttctgtatagctagagcagggagtaaaagacaccagcaggacttatattatgaagggacttttaagccacattaaggataaagcttttggctgcgcgcaatgtctcacgcctataatcccagcacttagggaggccgaggtgggtggatcatcttaggtcaggagtttgagaccagcctgggcaaattggtgaaaccctgtctctactaaaaatacaaaaattcgccaggcatggtggcaggtacctgtaatcccagctacttgagaggctgaggcaggagaatcacttgaaccagggaggcagaggttgcagtgagcagagattgtgccactgcactccagtctgggtgacagagagagactccgcctccatctcaaaaaaaaaaaaaaaaaaaaaagaatagagcttttatttgaaggacagtaaagaatcactagagaattttagacaggaagccccaattcgttattgagagaacacattgcagctgctttacaggtgggatgtggcagagtaaaatgccagtgaagaaactgatagcatatttgaggtaagatatagtaatgattttaactagagtaaagacaatggagagagagagaaaagattggaatcaagaactatttagaaggtataataaataattagtgattgactgattagatgcaacatgatgaaggacatgatagaggaagtagaaatatctagaattacatctaataaagggaatcattatttgtttttcgctgaaaccggaaaaaatacagagaaggaggaaaagcaagttggggagttgagaagtaggtgagaagagtatatgcaaggagttcatgtgtgggagtgttagcttttggtggttgcagaatattcatgaggagatgtccaatagggtgagataacatgcaagtatggagatcaaggggagatctggacttgagagatgtagagttgagagttgtcagaatgtgaggaggaattgaagttaaggtatgggtagaatgagaagaaaggaaagcccaggataaaatcttaatggagtcaaaatttatggtacagggagaagtactgggaaagccttccctcttcctgcagcatcactaaacttcctgttcttttgccttagtctagatgcctttaactgtagttttacttgggcaaagctgtgttataggctggcttcactgaagaataatgacatcactaatatttttaaagcttaaaaagtatagtatttatgtaatatctaatattctatatataatataaaaaccaagatcatcttaaaacctcagtcatgctctgtgggaaagaaagttatattgtacctgataatcatgcctttacattgtatattaaggaaatgtattttaaatgacacataatgaattcccaataagttgcctgccctatttcttacttttacaactactctgttaaaagtgaacagatccttgaagggagactttccaatctgtgcagcatggtatttatacttgaacattattgaattatcctaatcatacttatagttacaatcaagattaattgcagctatattaggattacttattattttttctacttcagcagtaacataaacccaattgtacaaacaatttctgtaatccaaattgtgaaagaaagtagggagaaaaaagatcatgcaaagctggttgaaatagtattcaaaataaatctttaaccagactgttatctaaaattctgtttttgacaaggagctgattctgaacagattgtacatgtatctcactggtggaagcagattatctgtcttgaattggattgtgatgacgatgaccctattctaagcaaaccaaatctcttgaactatataatgagatcaggaggaacattcgacctgagaaagacagattgcaatgactgagatgattttgctaattttttttccagcctatttccttaatgtacgtgatattgtgattgattttcatgcagagatccctgatcctatagttttgtttgctatttatttttctccttcacattttttttctatcaacagagctgaatgagtgccaggaagctgcgaaatctgtcttacaaaaaggtgattgtggaagagtctagaatcttcatttattgttcagcaggattacagaaaagctatcaagagtaaacatttaactgatacactcttattccttctttttaggctgtaaggaggcaaaagttgcttgaacagagcatccagtctgcccaggagactgaaaaatccttacacttaatccaggagtccctcacattcattgacaagcagttggcagcttatattgcagacaaggtggacgcagctcaaatgcctcaggaagcccaggcaagtacatctgggaatcagcttccattcttttgtttttattacttcaacaaaatgttgcagtgtttctaactttaaatttattcaactagttttccatggggttgttttgattcactgatttgactatttggaggtaggtaggaagaaaagggggtctagatcattagtctaagatttatttttttaaggatgtaatggaggaatttgaaataaagacatttcaaagacaggagcaatacgttctggtgtttctgacttcaaactatactaaaagctagagtaaaaccataggatagtaaatggtaaagaaaatgttttttggccgggtgtggtggctcacacctgtaatcccagccctttgggatgctgaggcccacgaatcacaatgtcaggagttcaagaccagcctggccaacatggtgaaaccctgtctctactaaaaatacaaaaattagccaggtttgttggcacgcgcctgtaatcccagctactcgggaggctgaggcaggagaatcacttgaacacgggaggcggaggttgcagtgagccgagattgcaccactgtactccagcctggaacagagcgagactctatcttataaaaagaaaaaaagaaaatattttctatggcattgttggaaagcagtctcaaacattttattataaactcctcgtttagtcacatggtctatattgttttataaaaatgtgttagttacaagcagtgagtaacacaaaattatcgatataaatttacacctcaattattaatgatcatgctcaatatagctacatgcactcactcccatgcttcattcaaacgaaaatataaaacgtgtttacctgtttttctagaatgagaattaaaatagtgttgaaaataaatctgagttgacttttaaatgagtaaattttaggccataactaaatttacattcactgtaagaagtatttttaaaatgctgttctcattttttaattaacatttaaacatatgtgaagttatcataggtattatttattcaaaagtctttagggttgtgtgatcgcaattactagatctgcttttcaaatcttatatacatgttgtgaacccaatcaccaagtccatgctatgatgagaggagcactagaaggttagctgcaaatctcaaagccttctccctgccagttggtgaagatgtctgaagtttttcactttaaaatgaatttgggggtgatatattagatttgtagatcatggttacaatgcaattacagttaatgaatcaccgttaataggtgttctgggcaacagtatacacaatagcatgagttaatttaccatattgtctaactttgaccaagaatgtccctgataatatgtggcagagtataggtagttttgataggcttaaaaagtccagggaatattatttccttatggagtgcatacaattgcaatagtggatgaagaaagagaattttggggagaatcctgatgataaaatcctcatcatagttttccactgggcaacaagagtaaatattgtagtagaagtgagggataatagtaaacatacttgaggattcaatttttaatttgtcttgatatataatgattgtacatattttagagggtaagtgtgataggtttatacaaacctactccagtatatatatttttcaaacttacacaagccaggttctctagaattaactattcctaagtccgtcccagtttgagtcataatgaaaaaggttttttgatataaaatatttatacatatttatggatacaacatttatgtaatattttcttacatgtatagaaagtgtaatgatcaagtcagggtatttagtgtgtctaccacggcagggtttagtaaaatgcatgataggaatgagtaattgtttctgaattgagaagaactacatgactataaatgaaatacagagtagaactgctttcatttaaactaatgacatgagttttgaaggaatgtttgattaaaaatgcttgtgacgttctgaatggaattaaggaaaaatttgagcagtatgaatactagacattaatattgcaagtttgtacttcaaaatgcataaagaattactttgtgacagacttgcggaatgaaattatgagtagcaaatttgataggcaaagctattatactattgtctttcaaggaaaattggagcttttagggcgaagcatctttagttgaacaggttgtgataaggggcactgtgtgttttttcttatttagaaatggattcaggattttataaacattacttgtttttaatagcaaaatattttgcttggtttttctaaaaaaatactacaataaaaatgttattaactacatcagtagaaaagtactagtaaacagcagaacacagataaattatgaaatttcagatctacttcaagaaagagattttgggcattcagatcaaatctattttccatgcatttcaggtcacacctgcattatcaacatagttcttgacattgagtctccccaatggtaatacataatattggagaatacaagccatctgaaagctcttaaaacattcttctgctccagggttttattttaatatggcagtaagtgaattgttttctagaacagagttctcaggtactcagatttgcttcaaggattatatttcctgaaaagcagctcgaaattcccatgaaataaaatagagagtcaaaagttagatagtgaaataacataagcacagtgtgtaagatgaaggatccactaagaatgccaccaaaatgacattttaaatatagagatggggtggatagatggatggatgtatggattgatggatggatagatagatagatagatagatagatagatagatagatagatagatgaaagaaagaaaagaaaggaatagaatagggactaacttcaatgcattgtattaacaaaaatgtgtttctataaatttgcacttaaagataaaaaggttattgctaattaaaatattagtgcactataatttcttttctcataaatggtatatttagcttaattcatcacggagaagcaggaaaaaatgtatgaagttaccatattaagtcctctttgaaatacctgctcagattttctgtcatatactggtcacgcagatttgtgggtgtctgactccaccgtgtggtgcactgagagttttgctagttaatttgaatcttttagagcattattttttctgcattttaagatcgtttgagatcctcagatataaaagctatggcactaaggaaatgcatactgtatgtacaactttctgacaaccatactcttgttatatataaaagtagatgtagatcaggatgcttctttacattcacattggcatttattactataggaaagaaaagagctgctcacttccttagtgtgttaattgatcagttatttctctgggccctcagattctgaattggatttaaaattatgttacttattttagtgacatgagcttacctacagaagcaaagcttacacttttagaaaataaagctgcatgctgccaggatgtaacagcatgtgttgacctaggagtattttatttcaaaagataacacttagccaattcacagtctttttttttaatactttaagttttagggtacatgtgcacaacgtgcaggttagttgcatatgtatacatgtgccatgttggtgtgctacacccattaactcgtcatttaacattaggtatatctcctaatgctatccctcccccctccccccaccccacaacattccctggtgtgtgatgttccccttcctgtgtccatgtgttctcattgttcaattcccacctatgagtgagaacatgcggtgtttggttttttgtccttgcgatagtttgctgagaatgatggtttccagcttcatccatgtccctacaaaggacatgaactcatccttttttatggctgcatagtattccaaggtgtatatgtgccacattttctaaatccattgtatcattgtgagacatttgggttggttccaagtctttgctattgagaatagtgccgcaataaacatacgtgtgcatgtgtctttatagcagcatgatttataatcctttgggtatatacccagtaacgggatggctgggtcaaatggtatttctagttctagatccctgaggaatcgccacagtgacttccacaatggttgaactagtttacagtcccaccaacagtgtaaaagtgttcctatttctccacatcctctccagcacctgttgtttcctgactttttaatgatcgccattctaactggtgtgagatggtatctcgttgttttgatttgcatttctctgatggccagtgatgatgagcatttttttatgtgtcttttggctgcataaatgtcttcttttgagaagtgtctgttcatatccttcacccacttgttgatggggttgtttgcttttttcttgtacatttgtttgagttcattgtagattctggatattagccctttgtcagaggagtaggttgcgaaaatcttctcccattctgtaggttgcctgttcactctgatggtagtttcttttgctgtgcagaagctctttagtttaattagatcccatttgtcaattttggcttttgttgccattgcttttgttgttttcgtcatgaagtccttgcccgtgcctatgtcctgaatggtaatgcctaggttttcttctagggtttttatggttttaagtctaacatgtaagtctttaatccatcttgagttaatttttgtataaggtgtaaggaagggatccagtttcagctttctacatatggctagccagttttcccagcaccatttattaaatagggaatcgtttccccatttcttgtttttgtgaggtttgtcaaagatcagatagttgtagatatgtggcattatttatgagggctttgttctgttccattgatctatatctctgttttggtaccagtaccatgctgttttggttactgtagccttgtaatatacagaaaaagagaattttagaccaatatccctgatgaacatcgatgcaaaaatcctcaataaaatactggcaaaccgaatccagcagcacatcaaaaagcttatgcaccatgaccaagtgggcttcatccctgggatgcaaggctggttcaatatatgcaaatcaataaacgtaatccagcatataaacagaaccaatcacaaataccacatgattatctcaatagatccagaaaaggcctttgacaatattcaactacccctcatgctaaaaattctcaataaattaggtattgatgggacaaatctcaaaataataagagctatctatgatgaacccacagccaatatcatactgaatgggcaaaaactggaagcattccctttgaaaactggcacaagacaggggtgccctctctcactgctcctattcaacatactgttggaagttctggccagggcaattaggcaggagaaggaaataaagggtattcaatcaggaaaagaggaagtcaaattgttcctgtttgcagatgacatgattgtatatctagaaaaccccattgtctcagcccaaaatctccttaagctgataagcaacttcagcaaagtctcagcatgcaaaatcaatgtgcaaaaatcacaagcattcttatacaccaataacagacaaacagagagccaaatcatgagtgaactcccattcgcaattgcttcaaagagaataaaatacctaggaatccaacttacaagggatgtgaaggacctcttcaaggagaactacaaaccactgctcaatgaaataaaagaggatacaaacaaatggaagaacattccatgctcatgggtaggaagtgtcaatatcgtgaaaatggccatactgcccaaggtaatttatagattcaatgccatccccatcaagctaccaatgcctttcttcagagaattggaaaaaactactttaaagttcatatggaaccataaaggagcctgcatcgccaagtcaatcctaagccaaaagaataaagctggagtcatcatgctacctgacttcaaagtatactacaaggctacagtaaccaaaacagcatggtactggtaccacagtcttaaattaaattatatggccacagcatcaatctacccagtgtcagctcatttaatgagagattttattaaagtacaaaattaagaaaagatttattgaaacagaataaagcaaatggggaaaactcttctagatatggaaatatatcttagaaaacagaaactaggattatttccaaagtactatgattaaaaatgtaacaacctatgcgtgttccttggaaataaataaaaaattaaatcacgaaattgtgtgactgcaaagaaacacatggaacaaatttagtcatttactgttcaatttttcagaactatatattgaagcacagagtttagttttggcacctaaaatcctatagcaacagtctaagtaaccatgctgagccccggagcaatcaaatcaaatctttaggtggatttggtcttcagaatttttggaaacttttttattcattctaatgtgtagctaattggagaatggctttggatggttccctactagtaatgactaaattgttccagagtatttttcatacgacattttctatcactcttctataaagattctcttctatgactgtgtcaacgtttcaatgggagggagtcagagtggcaatcaaactactggtgagattctctcctattttgattttttcctctaatggaaaatgggtgatggaagaaaatatagctgagagctatcgcacaaattttaatttagacaaaaagaatgttcaatatagatgtttgaggctgaactctgcttggctttcttcaattcatttttttctaaccccatttgttaacatgtcaattaacttgcatatggctcttaatcattttaggggacagtgacaactatgtttaaatagctacttaaatgtcttgcaatttttaaaattacaaagatactttcacatacatgatttttttccttttctactaattttagttttgaatctttgatatgtaagaacaacccaacatgggcacctgttgaaagtcaccatgtccttatgtgttgatgcacattttgtaggggaaaacatggccctgttgcttaaattactgcaagcaagagcggagttgcttagcagtggctccagtagctttactgttctatttgttttttcccaaagaattctgatctcatttttttgtaacctcgtgtcccacatagtagatttatgagcaggaatagaggaaggaaacaaattaccttcaaagaagagtgcctcataattaaatattgaaaaatactgccgtggtttgctcaccaagctaggacgtcaggtgttccagagtccactacagaccagacttcctccttctctttttccctcccattaacaatgtgagtacaatttagaaaagaggggatttttaaagcaaagaaagctattaatttaaactaattacgttaaatgcactttaagaagaattcgtaattgcaatcttcccgtgtttatcaaagaagctaaatcttataactcacattaaatataatcggtcatctttaaatgttaacattccaagctatcaaaatcaatggcttaaaaataaagatataactgcagattttggtctatcagattgagcttttgatttcattaaggaataaaacagactcttatagtgtaaataggcatatttgattgccaaacgacttggaacagtgtaactttacagtctgctttattgatttatgagttagacagcagaaacctgcaaaggggaatttatgtggtaattggataatttagtcaaagaagaaaaaaatggagaactaacccagagatttgggttcaaatattaaaacctatctagccatagatgtagactttttattttctttttacacagcccagtagatggtaaacctagtgcatttaattttgaatctgttctaacattgaaaggccacccctatgtgttgctatacagaacttattactctccatttaagaataacttgttagtttcatatgtttaatagtgtgggaaacagtcataaacacaagttgtaggaaatgtaaaatactagaaacttgccacacgtcactgactgtacttggacaacctgtacattattatgtcctcactggctatatgataaagatatagatttctttcatattattttgatgtgtacattttaagactgcaattaaactatagtatgcttttgtaaaaatctatctacaaattctacatataaggatgaaattattaaaattaatggcaaaaactgcaattacttttgcaccagtctaataacttcacgctacagccacagtgaacactattgcaacactctgaatattttgaagtgatccaaatttatcctattatttcccaattttgtcttatgcaaatgaatatttacttcaaagatagcacacagaaaatttatcgatctaaaatgcacagccagataacacttagcataacatactatgttttatttttctttcagcgtttatcgtgattgttaaatcttttatttgctttttaaaaattttccccgtctattcccattctctaaccactaaagttcagctgtaagaccgtgggccacccagcagatttctaacaaatagctggcaaatttattgaattccactgaggtttagtcactaagtatgtgtcagacaaatgtgataggcagtgtaaaatttaaaatgtgaataagcctaacgtggtccttgccatcttgccactcattagatagcaccaaagaaagataaaatttagaaattgctggccacttacgtttaccataatagtgaagaaccatttttccaatggaacttaatagtatcataaagacttcttgtcataatgccttatgattgcccaactttgaagctctgaaaacctttccaaaatactttgaatagtataaaatggaactcttcacatgaaaaggaaagactgatggaaaatatatattttagcctctttatgtattacctagtttttaaggattataccatgtgaatatctaatattttgaaagcattcacgttatttggtaattacagcagcctaatgaagtataaaagttgtgtttaaaagggaatatttgaaaacactagatgaatggttgaggcatgggttgagaacaggatgtgaatgaaaatggacacacaggtttaggggttaataaaaaatgtcctaaagttggattgtggtgatatatacatgactctataaatttcctattgttcattgactatatgtttaaaatgaaaattttatggtatgtaaattgtacctcaaagttgtttttaaaaccctattgaatagagaatatatcaattactattatatatttaaaaagataatttaaggttaccatcaactttttcactccattattttgatgcatagcaaagggtgaaatgtgatgaatgttgttaaataacctggaattaacttaaatggtagatatttattgatggcctactgatgtccgcaagatcttacatagtaatatcataatgttcccattgtttacattctattccatttaatgaattttaatgctaaagcatttttactgaagctgatattttaactcagatctgctttctccactttaataattagccctttattaagtgaaaattaacctagaagtacaatctcccaattatttctaggcagcattccaaaatgttccctagagtttgatttactcatttatctattttgaaaagtaaccataattacttgaaaatacgttatttctattttcaatgtttgtaggcacgtagtagatgtataaacgttacatgagatattttgatacaggcatgcaatgcgtagcaatcaaatcagggtaaatggggtgtctatcaccttaagcatctatcctttgtgatataaaaaattcagttgtactcttttagtttattttaaaatgtagactcaaattacttttttattatggtcatcctgttctagcaaatactaggtcttgctcattatttctaatttttgtacccattaaccatccccacttcctccccaacccctgactacccttcccagcctctagtaaggatccttctactctctatctccatagttcaattatcttaatttttagctcccacaaataactgagaacatgggatgtttgtctttctgtgactggcttatttcacttaacgtaataacgtacaattccatccatgttattgcaaatgacaggacgtcattctttttatggctgaatagtactgtattgtgtataggtaccatattttcttttttttattattatactttaagttttagggtacatgtgcacattgtgcaggttagtcacatatgtatacatgtgccatgctggtgcgctgcacccactaactcgtcatctagcattaggtatatctcccaatgctatccctcccccctccccccaccccacaacagtccccggtgtgtgatgttccccttcctgtgtccatgtgctctcattgttcaattcccacctatgagtgagaacatgcagtgtttggttttttgtccttgagatagtttgctgagaatggtggtttccagcttcatccatgtccctacaaaggacatgaactcatccttttttatggctgcatagtattccaaggtgtatatgtgccacattttctaaatccattgtatcattgtgagacatttgggttggttccaagtctttgctattgtgaatagtgccgcaataaacatacgtgtgcatgtgtctttatagcagcatgatttatagtcctttgggtatatacccagtaatgggatggctgggtcaaatggtatttctagttctagatccctgaggaatcgccacactgacttccacaatggttgaaccagtttacagtcccaccaacagtgtaaaagtgttcctatttctccacatcctctccagcacctgttgtttcctgacttttgaatgattgccattctaactggtgtgagatggtatctcattgtggttttgatttgcatttctctgatggccagtgatgatgagcattttttcatgtgttttttggctgcagaggtacaaggaggaactgataccattccttctgaaactattccaatccatagaaaaagagggaatcctccctaactcattttatgaggccagcatcattctgataccaaagccgggcagagacacaaccaaaaaagagaattttagaccattatccttgatgaacattgatgaaaaaatcctcaataaaatacttgcaaaacgaatccagcagcacatcaaaaagcttatccaccatgatcaagtgggcttcatccttgggatgcaaggctggttcaatatatgcaaatcaataaatgtaatccagcatctaaacagagccaaagacaaaaaccacatgattatctcaatagatgcagaaaaagcctttgacaaaattcaacaacgcttcatgctaaaaattctcaataaattaggtattgatgggacgtatttcaaaataataagagctatctatgacaaacccacagccaatatcatactgaatgggcaaaaaccggaagcattccctttgaaaactggcacaagacagggatgccctctctcaccactcctattcaacatagtgttggaagttctggccagggcaattaggcaggagaaggaaataaagggtgttcaatcaggaaaagaggaagtcaaattgtccctgtttgcagatgacatgattgtatatctagaaaaccatattttctttatccattcgttttttaatggacatttaggttgcttccaaatcttgacttttgtgaacagtgccgcaataaaacacgggagtacagatatttcttcagtgtactgattttctttcttttgggtatatacacagcagtgggattgctggattgtatggtagctctgtttacagttttttgaggaatctcaaaacttgttttccatagtggttgtactagtttacattcctaccagcagtgtatgagggttcccttttctccatatcctcgccaacatttgttattgcttgttttataaataaaaccatttgagttgaagtgagattatatctcactgtggttttgatttactattctgttatgatcagtgatattgagacccttttcatatacccgtttgtcatttatcttctttcaaaaaaaagtctattcagatattttgcccatttttaatcagattattagttttttcctatagagttgtttgagctctttatatattctagttattgatcccttgtcagatgggtagtttggaaatattttctcccattccatgggttgtctcttcactttgtgggttgtatgctttgttgtgaagaagatttttaacttggtgtgttaccatttgtccatttttgctttggttgcctgtgcttgtgtggtatggttcaagaatttcttgcctagaccaatgttctggaggtttctcccaaagttttcttgtggtagtttcataatttgaggtcttagatttaagtatttaatccattttgatttgatttctgtatacggttcaagatagaggtctggttttattctgcatttggatatccaattttcccagcaccatttattgaaggactcctttccccaaagtgtgttcttggcactttgtcaaaaattaggtccctgtagatgtatggatttatctctgtgttctctattctgttctattgggctgtgtgtttgcgcttaagccagtaccatgctgtttcggttactatagctgtgtagtataatttaaagttaggtaaagtgattcctccagtttcattcttttttgcttaggatatatttggctattctgggtctgctgcagttccatataaattttaagattgttttttctatttctgtgaagaatgtctttgttagaaaatacattattataatgaactcttctattatcgttgtcgttattatgactaagcgtaacatcgtttctcaggtatattacaagtaataattatacacaatgtccaattttttatttttaaacggttctgtggtcaagattacgcagaaaaatttatatgctttacttctctgctggagatttttgacccacttttttgtattttcaaaaataaaagtttaacctaaatttgataagaagccacagacactttttcctccagaaatatgttgatataccacaaaactcatatgtcaaggaacaatgtaggggagacactgaaatagactgtttcctttggcctattgcatatttctgataaaagtcaaaacttctttagctgacaaaatttaatttaaaggtaatatttttctaagtaactctacttgggggggggggtttaaaaaaagagtagtacaaagctgtgtgaatttcttctttttttacttgttgaattattataaagtataacctgaaacttttcaacattttttttctatgaaaataattatatttcttgcattttcctatctttggaaagtacatatcatcccaaatcttttgatatattttgtttctttcgttttctaagtacgtgtgatatgtggccatttccctttcttgaaaatagcaatttcaaaattactggctctttcaaaattactaatctaacagtggtacgttcctccatcaatcagtagtctcaacatgaagtattttaatatcttttactaaaatattttcttattttctctaaatttttcctttctttgacaccacagaaactccaataattatttgatatcattttcttcattctgttaagtactttagcctgctgcagtataattttgctggccattttctgttactatatatatgagaatggtttgatgaggtaaagcaagattttaaaaacagccctgctctctgctcagttaactgtaaagtcctatatttaaaatgtgattaatgtttgaatgattttttggttctataattttgccctttaccatattcaatggaaaaatggttaattcgatttcacttgttttattttcctactttgaatatatagtgctgtgaacatagttactgcatgctcaaatgccttttttataatggaatgttgagataagctcaaatgtcttttttaatataatggaaagatgatataatttgctttatattacttgactttgatgaagaaaatctagtgattctgaaaggtactggattgagaacacctcatagagcatatgtgagtgttcacatcagtatccgtgatttgctatgtcctctcactttgtttccattagagtttactgattttatacgaagccaggctgataatttcacaagaatagttgtatgtggttggcttatttgttttcttcaaatgcttactatccatatccccctagatgtatatattaggtgaaaatataactcaaattatacatccctcacatctttaggacaacttagaaatctagtagacaagtagagagatcattttccttcagattgaatcttctatccccaatgttttcttccacaattttattttctttcatcatattctcataatgtcaaaaaagaaaatgattacattgtctttttttatgagtgatttttacataggagattgttcttcccagaagtttcaataatattctgttatttgtacaagttacttttctatttcacaataagcctgcgctaaagtgctaagcattttttacttatgtggttccagaatacagttctgacgaggttaggtaaagtagctggtaaaagatatcctaagtacaagctaaaagttaattacaatttaaatgtaaattttgtggaattaatgtgtaaagatgctggcaaatatgtgtcatgcatgttttacagcttacccatagtagaatcaattggaaatataaagacattttattttataattttagtaatgaattgaattattattaatgaatatgttaagtatatttgatagcctttttccaaatctacttgtatgatgcactctggcaaaaaaaagcaaaaggataacatctacaaagtgttgtatgattcttggatatacacaatatatattaataaatattctgagaagttctgtggtatagacacatgttcatcttcaatttccaaaatatgtttaaccactgagttctttttaatgcataatctactcaatgcataaagaaaattttatctctaatcatattggaacagtactacaaatatgcgaatttcactagaaatgcctatacattatgataaaagtctcacttttatatgatgttcaatgatgatttttttcaatgttaataattttagtggtggcgacctttctaaaaacacagaagctcatcctcaacagtttttctaactatttaatggaaatatgtatatttcaaattccatggaatgctttgccttgagctccaaattgcccaacattcctctcacaggttacttggtccttcatgtcccctgccaacagataaaagtcgagtgtttggttatatgtaagctgttgttgttcctattatttatgacttatgacaacaatatgactcatttgggaaaatgtggaacttatcaggaaggcctgtgttgcagtgatcacttacgctatctttgctttgctttgtaatgctgagcttctagaatttccaggggcagtctttgaaaaaaaaaattataaatagaaaattaaatgctggtttatagaagggtctcttgcaagtgagaggcactgaaacttaaggttctgtagcttcatactaattcctcatctagatagtaattcttactaactcacattcagtctttcctcccattaaattaagcacacacactctgcatgccccaagcctaatctttgctagcttgtttcctacagcctaaaataagatcctatattcttattctctgaccctccaaaaccctttctcagccatatgctagttaaatcatgtaaatttcctaaaaatcaccagattatacagcagatattaatatttatctttctgatcacagagcatgggtttttctgtttttaaaatttttttaaattatactttaagttctagggtacgtgtgcacaacatgcaggtttgttacgtatgtatccatgtgacatgttggtgtgctgcacccattaacttgtcagttacattaggtatatctcctaatgctatccctcccccctccccccaccccacgacaggccctggtgtgtgatgttagtttttctattacattgcatatatttctgctttgtaatttacttatatatctacagtctgcctcttaaaataaggcttctgtaagtataggggcaacaattttgttctcactgtgtggaattgagtagtagaagctgaacgatttgttgaattaaattgactaaatgctatcaacatacgaataagattaaatttctttttttctcacaaatgtccatttggaggatacttttattttaaaatcataattaaagaggcagtataattgttagagggcagcaagtttgttacttcctagttatgttaccttgggcatgttgatgtttctaccttcatttgtacatgaagatgataaatacttatgttaatatgattaggagatggaattaattatataaagtgttagcacataagttcccacaaatatctgtggtggtgaggatactgatgatgatttcttttctttttttttttttttttgtttttttgttttttgctcttctttgaccactctggtataaaaggttaaaggactatgtgtatacttcattttttcctctactaaccttggaggctaaggggatggaaaaacttttaaatacatgtacacagatatgattacagatgtataatttgggccctctaccctctctgagtgtattcttatttttttaaatcagtttcctttcacagtctccacaattgctattgaacttttatcactttgatttaaattccaccttgattctctcctctcatcctcagcagatacctagggttttgtgcttacgaggaaatgacatgttatatcgctgataacttataactaaatatttgtgcaaataacatggacaggtatttttacatatactgtcacatctgatctttttgaccaaaaccaatgtagttgactactgaagaaatgagaatttctcagataagaaaacttcattgctggcttgctattatcattcttgggctagacatgagaaaatcaaggttcagaacatgttgatgctttgcccaaggtggcaagagagagccctgaaatttaaatcctggttactgttaacatgatttcaccctgatactctgagagcaccatgtaggaagcattcaacttcttgcgtcttcacatcttacttttgttttctgaaaaagagccacctctcctcctgttgatattttccgttggccctgagctttgtgcttcactctggttttcttgctttaaacaggtttttttaaaatcaagtttatcttcttacatttaaaaaaaatcactttatgtgttggcttctttcatgtagccttaaagtatgttcaagtctgattgacctgaattttattatgtgtggagacaaaagtctgcaaaagtaatttaaactatttttattagagtgctccttgatccttaatcaggccagcccttgaaaatacgatttctgctctcgtcatccacttctctcttctagctgcaatggtcattgacgagctcatgtaccctgattactattgatcccattgaacctatctcaaactgtcactgttgacctctctctctcattcttaaaattctcacatcaattgatgtgagattttctctcttttctagttcttcttttctttctctttgactgttctttctctttatttggtgcttttctttccatgtcagttaaatttgtgttctccatggttctctctttgttctctctttctgctttcctctaacgcttgaaaacactgaaaaaatacatattatacaaatgtaccctgtttccctctttctctctgtacagacacacatagtgattattaaaatgcaaactcacttcaacatactgctgatttacagtcgcatttcctccctatgaatttccttagttatcggatcaaatattagcaataaaactactgttatctgtgattatgatcaatttcaaattttgaaatttatcttcgtgatcaaaatagtggtaaccattcatttgggacataaagttatttaatacctgatttctacctacatttcttgttaaattttgccaaactccttatgctcttcagtgccctgtctccacaccttgtctctcttcaaccagaaatgcttttgtttttacaactcctatatccttgcgtatccagtatgcatatacagtatttaggactctcatttagaagtaacaaaattgaagtaactaaagcaaaacaaatgagagagaaaggtttttcatatggaaacaggaatgtgtcatagaatccaagggcagtaataaagttttgactcaagaagggactaatgcctgtgttttggttatttatgatagccatttattattcccactaatggttttgcgtgttgagaaagctcacctggatggttctcttttgtggtttcttatgtgattttagtccattgttgtctgatactatagtaacctgaatgctcaactgggctgaacgtccaagatcactcattcacatgcctagcagttgttggctgaaagccttgttgtgattgttgctgaagcacttatccatggcctttcgatgttacttagctttctcagagcataatatgttggatggattctaaaagggagcaccctaagaatgactgttctaaaaagatagacgtggaagctgccaggccacttaaggacttttgccataactggcacttggactatattctattggtcaaagcagtcaaagagtcaacccagatttaaagagctgaagaaataaacttcacctcttgttgagggagtggtaagaggagcatgtgctgtgggagctattattgcagccctctttcgaaaatgctatctacgggctgggcacggtggctcacacctgtaatcccagcactttgggaagccgaggcaggtggatcacctgaggtcaggcattcgagaccatcctgaccaacatggtaaaaccctgtcgctactaaaaaatataaaaattagctgagcatggtggtgggcacctgtaatcgcagctacttggttggctgaggcaggagaatcgcttgaacctgggaggcggaggttgcagtgagccaagatcgtgctattgcgttccagcctgggtgacagagcgagattccatctcaaaacataaataactaactaaataaataaataaagccataccgcattggaagccatcagtgtttttgttaccacctcactccctatgcatctacttctttcttctctctctgttcatggacctttgctcttcctcaatccactctgcaaactagggacttcgtaagcacaatttgctagtatatgtgacacaattcgaagcactcacagtttgaccagactcttctgtcaattctaattttctgagagagattctgatgattctctcttaacacaagcattgtgtgtattctgatcacccataacatggagttggccagaattacgtggcacagacatggttgttactggcccacctttttgaggaggattaacatttccaagatgaaaggccctagccataacccctctaaagcatctgttactcccagcaatgcttactaattattgaaagttctactttaacatcaactcccttatgacatcctccgtacaagcatcactccaccctgcatacttccatccaattttatagattctgtgatgtttcttgctctataaataacgtcatgcacctagatggatccctactcccagattctaggttcacgaaacatatcaatatttctcacacaaggtagttattcaaccaatgaagatcatcgatatggtaataaaataagatacatttatatgcgtatttgctctcatttgttttaaggcagaattctaactatttaggtaattcataattgatttgcctctataattgttaggattaatattctaaggaataatattgaggtacatctgtgaatttataaccttgcataaggagctccttaaccacttagtccatgttcttggtataattctcattactcagttcagggctatagttcgctctggaaactgctaagcaaaactgatgttatcttctaatgatatgtatcagaatttactccaattggtgtaaattcacttacactaatatacgttatgcaaaatgatctgcatgataatgttatgggcactctggtataatttagtttctgctctaaattataataatctaataatgactgaattttaaattagaatgatttgaccgctagctgattttgtatggatttgacagaaataaataaataaatgtattgtgttcgtgtccacatgctgcagagatccctgcctataactggctcagaaattcatatgttaaatgcagaatatactttactatagaacttgatcgaaaatgtctttattgaatatataaatattgaaatgttttatagttatctaaaattcacaatcagtatctgccggaagccatcaaatatctatcagacaaatagcaatacctgtttggggcatttgacttccatttcttagattcatagcttccctgaaatttaactgaaatatggcacataatgactgagtagactacactaaggccaggcacagtggctcacgcctataatcacagctctgtgggaggctgagacaggagaattgcttaagaccaggagtttgggaccaggctgggtcacatagcaagactctgcctctacaaaataaaataaaataaaataaaaagaaggtaattaaggagtattttccacatgcaattttctcattatatctcatccctgtcacagttggctgaatcttacagattaacatcatgtctttggtccgatttgagtgtgacttcaaagataaaacatatcaattctacatataatatataaattacctattgaaaatgatatctgaaatagttgatattgactcaaaatgattattgcttttttcataataatcccatagggaagaaataaatcgtttcacttggataatttatgaaagtaaaaaatatttatgataattctatttaggtgatccacctgcctcgacctcccaaagtgctaggattacaggtgtgaaccaccactcttggccaatttacggtcattttaaaggaagctacatggtagaggtggttgaggagagtttctgaatttcgtcttcttggaaagttagttgttctttgtagagcatgctgactaataatgctatcctcccaacagaaaatccaatctgatttgacaagtcatgagatcagtttagaagaaatgaagaaacataatcaggggaaggaggctgcccaaagagtcctgtctcagattgatgttgcacaggtatatgttatttcagaaactaaggaacgtgttttcgttgggcattatactccagtctatattggacaacttgattattggcaagattggatttgaggacattatttgaaaactataatttgatgtctaaacaatgagtgttttgctctctacattttaaagataaaataggttaataaattaccttttatttagtataacattaagaaaaaactactgaatcattctcccaaatgtatgttttcctgtgttggatgaatggaaaaatactgctttattttgtttttatttttctgtatatcttcagaaataaaggcagatctatcaataaaaataggaccagttattgtttgaaaggcaaaattaaatcagtgcctttttacactgtccttacagaaaaaattacaagatgtctccatgaagtttcgattattccagaaaccagccaattttgagcagcgtctacaagaaagtaagatgattttagatgaagtgaagatgcacttgcctgcattggaaacaaagagtgtggaacaggaagtagtacagtcacagctaaatcattgtgtggtatgtatttctggtggcaaatacgcaggtaccccttgactttcctcattaagaagtaactgctcttttataagagagaattgttttcagataaccataataattatactatgtaattttaagattgagaacaaaaattggcacatgtattgtggcctattctgtgtgtcttttttgagtctataattctgctaagaactgtgcagaatataaaaggatgttgcttgtgtttaatttttatgattctttaaatatattttaaatggaaatctagaaaggaaatatattaatctaaaaatagtaacaacaacagtagttgcaataatcctaacaacttcagaaataatggatgccaggtaaactacgtgacatacagaagtcacctttaattcttaaggctacagattacctgagagaatttaaggacaaacagctggtgaatggcaaagcaagattccaattcaggtactcttattccaaactttaataactttcctttaaacaccagtactggatatacagtgaaatgcctcaagacaacaccgaattaaaaggcatggaaaggtacaaatagcctaaagtataaatctgatttaaactttataatattgaacggtgtcctatgttgctgttattggaaactcaccaactgagatgattcctctgaaaacaaagctgaggtatgattgcatctactcgagtaacataagtattattataactctacatgtactatcggccattagagtgggaagtcacataaaatgaaaacacagaatgttattaaagggaaaacaagtctatttagtacttgatattttaagtattgtttctacatctactccataatatcaatgaaaaacagagtccttcagatacatcgtagtcatatcatgaatggggaaatatttttctttttaacaaatatcttaaaataaatacatatatttatgtgtgaaaaatatgaggtattcttattcgataatatattttcataattcaagctgcattttagtggtataattactttaattattctcacccccaaaaagaaacttggaatagaaatgatagaaagtagttagttgatattagatgagtaaggataggaatatatgggaacatatcccatcttaaattttgccaaaaaaaaaaaaaaggaaagcataaatgacccaagtgccttattcatgactaatatttgcaaagtgagcacttttcgttcttttctagaaacaggtctctaatgttaccttataaaatgtatccaacagtaaatatgagctgaaaacaatctcacctgtgtcaagctgtgactgtgccctgcgtcagtacaaaggaaactgctcaaggcatttgctcaattggtttctggttctggtttaaatgtcaggaccaattgaagcagttctttcataagaatatccttacactgtttagttttttcattgtttacgatgctttgtggtgtataccataatcatagtcttgccttcaagacatgtttgtctatttataaaagtcttactttcatgaacacaaatataaataatatttctcccctttgtttataaatattttacttgcctattgaatgaaacaatgttaatggctaacggtaccttgagggaactttcttcatcaaaataaagcatttatattttttgaagttcagagagtaaataatttagaaaaatctctgattccaaattagcatcgttgatttccaacataataattaatttcagtgtttccagatacacagatatttttatatcttctaagaaaaaagtaaaatgaagtaaataatatcatctgggaaactcagacaaaagtcataattattagtgatgaaggaatgttaacatcatttgtcaaagaggattaatatggaaatatacatgtagcattgatcagataattgtccagcctttacaaaatgcttttttttagacattacttttaaactgaaaagagaaattaaacccaatttttgttctaattccataaaaacaattacctactgtcaggtttattttttggtaatactaaaataagtactgatagttcagatttatgactaaacaaattaaagcagagatacataatgtaaactattatatatacgtgtatacgtatatacacacacgtacatatatttgaatacatggccacatacatacaaagacatatatttctaggaaaactacaaagcaaaattaagacatcaagtggtgttggagtggtgttggtggtataattgtgaacatagctgtcttccaaagttatgacacttgtcttatgatgcttttttatagcaacctatgttttgtgaaaccgtatgtgtgtgctttatatttgtgatgtacatgtgaattgtcaataatatttttatatctggttttcatcagcacttttaagaaaataaagttgtgtaatttaattaacattgaaaaggaccttactttcttatatatgatacaatatatattgaaattatgatgtagaaatttaggtgctttaatgttactaatatgtaagtaccatgagaacaatagtgaatgtgtgtgttttggccaccactgacttcccagtgattcaaatactatctgattgatagtaaccactcaataaatacccgatgtaggagtgaattaattcatccaaatttatggctagaattatataactccaacatttaaaatagaagtcatgtaaaattcagaattgacatttatgttctttgattgaagaactaaatatatatatatcacaaaacacatatatatgattaactctctgtttaataagaatagctgcaaatgacacatatatgcatgtgtgtagacaattagaaatattaaatcaacagaaaatgcaaaagctagatattgaccaccgctgcaaaatgctactctattaaaatttcaaacatggaatagcaattaaggggatctctatttatttctgttcataatattatgaaataatttaactctactgattatcatgttttgttttatgtttaaacttagaacttgtataaaagtctgagtgaagtgaagtctgaagtggaaatggtgataaagactggacgtcagattgtacagaaaaagcagacggaaaatcccaaagaacttgatgaaagagtaacagctttgaaattgcattataatgagctgggagcaaaggtgtgtgcatgctgagaccacaaacacttctttccactttccttataaattgtaaagcaacgggcaataaattatgtatgattagagtcttagcaattctaaacacctctctctctctatgtatatgtatacgtatatatatacacacatatacgtatatatatatatgtacacatatacacaaagataaacatatacacatatttcgatgtggaattctcattaagaaacaataattaatcagtgaggctctgcttattcagattgaaaaatacgtaacgctcagggaggtttttcctggtccatcagatagctctaaaagggtttcttagttgtaagtgttccttattttcattatatatatctacttgtgatgacttgaagactggtaaatattataaactgtatctatttatatgtaggtctaatgttgttaacatattccacagagaccacattaagtttaaaaattacacagtaattatttccctatatggccaagacttgcaaaatctaccacacttggctaataagatagcatggatagccagttaagacctacgtctctgtaattatttttgtatcattgtcctgatcagagtctcatgaccagctccacttcactgctaattcaagatgcctatatctctccatctcacttcgctcaactcaaatattctgtatagattatgatagtaagtagtctcttcactctgttgattgtttgttttgctgagcagaagctttttaggttgatgcgataacagtcgtctagttttcctcttgttgcctgtgctttgggagtcagatccaaaaaaaatgtttgcccagaacaatgtcaggaagctttttcctgttttcttcaaatcattttataggttcaggttttaagtcttgagtccattttgaactggttttttatatgctgtgagataagtgtccaattgcattttcatgcatttggatatccaatttctcagaaccatttattgaagagaatgtccttttttcattgtgtattctcggccccttggttgatcagttgatcataaatatgtggatttattattgggctctctattctgttcctttggtctatatgtctgtttttatactaccatcctgctcttttaattactagagcattatagaatatttttgaatcaggtaattatgatacctccagcttcgttcttttggcttaagattgctttggctattctgggtcttttgttgttcaaaatgaaatttgggattctttcttctacatctgccaaaaatgtcactggaattttaatagggattgcattaagtctgtaaattgctttgagtggtacagacatcttaacaatattatttattccaatccatgaatatgggatatctttccataaacggatatcttagtatttccaaaaatggacttctaacattttaatttcgttctgactgaaagaactgaatttcttggaggataaaaagttatatttttacaactcaggttctcaactttagtgaatagaacaacatcactgataaaattgtcacctcatcttagacagaaatatgaatgtccatgtttgagaaatagctaaggagaggcatatttcttgcatctcagcctgaaagtagattgaaggttatatcttcaagatattagttgccaattccttaccatagaaagtaaattttataattaagttgaaatctggaagtaatcatttttcttagatagtcttgtttttatattttaaaaaccctctaattaatatttgttatgttttaaacaagtttgttgccatcctatgacaaaagattctcctactttgtttcaaaataagaaacactgatactcaattgatgggaaagcattatgataatcttgaaataaaatacatttcaactgttcatttggtctaccaaggtacctttggaatgagatacctttatatcctctagagaaatttatcattgtttaaagatcaccacagacagaaaaattgtatctgcacttgataccttattccggtgcttatcaatttttatagatgccaattatttcatatttaacatcaattacgaaggactgagtaatctctagtctcaaatgtattagagattgaataatctctaatattaatcctaatgctacagcttcagttctggagatatattgtttttgtaattataaattttaaattaataaaatgaatgtatgttatagttataaattacaaattttcagtttataatttgacctgtgtgactttatactaaaataatgtatggatgagtattttttaaattaagaaaatatatgttttggtaaaggggagtttctcagtttactttttaaaatagaggttttttgtgtgtgggctttttatttgtcataggaatttttacgaaatcattgcaagagtaaatttaacataaaataacagaataaatcaattagaatttaaagcaatgaaagtgacattagacgaataatagtgccctgagttgattattattcagaaatgaatgattctcgtaatgatgtcaaaccctatttattcctgaaaatacatatctgagagcttgtgtttattctaaccatttgccacatagtaatatccttaaagcaaaataaaagtgtatgaagaaatcatatttaactttaatagtatcacagaatacagcaaaaacataggccaaacatttatttttgaagtaaatattgatgtagaaacatttgtgactaagggatcatgtataaataccatcttataaaaatgctgtaagtcctatattctttgcctgagaataaaaatattgtctggattttgactcaaaatattttcaacagcagtagctttgtctaatgaaagcaaaggcaacaaaggaaatgttattacattattctttttatgtaagaaggaacccttctattttaaccatcttcagaatttatatggttgtgtctgccacaattgagtatgcattacctttttggagtaatcagctctggctgccataacacaataaaataaactaggtaaattgatttctgcaagtgtggagtctgggagtgcaagatcaaggtgctgatccatttcattcctgaggagagctttcttcttgtcttacctttttgctgtattcttacatggtgatgagtggggagagaaaatataattaatttattaagagatattaaagctggcaccattgatgtaataatacctataacccctttttatttctctatgctctgatttttatggaaatttacataaatagcaatactaatatcatcccttaaatacattgttaacttcgtgaaacaatgactactaaaacattttactgcaggtggcattgtgttaaacgtatccattcctcgcatacacacacaaagtataaaactcaattttccttaagatggcagtgtctcctgttttttaaaaatgtatttagctggaaataaacaaaatgaaataaataaaaatcaatactgcattagctctgggaagatagaatttctttgaaatattgaatctggaatcatttttctaccaataatgcataggaaaaatatgcatagaaacacaccataaagtatattttccctcaccccccacacacccctacaacacaaaattcttgcagtcaaaagggcagatgcttttacttaggaaaaaaaaaaatagaagggaaaatctgtttaaaaaatgaatttacagcctcagcaactaaatgttttctaaatgtacgcacacctctcctaaagaaaataaggaattttattatttggaattggaattgttatcaaggttccagaatatttatttcgattgtagcattttagatgctttatacatatttttatcttttgtgtttttcttgcttatagatagattcttattttggttgtacacacacatacacatagacacacacacacatatatatgacataaatatatgtatcagtcagtggtgcctattgggcttagggcataatgcacaaataacgcacttgtggtggtggtattgttttaaccaattccattacaattgaaattaatctggagtctacctttcagatttcttagcaacaaaagccaaatcttgtccatgttttatttacctgtaaggtagtaaaataaatgtaaataaagcttttgctctatacattcaggcacagttttttattgaaccatccctaaaggtaaataatgagaataaaggaagggattgaggtggtacaatatgtcatgctctctcaaactgttgtctgcctttaccctcgcaatattcctgtgttctattaataagtatagtaatcccatttgacagatgtgttgagaaaaatgaggtgttctgccaaaaatcatactcaagtcgagagtccactacgtatcgcagagcctaacatacttacattccatcatgctgtttctgcagagccaaatatttatatctattgttcagattcccaggcttcatgacagacaagggttttttttaaaaaaaggtgaaaacacataccaaagaaaagaaaaccaggagcaacttgtaagagtataaactctttatgtaaattctaccagttatattttctaacttgtaattaacgatttgcaagtcttcattcattcctttattcaatacataaagcatatttagtgagacctttctttgttcaaggaactttcaggagtagagaggagtaatctaaagatgtgtgaggcaagaagatttgcctttaagaaattgtaatttatctggcttttgttgatgatttgactgcctttagtagaaagagatgctgggatttttattaaaccaaccaactgaaaatcttaacaaaatataggcacatctgagaaggtggtggagaaatacagatttgttcatttcttatgtgagaatatggataatttgcttttgagggtgttggtatcaaacactgagaacaggagcacaggatcaagtaattagtttttctattaatgggaatgaatattgtcttcacattcatctttttgtccctattggatggcaaaattatgtttaaggaggaagtgacctattcactgtattgtttttgagcagatgtgagacactttaaagatgtaacgaggatacagttgagaattctaggtattacacaaatacttttaccttttgagagaattaatcttctatcttcattttgattccttaccagcatgagctagtctcacttgtatatagaggattgtaaaccttcttgccatattattgacacatgacagtaagttttcagtgagaaatgagttttatcttcagtttgacttatatcattgtatttatcataaactttggctataaattatcttagagaaaaattcgtataggtttcttttctaccatgacgacatacaagaccctatcttttggacaaacgatgtcatctgccctagacagtttttattcactcttaatattcagaatatatgatttttataaaatattattttaaaacgtgtaagaaaatagttattttaaataacagaaatataaaagttccaaataagtggttataacgaaatttgaattaaagagtaaactaaattacatttcattataattcttttcaggtaacagaaagaaagcaacagttggagaaatgcttgaaattgtcccgtaagatgcgaaaggaaatgaatgtcttgacagaatggctggcagctacagatatggaattgacaaagagatcagcagttgaaggaatgcctagtaatttggattctgaagttgcctggggaaaggtaaaacctatatcactgaaggttattttgaacatacgtgaaaacacataatatgattttgtaaggaagtattaacatgtagcaataatagcattataaatattaatattgtttcatattccctttcttaaaaattaatctgtgcttttcaggaccatgataaaaccaatggtaagctttagcaggagtctctccaaaagcttccttagagttcagtaaattatgaataagaccttaagaaatacataggtcattagtctgaaaattggtccagagatgagatcctataatgtactggcttgcctaagaccatactgcccagatgaatcccacagccatgaagagggcaaggacacagagattgaagacagttgggctggacaggacttgcaagattagcatattgccaaagtcgcatttcagaaagaatctcaaggtgtctatgcaggggctatcatttccatcaccaaatgacacagcgactcctgtaatcattagccgttaaattcttgccctttctctgatggccaatcatttcatgctgcttagaacttagtcaagagactcatagcttagtatttttttttttactgtttattcattaccagattacctgaaagtgtgttgatataaagaaaatagctgatattgataacatgttttacctcaaaatttgccactgtgttaggccatttacacccacttaatgttttaaagttaccaaattaactagatgtataagacgtttatactttatttttaattcaatgtggctatccagattattcaaagttgggaaattttcaataccttatgtaaaaacttacaatcgtataaatgagacccaaactgaaaactgtctttatgtagattcagagaacaagtagtaatatattttgttacataaaatatttccaaataaatagtagggaattaaattgtttttcttctctttcagaataaatgtaatgttagataagatattgaattatagttattcaggatcatacatgagattactatagcaaggaagatacagtatatacaggttaaaactcacattagccttattttttcttatcattcaaacatattacttgaggtatttttgcattagcctcaccatgaaatcattcaaatgttataaggtaatgacctttgcagaggtttctaggttatccttctcatatagaaggcttgaatagtctggagaattgtctgcttgttgaatctgcctggaaagtatttttcataacgtcaaggagcaaagctactgtgagatctagtaggaaaaaaaaaaagcttagaaaactggcatttattttctttctttatagaataaagataatttatcactctatctagatcttttcaaacactaagctgttaatgacatactctaaaatctcttagttgtcaaataaagtatattcatttgcatctgaattacagaacttttttttttttttaccaatttatttggaaggttctcattatttctttaaaaataacaatcataaaagaatatatgccctgcagatctaagccagtcacatttatgataatcattctaatattttaacataaaattcaaactctcatatatgaaaccccgtgactattgagtacattctcatttctcatggtttcttggtaggtggagagcttaattcaagctataagtttcatctgctgtttcaaaagataaatgtcacatttttaaaaactaaattaaattcatttaaatgcaatacattaaatgtagttgccgatcattccaagtatttggaatgtgactgcagcaaatttgaatatctagagtcaatttcttttttattattttaaaaaatttttagacaatttaatttatatctgctgaatttctcccagttctgttgacccaagaacattatatttattttcgtatgaaagtatttgaacatctagtttcaaatattcaaatacataaaaatgtcaattactcatgaagtgattttttgacctttagtttatccaaacaaagcataatttcaagtacattgactatagttaaatagtatcagttttatcttaaagtatcttaattatatttaatatatattaaattccagaaaaattatttagtgtggcttgaagagatacatatggcacaacttgagaagcctaaataaattggaaaactaggaaaaggaaaattatagtagataaataataaaaaattcttgcatagaaatatatccacaatgtatcatgggtggtggaatggacagggaacattttaaagccacaaattggcgccaagcttcctaaaagacaaaaccaagaagtaaacatatttttgagacccaaagtttccaaattattaaaataataattaaaataattttaactttactagtagtatgttagctttttgctagaacttagtgccagaagaaaataaatgggagggtcataaaggtgataacacgctgattcatattcttataataaacaataagaatgtttatttttttctaccaacatggctccatgaaaaagaaaaatttagtgctaaagggccattcaggaaaagcaattctatgagaggaaaaaatattggagcagaagtctaaagtagtctagcaattgttttcagattttcagattctctattttattaatttttaattttgtatggatacatactgggtgtatatatttatgaattataggagacatttttatacaggcatgcaatacgtaattgtcacatcatgtaaccttctgtgaatatgctttcctgcaactgagcttttaagtagaattagacatcagagatttgaaggttatttattttctctgaatacagaaaaaaattttctgtatctttttcctggaaagaagccagattgtttctaactgagaacacatttctatacttggccctatatctaattggaaagcagggcttcatattcatgtgtatgtcatagtactagaaggcttcaatagctaaaaatttttgctaacatagagttttgggtttgaaccagtcacagagaaattggctattgagccttttcgtgccaagcataattgaagaaagaaaactcaccatcgacaactcaaaatatgttgacttctctaggaacctgtatcaatctctcagtgaatgtatttatttgaaaacacagttgggctattactttagctgtaaaagctattgaaaataaagctcagtagtactctcttacttgatgatggcatttaaaaggtgaagtgagaatgttttatagggggcatgaagtatcaagtactgagtgtgatgaaaattaatatactggttaatgataatactgagtctaaatgtactagtttttcctgtgatatgagaaaactagaattcacttttcaagatcaaaattagcaaagaatttggaagtattgctccaattggagaatcagaagtcaccttaaaaacaatacagattttactaatctatagtaatatatatttcataaagtcttcatgtgacacaaaagttttagggttttggtttttaactagccgtgttatataatcgaggaaatttcctatcctaaattagaaaagtataagcatatttaaagttcaattcagtttttcttacattacgaagctgagaaaaatgaatctaacattaaaatcaaaagcaatctggtctggcttactgtattcatgtcaccaatgcggtttatcaaaaatccctgtcatatcaaatcaagcccttccacaatgatctaacacttaagtttttatgagaaaaaaaaaaaattggattctctatactcatttcacctccttaccgtggctgtgggcaggccccagatgatgcattgtctataatataaactatgttggtgaccaccaaagcagccaggcattcttgctgttccttcatttcttactagattatgttatttaattaatttaatagtatttcatcgcctatttatagggccatagtccatgtgcaagcagttttccagtaccaccaaaattctcaataaggtcccatcacaactatcatttaggcctaccataaaatacacagaattaataaaatgagacaaccatcattgtgtgagcaatacttaagtcagccccatgcaccttcagagaggtactactagcattgagatgaattattccaacttgtagggaaaccaaatagataccgaaagaaagagtttattcttatttatttattttgagatggagtcttgctcttgtcaccgatcctggagtgcaatggcccgatctcggctcactgcaacctcctgggttcaagcagttctcctgccccagcctcccgggtagctgggattacagacacctgccaccataccctgctaattttttgtgttttcggtagagttggagtttcaccatgatggtcaggctggtctcgaactcctgacctcaggtcatccacctgcctcggcctcccaaagtgctgggattacaggtgtgagtcaccacacccggccagaagagtttcttacactggccaaaagatcagttatgttctttataaacttggcataggcttagggggcaattcaccatttgttttctaatgctgtgccctttaaaaaggaaggggaaggttgcctaaaacgatgaaagagatgttataaaaatcaagcttcttgagaaatatagtaaaattggaaacaccttaaatgttgcagtgtgttaccatttacacaaaggataaaatatgtagaaatatacattatttagttatatataatatatagtaaaagcagaaagatgtttgggaattaatataaactgaatacagaacaagagctatctctgtgaggaaagacaaaagaattgggtgggatatgaacaggacacttaaatgatacttgtaatatttcattccttaagatgagttatgcatacagaagtaatgattacatttggtatactttctgtgtgtctaaaatcacatataagaacataagaaaacatacaaaagcaaatgcttgggatttttccttttggaaactccactagccaggttctgtaagataacgcttagtaattaaggaacacccacttcgtgagtattattggtttcaaaagagcatggccactgttcattcggtttgcctaagcattggccaaagattctcctgctgattgagcaacaggacaggaacctagcagattaattccagcgagatgaataaggaacattgtctttccagtttttaaagaggatgtttctgtggctttttttttctttattatctacattgaagcatgatcgacagattcttatcaatgatttccttgtgaaagcagagtcaagggaatgaatagcgcaaaccgagaactgagaattttcatcaaagtggaaccaaaagttagcctgtgtatggtcagtttgtgtggcagcagtgctgttctatccttaagaacacttctattcagagagaatcgttattagagaggacagatctgtaagtcactgggtgaggtaacatcagaactgaaggtcctctgaaaatgatcttatttccctttttgtaaacaagaaaactgtgcaaaaagctccatatccctttctctgtttctcgattactttctttttaaaattactttagattcaggggttacatgtgcaagtttgttacatgggtgtattgtgtaacaattctaaaattcatatggaaccaagaaagggcctgaacagctaaagcaatcctaagccaaaagaacaaagttgagggcattacattgccccacttaaaatatactacaaagctgtagtaacgcaaacagcataatactattacagatatagacacctagatcaatggaacagaatagagaactcagaaataaagctgcacacctacaaccaactgatttttgacaaagttggcaaaaataagcaacagagaagggacaccttattcattaaatattgctaggatagctggctagccatatatagaggaatgaacctggacccctacctttcaccatatacaaaaattaactcaagatggattaaagtcttaaatgtaagccctgaaactactaaaaatcctagaataaaacctaggaaaagttcttctggacactggcttaggcaaagaatttatgaccaagacctcaatgacaaatgcaacaaaaacaaaaattgacaaatgagagttaattaaattaaagcttctgtacagaaaaagaaacaatcaacacagtaaacagataacctcctgaatgggagaaaatatttgcaaactttgcatctgacaaaagaataatatccagaatctataaggaacttaaacttgtcaacaagaaattaaaaaaaaacagattaaaaacaggacaaagaacgtgaatagacactcctcgaaagaagacatacaagcggccaatgagcatattaaaaaatcttcaatatcactaatcatcagagagatgccaattaaaccctaaataagataccatctcacaccagtctgaatggcttttgttaaaaagtcagaaaataacggatgttgattgctttcatagggtgaccatgattacatttgtaatagtcattcactcctaaggatttcaaagtcatgtgggtccaggatcctcaatatgaggattaatgttaccatgggaaccatgaaaagagctgacctaataggggccatatcaattctagccaacttcttgagcttcctaatagagaagaatgcctaagagactctctcaccaagaggaaggcaaattaactagtcagataaatgagagcagagatgggcaaactataattggtaggcctaatccattcagccaccttcttttgtacagcccatgggctgaaaattgtttttatgtaaatggttggaaaaaatcaaaagaagaactagatacttcaggacacataaaaattattaaaaatgcatatgtcagtgtctgtacataagactattgaagtgtatcaatttatatttgtttattttttctggctgcttttgtgctaaaacagcagagttgagtaattgtgacagagactgcatggctcacaaagcctagaacaactactatgtggccattcacagaacatattcaaactcctgaactagaggaaagctaatatagaagcagcaccctgtttgaccatagaattttgccatgtcttcttcttgaatgagtatcagaggtttgacatttctgggatccttttgataggccagtggcgttgtagaattggtctttcctaaatagaatgattcatctaagttttcttcctgctcagaattaaatagtaacatattccaaaccatagatactagaatgcatagcccttccaaaagatactgggtggtgcgtgacacaatttaagatgtttaaagataccatctacttgaagagaattacgaactcaagaatgtcttaggtattctaattcttaatgatcccacagagaaagaatgggagaacttccagaagtagtgaggatgtggtcaggggtgattaactgaagggacagctgcaggtaagaaaactgtcctgtgtccccttaccctgtgaccatgtttccaaattatagttacagaaaaaaagaatatattttaaaagtattccaaattgtttaaaaggtaaagaaaaatttttaaattaaaatgacaggaggaaagccatttgagaatattaacaaatgagataaaagattgatgatgaaaattgacaatttaaattattaatgctaattgcaacttcctacagcgacatagccctttcactgtatttttaaattcacccttcaatcagagtagtattaaagagggtaaaattaatgttaagtttttaaaaatatggatcaatcctagctagctgcatggtccagacaacagcaatgccacgaggcagccatcacagtgatatttatcaccccataaatgttcagatacttttccttttctgttaatggaattttctaggctgaggtgacaaacactgatagctgtagaatagagatgatggaaggaaatggcaaggcaatctacaggagattactagcacctgaagagtttgaatactggaactgcacaagttccttgagctttcatgataacccctactctcttggactgttatgtaggcaatagtaattcattcagcaaaaggacagggaaaatgtgtattttggtctctgatatttcccatgtacataagatattgcctgacacataggacatactcatgaaatatctgtttaaacgtaacttgcaaattaagagttgcaaattataatgacaaagcagttcttgagagaagagaaaaatgctgatttacatttaaaattgtacaagttttataacaaacataaataatcacctgatcaaatgttcccgttttatagatgaacaaatacaagtcctggtacatagcaaaactgtaatactatgcctgatttcaacagttttttccactataccaaattatcataagaagtcttattttctagtaattttaaagtaatctaagcttaaaataacaaaaagctacttattcacaataagcatgaaacaaaccatggctaaatttcaagtgcagaaaatataagtcctcattaaaataataaaatgaaaacccgtgtgtatctatcacctactacagtctgtagtctgtccccactgttgtgattttagatttcaaatattgtttgttagtatcttaatatcactctgattagttgagtgtaagtaaatcaatctgaacatcccattactggccaatattgtttagcatatgaattgatcacgaaaacataaccataggaaagtaaatatgtatgtgattaattagaggtttacttccctgaagatcattatgtttgggaaatacaagctttgacaaagtctaatctatatgattttctgatttaatcactaacattttatttctaattttgttttaagcatcaaagattccaactcagttaaataatttagttccattaaacccctaaatatccatggtgtcatctgaaagttcaaatggtagaataagattttctggaaaaaaaaaatttggtcctatagtatgttcatcctaccgcctgttttattaacagtagtcttagtatgccaagagttgcctgagaggaacacacacaaacacacacgcacacaaatggtattaataaatttaactgaaggtgttaaatgcagaataatctatgtctaaatagccacttgtttaacaaattaccgtgtttttcacgtttattttggaaacaaagttttataatatttaacctcaggaagaacaaacattggttgctcaattatcctttggctttcagttcactcttagaatttaatgactatcactcaataaaaactcagaatgcatctttctgtttgcctgtggttttcaacattggttgcacatcaaaatcacccgagaaacttgaaaagtatcccaatgtttggggcccacttccagagattctgatttaattggtctaactctaactagctctcttattcagcaaagttgagaatcactagataatgtgatacaagatccgcgaatttcaagctgtctgacgagagcctaaattcagctcagtcaaccatgtcttgtatatatattttttataacagtaagatttcacagtttaaagagatctggtttctggtcctagattatctggataactgcctcaactcatcattcctcttagctataaaaatataagaactattacttactctaaagtctgttatactctcattcccctgaaaaattacgtatcttttttttttaaagtgagcagagtaatttatctgtgaagtgaaataacactagcagatcattaacttggtgcaatgaatgcatcaagcagctgttacttagaaaatagaacatctgttacatgccattggagtcactattcactgtcattatagttagagctgttatttctgttcagttcattctgctttcatgaaattcttctttaataaacaatacagtgttattaaaaagtcaatacacattgctatagaatccactatttaatgctttatgttctttttgaatgtatcattatattattctgtcacattagcctaatagtaaaatatgtcctaaacctctagccatgatagagtaattttgggggctgtaaaagcaattagcatctcatttcctcatgtttaagacatgttagattgtgtgatgcaccattgatatgattacagctgctgagaatttaaaaaaaaaaaaaaaaacactaccactttcaaggtaaaccttaattgtatgttacatctcaatttccgaatccttaaaatgtgacaaatgcacatcttagaattgcagtaatatggcaatgtattccttttctttccacgaatatgttacgtagctaaaaggtgaaagaaccctctcctgttctctgtgatcagaaatggtataatatttgcaaatactaagtgcagaattcacctgggtagggggacttctcaagatgccttttatggatgctttagttagccttttattcatattacagggaacatgagtaagagaaaggaatagctaaaataagtctgaatttaattgagtcctagtaaagggaggaatctataaggaaatgatgttaaggtacgtaggtaaataaatgtggtgctgattgaagataagctctagagaacaggagactcttaagataataaaatttgtttaaaaagagggggtggaaaaaagagatcagacagagaagttatcttaagaatataagtccctgagaaattccaagaaaatctgtggaaggtactggaaaacttgtgaaaatacgaaatgggtggaggagagaatagaggttaagtgagctacatttctttacccctgaagggaaatgtttgtaaaggtgttcctataggaccagatgatttttccaataatttttaccgttctaccattaaataaaaataatgaaaaatgctgatggtataatcagcagagaccaatggagaaggtttttccatcttgctactgtatcagtgaagtgagccgatagctgaaccctgaaccgaacatgcctttttaaatttctacaagcaattatacttgtagatatggggaatgaatcagaatgtattcttcatccttcccatcaacatggggcatgacttcactggaagaaattaactcattatactcattcttttataataaggaaattagagtagcatttacaaattatggctaagaagtagacagcaaatttgtttgaaatcatggaagttagtgcttagtatttggactatttatactggagctatcaaatgttacaaagtaacatatggaaaataatatgttagacattgtgagaatttatagtttaattggattttacttatgtcagatattttcccctctatcataaaaacccttagtgccaagtatatagtttgcgttcaccttctcttgaatctcctgaaggtggacttacaatcatgtcataggtcaagttaaaactgagtgtacacaatcttgctttttcttcagccctaaaatcgatcctagcagcaatcacattactacatgactgaaaaacctaaagtgtctgagttataatttagtgaatttagtcattgaatttgaacttgctccttcagaagagtagatcttctagaaccctctccacttctcacctcacaaggcagaagaaggcatgtatgctgagaatcggatgcttttgaaaaggaggaaatgccatatcttttcagctgtttctttccatctcgccaaccctataaataaggagctccctttgagaggaatgagtacaggtataaagacaatggccaaggcaatagctctaggttggttctccatacatctgaagatgcagacattcttgtgttgtgggaaactattagagccagagaaaatggttcgtcaacaacctcatcaaatgtattcttttagtttacagtaagaattccctgttcctctatggcagccttgtattctaactttcataccttctcgttgcttcgtactttgtctttagtcaatccaaaccatcccatgcacactccgccttcaagtgtcacctttcccttgtagtcattcatgcttattccagccatggctcatctgtttccaaaaaaaaatgtgatttttttctagtatgatatcaaattgttttattgcatttaagctttcctctgcagctacactgtaggcatgattagagtgaggtttgcaaagattacctcattcctcatctctggcagtgaatagcacagtacagactggatattaggcacctgatatacattggtcaattagtatttcagatctccagaaagcaagctcagcatagtatttaaaggctaagtcttatttaagtcttatttcttaagtcatatctttgattaaaaacacatttgagggaaaaatttaaggcctactaaattaacacaatattttttcctaacccaaaacagcatgtatacaaatgattgaatactggttccttattgttgaatagcatacataaaagtttaactctaggtctctttttttacagagtgtaaattgtcctgtgaatcacttttgaccattagcagttataaaccaccatcatatcactgcttttttcaaatacaagttgataatggtgataaattgaacatcttttagttttaatttataattttgtggaacttaagaaggcactagaaattagtccacatttcctattttgttcccatcaactgaacatcactggacattgtttaaattagctggaggaatttggccagatgttgacacataatggtttctgtgacccaggaactacctgcaacattatcccctaagttcaaaacttttgtgatctcttctgagttttggaaaattccattgcctttaattgcattgcttgtcatgtaagaaacaaaatctatgtacacaataactttttacattgatgctaaaatatagtgtcatctttatgaagacttattaagagataattagtaatccaaatataaattaagcttcaactttgtgaagggttacctttgtgaataaatcaactacagcgagatgccagtagactggaatatagaaagtagataattctcatttgcgtatatgtccatctctttgacaaactcatacttggatataagtttttgaaggatggggacttctctaccgttttatcccacagagcctagtaacaatggctaacatctatggttgtagaggttgtatactacaaaaggttgaagtcaaagtattaaaaggaataaaatctagtctatgtctactctgaagttaagctctaaagggtctgtatctacccaaatgagagacttctaataatctcccagaatatattgaggagaattacatatgattctgctacagtagtaactggcatataataggagctcaggcaacacttacgattgataaatgaagaaattgcttttatgaattgctaagctcacctgtgtgcaacaaatagcacctacatatgaagaaccccatgcatgatagctgtcgagttcatctggcattaagtaccttaatttcaggcatgtttttattgaaaaaatgtgacataaaaccatatcttagaattgaagaaacagtgtttttgtcttgcataaaaatttttatacattgtttcctcatttatttctcctgtttatccgatgccaaaggcaaaaccaaaacagaaagtatgagaagtgatttcgagtggaccaggaccttatggcgtggcagaaagacagccacaggactacttaggtatattataaagatagaaaagacatgttgagagtgactctatgaggccagcctatacctaatttcttactcttgtactgtaatttttttcttaagaaattagatgtaggctggcattacagagctgctccttgtgtgtttattaattgattatttgtatctggactttctccactttcctgttattgctgtttctcaatgattttgttttgctttggctttctgtgattaagacatcagctccactcgcaaatagcttttcaactcgagtgccaatcacagtctctgtatctgttaaccttattgagaaaggagaaaaagggtctgttgggctctggctcagctctctgtgaatgtcccacagctggctaactagacaggcagggaaagaaccaggcacagactcagtggaatgccgagtggccacattgtctgtcagccgtgccatgtaccaggaaaggggctttatgcagggcaggtagtaaacctttgtactaagatcactttttccatcactactctctatcttttttcatgttaaatgtgattgttttcatgttttataaatcacctcttaggaaatagtggtattctcttaggagattttagtctagggtatgtggatagaaataaggtctgtgaacttggattgggggaaaactttatctttatttgtattcaattaaaaccaaaagtaagcagttttttcagttaaaatgtgagcaacaaactccagcaatagagatacccatgactttgtcactaatagaaatgacagatacttttataacgtgttccagacattgtacatacttaaaaataccagttatgctcgtcatcactacattgaaattatcctaaagacctgatgctagatcttgttaattaacatattaggaaataaaacatgtattactacatcacaaatatttaaaaaatgtgttgcacattgtatttcagtataattgttttcatttaaaatcctatgtattttgttttatgcatttaaaagcattattatgagaatgggtttttaagcttcaacagatgccaaaaagatccatggcactaaaaggctaaaaaaatccctgctgcagaaatacagtagcaccatactgtagaattttctaagggcagtttcttatttgtggatggattttcaaatatctgcctttagccactacatgtataaattaaataaatataaatatatttagttgaacaatatgtatgtttattaaatatttataatgaaaaataagacatgaattatgcttatgtacatatatatgttcatagttacccaacaatgaagcttcagtatatatggtatggttttcatgattcattaatacatagttataggtttaaaaccttgcagaatcatagtaaccatacagaaagccgtttcataagcattaaatcttaagactacaagacattacttgaaggtcaatgctctccttttcacaggctactcaaaaagagattgagaaacagaaggtgcacctgaagagtatcacagaggtaggagaggccttgaaaacagttttgggcaagaaggagacgttggtggaagataaactcagtcttctgaatagtaactggatagctgtcacctcccgagcagaagagtggttaaatcttttgttggtaagagaaaaggctagaagcttttacacccttctctgtcacgagaaaaagatacataagtgaccagtaacaattctgtgtttgaaaatttctcaattctacgtatatgctggctcttaattcaatatctataacaatattttaatatatttttctttatatttacgcaatattctatatgaaaataccacttaaaactaatctcaatgaaactttattgttgtcttttaaacattttagaacataggaaaaattctttaagaatattgtctaaccaataatgccatggtatgtctctgtacaattaaggaataccagaaacacatggaaacttttgaccagaatgtggaccacatcacaaagtggatcattcaggctgacacacttttggatgaatcagagaaaaagaaaccccagcaaaaagaagacgtgcttaaggtagcaaataaaatatgaaaagtaatgtccaaattgtacaccagttacttcaatcatctttgtcctaaaagatactaaggacgtcttaataagagtaaaacaatcctttcttccttcctttatctttccctttttccttccttccccctttgaatggaaatgaatgattttgaagagttctgtaatctgactttctgttcaaatccatcactcagttaattatacccaatgtaaactccgttcagaaagatattccaagatttattttgaaatcatattgcaaatttctgcctttgtcaatggtggtactacattcttgtgtctaacacaaagaacaatctgacactatcattcatttagcccatctgaatgaacacctgaaatccagtcagctgatttttttgcctatgccatatccaaatcttggtaattagtcttaatgttgggcttatgtaaagctgaggttttcatttttaactacatgtaaactaggctttgggttctttcttttagtctcaaaactgactgttaggatgccctgtcttctttttcaaggggaacttaatcttttctttaaaaaatgattccgataaaagggtatgagaggtgtaatacgcaaatataccttatagacactacattgtttctatttgatgatgtctcttttcccaattaaataggtagagttgaattttaacagctctcttttcaataaacattttttattttgttttgctgcaatgtttgataaatttattgattagttgtttactatttaaagaaaactcaaaaattatgtttctttctatgcaatttatttttatgcctctgatattttccacagattacgatatacctttaatgaaaaactataaattcattccaggctatccccaaaacacatttatgccattgtctgaagcttattttgatgtggatctgtattgtgctcttcattatcccttgatgtatagtcagagatgtcatcttatggtgaatttccttcaaggctttttgaataatagggtctgagttatttaacttcaacctctgtgacccggcaggtcaggaagaacattcctcagtacctctgtatgtgacagaaaattcgtatgtgttagaaaatcactttttttcttatgacactcaatgtaataaagaggaacttgaaagtgctaggaaggaatagaaaagtgttcttcagctacctgacctcctgagcacatacttagttcattccacaactattaaattcagtaacgatataataaaataagactaaatagaatatattatgatagttgcaacaacatagttgggaaaacatccctgtccttcctcggactaaataaacattttaaatagacatgcatcaaacttaaggacggtgatctatttttctgaaatcacacgcattttcattttagtcctgttttatggaagttgtggttttatctccctttgtattttctgcatgtgcttgctctcattttcttactttctctctctctctttctcactcttctcgctcacttgctcactcgctctgtttggctctctttttctatcttgaccttcattaattactaacttcaagtcctatctcttgctcatggaatatagcgtttaaaggcagaactgaatgacatacgcccaaaggtggactctacacgtgaccaagcagcaaacttgatggcaaaccgcggtgaccactgcaggaaattagtagagccccaaatctcagagctcaaccatcgatttgcagccatttcacacagaattaagactggaaaggtaggaagatctactccaaggtggaaacttgtgctaaatggtctcttgcgaaggttgcgcagtactctgaaaggggcaagtagaccccacagcaaggttttcaaaaggaaaatgaatgccaaaatgtatttaaggaaattttaccactgattataatgggagataaacgccactcctccccgtctctgtctctctctgtctctctctgtctctttttctctctcatcttttgctgccatagatattctaggactgcattctatgctgcagtttacatacgtactttcaggggtcacctacagaaaaaaataacaaatagcatgctgaaggccaaaaaaataaataaaaccaaaagcacacaagtcatccatcaacataaagcactaccgataaattttgccaaaagcagtactgatacaatattgcttgtatgtaatgtggatcaaatatccaaaatgaggtcttgtacatcttctgcacggtctagggtgtttttttacctctttactggttgtgcaagtgtgtttgtttaacttgcttttgctagttgtagacactgtgacaaaattcattaggctataatgaaatgatcacgccatgaaaacaaatcattgcaaagcttacatatcctaatttttgtaattttatatgcctatttatattactgtttaagaagaaccagggaatatggaacttttgcgtgatagactttatatttgtgtatgatttgatgaagagaaagtcttatttaataagtagtttgcaaaaatgtataaatatagtgttatagaatttcagctctttgggaagatttgaaatgcaagtaattacctagaaatttatatactgtagtttgataaatttcaatatatatgatatgctttcaaacataaaaatgtatataaaatcaatatatgtatttaggtatatagataattgttagaaataatctgaaatgaaaaaaacattggagtatttatgagaaaatatgatgcagtatgtcaggtaagtattgattcctggaaaaatagaacattttcaaaaaatattttgatagatataagcaaccagtaatagcatggtttcacaattgctgcactttctaaggcattacagtgtctcatcatgttatataatagtacatatttaaagtagttttcaaaataagtgaaatgtgacatgataaattctaaatagtttagcttgtatgcatgagacacagttacccttcaaaattcaccttcccaaattaaaaagttgttagtttaccttaattcattgcaagttatttttaatagttaactacttagttctcttgtactctctctctccatacatagagaccttatatagttgacttttaaaaggctatattctctacatatggagagagacagcatgagagaacttagtagttaactgtcacaaatatatatatttgagtcagtcattattacctgcaaaaaaatgtgacaggctcttaaaattgattaaagttttgaaagaatgtattgttacttacaaagacaattgtttttacttctaaagatatcaatggcttatgtaataacaagacaatgaatggagatttatttcaatccttaaaaaatgctactacttcattactaagatatagacacacacacatgcacattttaataaatcactaagctatagaatatttaagagaaaataaggtattatctttggataaattgtgttacaagattgtggttcacagatattaaaaaatgggtagaatttgctctccaccacagatgtgacagacccagccaatacaagtttgtgaccaagacaagtttgtgagttttcatttcacattctgcatgaatttgtaagtatacttctggaaatcatgcataaagtgatccactctatgaacttcttttattttccctagaaacataaggcataagaaatttccagtgaatattcatttattattattattattattattattattttgtgtgtgtgtgtgtggtggagactctctctgttgcccaggctggagtgctgtggcataacctcagctcactgcaacctctgcctcctggaatcaagtgattctcctgcctcagcctcccaagtagctgggattacgggcgggcgccgtgacacctggctaatttttgtattttggcagagacggggtttcaccacgttggccaggctggtctggaactcctgacctcaagtgatcctcctgcctgggcctctcaaagtgctgggattacaagcgtgaaccactgtgcctggccccagattttcaattatatgttaattaacaaaataatcacatgtttgcttttcaaagtatttgtttttctctaaattagtaaaggcaactgagtgtaacaatgaccccattttagggctctgaagagataattatgctctattatcacgatgaaatgaaaaacacagaaataaagcatatctgacactttgcttatatattcattgcatcagctaatgggattgagcttccattgtgttagagattgtggtgagaagatacaagggtataaagatccttgcttaagaaatacatgttttcaaacagaaatgaatacttagtataatcataaaatatgtttaacactaattcatcttcatggggatgttcaaataatggtgagatgatctcggcagagagaacaatagatttagaaggtaatctcaccagagaaaacagtggatttagaagattgagatttaggcctaactttttcagtagtagccagaatatgtgatttttctgcatatccatttcattgtttgtaagatgaggaagttaaaatagactaacaatttttaaaagaaaacctatcctgcccaaaatattattatttaaaataaagtattaaatttaaatatttaatattaaaatcatattatttaaaattaaattaataaattggaaaataatagagttactagatgggggaaatatctgccattttatctttctccttcctatgattgaattcaggaagtataaattatgctcatagaacatggtttgaaatttctaaattagattagttcataaatccctgctcgttctaaaatttggctattcagtaatcttttgttgattacaataagaaattgaaaacatttaatgtcttgtgtgtgtttgctctggagtagggaagtgctgaagtgctggaggttttagggggtagcctttgatctcaaaatcaggtttctttatagtaggggttatacaggataatattaggttagaatatggcttttctatggttgagtctatgtctaagtttcatggaagagtaacctggggaaaaaaaatactatggtgataaaaaaagtagatttggattgaacacgggtaggtcatagactctttgtaatcagtaatttcagtatagcctttagaacataactctaaagagcccttgaatagagaaataacttatgctgaaaattcactggtgtctagatttactatttggtgaagaatacaaagtggggtactcccatgtctcctgccaggactgttcatgacaagaaattccgaagcccagaaagcagtgagtaaagggatcctcagttcagattggctgaggacttgactgtccaagtgcagctctctgtaatgttaattttggcctcagcaaggagcagtatggtgagagcaaaaagtccttaacttcaagacacaagacctgctttgagcactagctgagcacattactacttagtgattttggatatgcctctttacctctcagagcctcatttctagctacaaaataagggagatgatgcctgttttattttaatctaaagattgtaatgaggatcaaattatgtaatatatgtaaaaacatgcatttaaaatgtattaatcagtgtatagatatgaaatggttaaaaataattaatatcaatgggtatttccatcgttacgtatattacacttgaatggccgaatctggggggttgagacaaaaactgatggaaaaaaatgaaagaattgctgattttctgtggtctctgctgtaatcgactggagtcagaaaatcgtgtctttgctattttcatgacaaagaccagccttaaagataatgaagtggatgaatttaagaactactaaggagttatgtttgtcccacatacgccccttaaaatacataaaaatgctgccttttcccattttattaaggttacctaagagtatccaatgactttgaaaaaagcgtgttttttcgtaatctatgtgaaatcaatgtgaggaaatggcagttttaatggagaggatcagaattgcaacagtcaatcagagataatattagaaccctgagtaaattgacagaatcaatgaggagagactccttgtctcaactgtctctgttttagggcatcggagtatagtggcatggctgagggcaagtggataccatcgggaaaataaggtgataggagacaaaagtataggaaggggcatgggaagacaaaaataaactgattatttattcatattaattatgacagttctacccctctccatccctctagaagccaagttggagaaggggagtcagcaatttgggagagatgctagttgaggtatatctaaaagcactaatgagtgaagacttgagaaaagggattaatcaggatgaattctcaccaaccatatattattttccgataacagtgtttggtagtgagggggatctattgctaggtaaaatacgatggattcaaggagcttactgtttgatgatagggcaagatgtgttcatggatactagattgagagtgagtgcatggtaagtgagtttagcagtcactccagcaacacagaggaggtaacaattcggcataaacatatgagaaagcttaggagcatacagtgtgttcaatgaagagtgagttcctttagttttcagagtagagggcatggaagataaaacttagttgtggatgataaggctgaagattatggctagacacagtgtgaagaggtcatggacagccagactaatcattcatgcttaattcagtatgcaatgaagagttcttgatgtgctctgtgtgtgtgtgtgtgtgtgtgtgtgtgtgtgtgtgtgtatctgtgtatgcactgttgagaaattagtccagtgatagttgtgaggagaattccactgaataatgacatgaagttcgggagctattgcagtagtctagatgagatacactgatgacctcaaaaaaagggatagctatgggagtggaaaggaaatttcagtctagatcagtaaatcttttgtatgcacttgggtgaattgttaaaaccagtgtgctgggccccacactcagagcttctgactcactaggtctggagtggagcacaagagtttgcatttctaacatttttctaggtcagattgatgctgaaggtctagggaccacgcttagagaactgctgctgcggagatatttagaggtagcctagagttaagtcattacatacaaggacccaagaagatgatgaattcaaaaatgactccaaatttaactctgattgactaggaaagtctgcatataaattccaataataggcctggtgcggtggctcacgcctgtaatcccaacactttgggaggccgctgcaggcagatcacctgacgtcaggagttgaagatcaacctggccaacatggcaaatccccttctctactaaaaatacaaaaattagctgggcatggtggtgggcgcctgtaatcccagctacttgggaggctgaggagggaaattgtttgaacccgggaggcggaggttgcagtgagccgagatcgcaccactgcaccccagcctgggcgacagagtgagattccatctcaaaaataaaaattaaaaaaaatttcaataataaaatatgcatcaagttatatttttattgttgtaatacttagctgcaaaataattttgactaaacaaactttaggtgtgtcatattaataaaggcaattattttactttttacaaaatattatgtaatttctacataaaatttgcttagattgtatttttctagagatttagatatacttcactgttctaaggagctgaaatgttaaattatttattctgaaattgatactaaccagaaaaaagtgaaattattttctctgactttgatcctttactaagacttatttgctataggatatatctggcatatgttctttaatttccatataggccttgaaaattgctgctaaaattcatgtagcagtttctatatatatgtattacaactgtaatatgagatttggacaatcgggcatcaaatacttaaatattcattgtttgattgctgcaataattgtaaattaccaagtttttttttttttttttttttttttttacttccattcagtgtcagaagatataaaagtaatcattctttggataagagactttcacaagtttataggaggctgtgagagagtcagtgaccttcccatgtaatgtagaatatataagaaaaagaaacacatgattgggcctaatctatcttaaaatatggttctatgtgtggaaaataattaagcagtgatttaattattttggctctcctaaacttcggtgggaaataaatgatgcattttataaatgtgatctagaaggtccaatgaagatgtattggattgaaaatttttaattaaagcttaattttctgtagtcagatttatcaatgcaaatacattgatattttgcagtctctttctgatcgtattataacttaacacctatgatggaaaataatattgtatcttaattggaacagtattcttgctatatatattctttaaattttaatttttttaatttttgtaggtacattgtaggtatatagatattcatttttagtaaaattttctataaaaacatgaaaactgagatgaagacttgtaaatattgcataatttgtagagcattaaatatgtaatatttacaactaatatcttcaggtaatagtaacagatcactagtcaaactgtataatatctgcaaattttattttactaaaatgaatcagaaaaatatgaacctaacaacataattcttatgttagcttattttttccacatgtgtaattggttatccctataacaaggttaagtccattgaaacttcgctaataaatccctttggtaaccatgtaaaatatttttaaagtagatgtgtaattgagtttggtgagcagtgtcatttgataaaactatctgggtcttgttagcataacatttgaaataattaaagctatttggtgaatcttgattgttctcctttgataaaggaaaattagtcccctgatcagtgtcagtagatgtaaagcaattttgctttggaccagagactttcagatatttataggaggttgtgagagtgtcagtgagttgaccaagttctcacagttagacagtgtggttagcaaatactagatctcagtccattgctttgtccacttcaatacactgactcagcatagtttactgcctctatttatgtcataaagtagtttttgttggtctactatgtgttagtataaacatacccaatttcacttcaaatacagtgatttcgttatactttttgtattaaaaatgacaagaacaaaaggtggtagggaggaagaaatggaagaaggaagggggaatggaagaaataaaactggaaaacaacctaagtaaatgaaaagaaagtttaaaatacaaaattgcttaaagtgttatgtttttacttttgtctgtctcccccatacattttagagttaaatgttttcctcttttaattcatttcctactccaaaaagtcatgtaatcatgaaatagggcaatattctaagttaaactttataaaaggtcgacagtaggaagcagattcttgacccacgaatatattttgcatccagttttaaaatgtgtaagcatgaaattaacctcatccatacaaaatcaattgaaatctactgggtaatatcctctaattagcctcacaaattagtcacattttcacatttttattatcaaagcattaaaggtaaaccagtactttatctattctcaaaagaatgcaaccaatgaaatgtcactatttggagtcaatttatttaatttaaaaataatatttcttacattttcttgtttgctctaataattttaaaataatagaataaataagtttataaaccatattttaaataatctttcttctagcatagatgtagtatctttccaatacacttatttgtttttgtaagttcttttcctctacagatagaatgatgtgaaataactcttcatatcatatcagtagtctgtcttttctgtactatagtgtgttacttgtccttgaaatttttcatcttggtttccatgaattctttatttttctatatcaatattgtaatgataaataaattttcaaagctgcagaatggaaaaaggagactgatggatttgaagcaattttaaaccaatctgtagcacttggattatttattttcaatttaggttttagtgtgatttgaatatagtggtaatttatcatgattattaagattccatagtccagattaacaaatgtttacttgctgtctgtgtaaacacagtcgttattatgctagtgtatctgtgcatgccaaagtaatatttaaccaaggaaagcttacattttaaaactaataaagtgtatctgagtaattttgaatgctttcaatttacaatgaatcagtttgtaattgatcttgcttttcttcagtctgttatcctttgttaacttgttataaaattcagctttaatgccaaaacttcaacaaagccttaaatttcattaatccttaaataatccaacaaagcacaattaatagttgttaagcaatttgaaacattaaaaaatcaaggaaaacaaagtgttgtctttctcggtttctctgtctcttctttatgtgtccatttatccatttattatacttccctgtcttctaatttatatgtattttgtatgactgcacagtcatgctaaagctcttaaaatgaaaaggtaagtaaaaaattaaaagtgtccaaaacctatgcttggtatacactttctcatgcaatattataacttttgtttgattattttctatataactaaaacctattttgtgtgcactgtctaacattgtgtgatttaattgtgattccagttcttttgtggtcatctatttcctttaaagtcaatagaagtaacttacccaataattaagatgatttatcagccattgctttcaactgttttagacaatttatcataattctgaattgaaaagcaggcatgatatactttgtgttttaaaatttggtgactcaagaatgagctgttaaattataaacgctttcttattacatgtttcctttataaagttgcataagaattccaagttacaaagacagggaagaccaaggaatgacatgtagaattttaattgggtgggaaagtgttttctgttttagaatgggcatagcctaatgctgaactagtgaactcttaagaaaagcaatgaatttttttcatctctttgtgtccaaagactattaatcatatggctgtcaaatggctggtgctatcttgccaataacatagctaaaacaattggtttgataaacttattttggttataaaattggtcactggttgattaaattaatatataggtagttctaaaactaccgattgatataataagcaccttttcctgtataaaataaaaggcagtgttttcactggaaaatagagtagtataagacatattgccaactttaaggatggaaaatttatttagagagacaagcatatatctttgaaagccaaataatattatattcctgtctataagaaagcagtgcaacacaagctgagatacacataaatgagaatagaaactcctgaaataacaggtcaatcccactcccgtaatttttcctataccccgaggactgcctgaaaatttcactcagaacacataatgcaagataataagaccgacgtaagaataatctaaattcaccacaagttataaacaaaacattactattttattcaaagtaattatgagatattagttctttacaatgttatgagtataatggttaatagagctctatactgcctaataaggtggtcatgaaccacatgtggccactgagctttagaaatttggctactccatgttaagatttataaataagtgtaaaatatgtgtgggttttgaagagaatataaaatgtaaaatattcatatttttgtattgattatgagtttatacaataatttggacatctcagtgaaatcagtaaaattaattttatctgttttttgttttttactatggcaactagaatatttaaaattacatatatggcatgtattatatttctattgagctgcactactataaaagttctacttgaatttagagacaagaacttactgtaaggttataaaattttaagaaaatgtctgtgtgaaaaggattttgttcctaaaatgtgactgaatacatcctcatctagtctctgcttataaacatttagcattacttgaaaatcagtgtttttaaaaaaattgcagtcctcatcagttgttcttatataaacctaaaatttaggctccaaataatttttgcccactgattttagttaatcactttgaaactacacaaaataaaactactcaaattcttaatcttcctaatttttttaaacaaaatgcacggtagtctttcattggaaaatttagaccctacacattgaactaaagaagtctaagtttccattatcttgcctgaataattagcacttcagtttttggtagtctctcccaaagctctttttacatcttcccccttttttgtgtttacctggtggtatcatgttgcttagcatttgggcagcagttaatatacatactcatataatgctaaccagtcaggtcttttgacatttctacatagaaattgtgttatttaaaattccatgtcactaaaaaagctccttgaaatgtctattttggccctcaatttttagtcttttgttcatttattttttcaggaaatatttacttatgaatatttactatgtaccagaaatgactgtaggttgaacatgagaaactcagctccataggatgtctagggaacacaccccactgactgtatctgtggtatgccttttctgtctccaaataattcctgattaaaaaaaaaaaactgcaccctgtaaactaaatgcaaggctgtgatatcactttttatattgccgcagataaattaatctgtagttttgttcttcaggattatgtaactctaccaaactggaatctaaaatcctccatgttcaccattacaatgttatgatttcatcaaatcccttggtaaaataaagactcattatatcaataagcatgtattttatcctttaaaaccatagatttcaaaggaggaagggcttgacctgagccaatggatgattaggattttgagaggatcaaaataagacccaagatttatagagcatgtatttatattggatggacacatagaagtttgagagaaaataatagtcaacatttattaagcttttattatataccagacaccattctaacatatttgatcttagtaatagccctgtgaggtagatattcatcttatctccatgttataaagaaactgaggttcaatgaggataaataacttgtctaagttccctcagctagtaaatggtagagcccagattcaatctatgcattttcatacagaagtttatgttcttcactagaagatgaaaagtattctaaggtcattgaaggaggcataacagaagatcaccaaatggcctgcaaaaaaaggtctatattaggaacacttacataaggctggcaagtctttggggcaagattaggagaagccttgactactgtgctggaggttggactttattctatttatactcaatagatgcaggaggttcttcagcaaataaatagcataatgaaagaaaggtttttgaaacatagtaagctgatcattgggcacaggctggaactggtttgactgaaaggagattttacatcttttcaaagcttattgccttagttttgtgtaaggaccaggaacgatggagtctctgggaatacaaagcaagtggatcatagcaagtcaattgacacttacttgatatttattagacattagagtgagatgttcaaaaatagcatgacttacgttttacgcctgaatgactgagagaaatggtcttccattaagagaactagggaagttagtattgtaagcagtttgcgggaaagataatgtgctccatactaggaatgtgaaacttcaggtgaaaattcagctggctattggagagtctagatgggaattcaaaagtcagataacagcttagggtgaagacttggaaggcataaaaaattgttaaattcgtagaaaattgtatcttaaattaatagaagttaaattcatggagagatgagctagagaagaagcagttggaataaaacaggtaaatctgactgtaaatagacctatgttcttctgacatccaagtacacaataaaagttattttcaacattatcattatgtattcacaaaatcacatagaacatagttgctttcattaaatattagcaaatgtgaacaaccatttaataacataaaatatcaccaaattgataattgtatagttatgattctaagggttgttaatctttttacttttaccgtcatctaaacagtgtatgattttattgtaccgtaattgctaataatacagacattgaaactttaagcatgtttgtaccactaccaatctatactggttcaaataacttatgatatttcaaatggcaaatgatcattaggatttaaaaactggtactgtaataggtcacttaaaattatctcataaatctttcaggggtgtgtagaagtacctagaagatatgtggttattcatgttgcatatgagaatcatgtcatcatgaatagaatttgattattcacttcttcaatagtgacagattattacctttagatatttagtttttcttctacacttatccgtattgttcaccagaagttgccatctaataaaaattcaacctcttcctgggaatgtgactggagaagggtaggtggggaccaaacttgatgaatgtaatcgtcttggcaaaagacacgggggtcattcctgaattggttttacaaaagtaaaatgttttagctctgaaagaaaatcagatttctgtatgtcatctatgggttttcaagagctatcccatataaaatatgttctagtgttttaatggaaagaaatacagcataaagattgagagagtatcaatgtattttattaacagaattttaatctaataactaaaccttgcccacttttttgaatatatatttgattttccatgtcttttcacttatcactccttttcaagggttttgtttagaaagtcaagagattttaaagttttcttagactggtcattatcagttcaaaagtaaagaaactgatgtttacaaggttgaaaagcatagattctttatgtgaaatatattaggttcattcgtttgaatttatttgcatcaccaaccaaactgttcctaaggcaagctaatggcattgtcttagaagagcatgcctgtcaattgtgctgtgctaaaaatgtcatttaaaacatctgagcagattgccatgtagtttttctaaggataagatgacaattctgcatttctacctgaggttactgttacttgataaatgaggcaatttctgatgagacatatttacccaaatgtatttatatcagaatatttaaaataaggtcaaatttgactttagaatattaaaaattagcccattcaaatgtatctgtaaattgactgttgttgatatcaccaaatgatgaattgtactatcttgcatgtatgttcagctctggtgatgtgaaatgtttctccttatttgcatcctcaggtacttttccagttgtatttcaaaacccttcataaaacataatatggaaacataatgcatgtgattagtttagcaacaggaggttgaataaatgtatttcttttggtttatgtttctaataaaaagtaattttgatttaaagtagcactatctttttttttaggcctccattcctttgaaggaattggagcagtttaactcagatatacaaaaattgcttgaaccactggaggctgaaattcagcagggggtgaatctgaaagaggaagacttcaataaagatatggtaaattggttgtgataaaagtgtgaatgaactaggagtggaaataaatatttggaaagaacttagataagtctccaactgaattttcagagcacatattacacattttatgattctaatgaattttataaatgcagaatattcttggccttttattacaaatgctgaattactatggtatggtaatataggagcacttacggtttctaataaatagcccagcaattttcttttgacctgacctacttttgaacttatcaagggcaaaatgtaattggaaaaaagagtcgaatcataaaataaactaaaaatttaataaaatactcaactatcatagatgactgacattttgtatcagcaatgtttttggtagtataacatttatttcaatgaagagagaataatgcataatatgaacattatttattacaatttcccacaaagttgttttaccaaatagttgtttagttagtacattatatgtctaaaatgtgtataaattcatgctgcttatttcatgggagtaaagaaatatgaccatgtgtgctcttcccaacctcagaatattctccttcaatcccaactaatttcaaagtatctactacatttctctctggcttgaatatttgtacatcacatccttattaactgactttttttttctctcttcatcctccttttcacaattttttcccctctttcactgccatcacctctgtggcattcttaacctttacaattaccagtgctagagccttctcagacaatgcttgaaagtgacatcagaagacaatatataaattttaggtaataagtgtgtgaagcaataggagaactattcccaccaatcttagttcccacttcctggagctgcctcaatcaatactccccatgtatggggtttggtggccttgccaactcagcttgtggaaagacggaagaggctttccaagttgctgagttacagcaatctctacttcaggtcaaagaagaaactagagggcaccaagatgaaaaaaagtactgattacctcttgggctgaccccaactctgccctagagccctcaactggtatagggaaagaagtgaagtgggttttttaattttttgttgtttttgtcctcagccctagaaaatgctacagacttttacaacaccttttaaaataagtaaagtcttttacagactataagtatatgatgtgtctatattatgataagtatataatgtgtctatattatgccgtatgtttctttagattattgaccagtctctgacaaaaataatccctttcccccatacaaaatgaatcagtcctcagttgcgtgttgaagtttatgcattatagatttaaatatataacatctaattccttgaattgtaatacacacatacaaatacttgtgacttttgaaatttattatttgttttccttatgtcatcagtgtaccttgagtaccattacaatgtgagactacttgatacaaagttttcacattctgagttgaaagaaagaaaactaaaggtgaaaaatcacatggtcatatatgcgactatattagaccagcatttattcaaaacattttatttctaagtaaagaaaattaagatattgttcttgcagcctaaaggaacaaaatacccattgaaaatgtttaaagccattttccagtccatattttagtattatttgatcgtatttaaattaacatgcatatatgacatattttagaaattatttgatggtaacttagcacatgatttttattaatatcctgatatttctcctattaatattgagcatttaggtttcagaaatgaagcaggagttattagataggaattagtgtacatttaaatcaaaatattttcatgtagttgtgtgttaatattttcagatttgctgttatctcagtcacaaatacacatctgtattcctttatggatcagttaacattataaatgataactttagctcatttctctaatgttttaatttctagaactacactaaaaaagccaaaagaatactttcacagtaattcatgacttgtctgacatgatgaagtaccacactcccccatctttctacaggtgcccctaaaaatgtgttctttacaactagatgggaggaaacttattttgaaacctcaagtaccaaatgtaaaagaaaggctatgagcacagtatcttataatagcattccatgaaagttttaaattggatttttgtgtgtgtttaaataacatgtcttattatctctgttaacaatgtacagctttttaaaaaccaaaatgaagactgtacttgttgtttttgatcagaatgaagacaatgagggtactgtaaaagaattgttgcaaagaggagacaacttacaacaaagaatcacagatgagagaaagcgagaggaaataaagataaaacagcagctgttacagacaaaacataatgctctcaaggtattagagctaaaattataatataccttgcctgtggtttttttttaatatatagggtaaaatataatgtgcattaataaaatctgcttcagacttagtcatcagaaactcactttttctgttcaatgtgtatgctttatttaacatttttgagtggtatttgattttgaacgatgtgttgcttaaaagttatggctttttaaagacatatttttctaagtagtaattgaaagatgggaatgcattcatagtacttatacatttaattttctaatgtgctttatttttatcagctactttatattgaaaaaaacctgcctaactgccagaataaccgatctacatgtatccattattcctgctttctttacttaattgattttgcttgcattaggtccaattttttggtaacctgatacttgtttaataagccctagattcttttatttatttttaaaactttattatgcctttaagaaagtcactctttgcaactatctacaaagtcaaatttcatttatgtaggaatcctaaaaaataatcttagtgcccttgaataagaactgctactttcatattaagcagtgtagtgtatggcttcaagtccccaggtgactcatctggtttgtgcaggaagagcaggataaacttaatttttctataataatatctaggaagttcttgagactagacatgtggaaagttttgtgaaactttttttttgtatatgctttgcaataatcactatttgcatgcatggctgattttctaatacttttaattgctgagcttttccttgtaaatcactcttttgagctatgtagttatgaaggtggatccacctagcaggtagatggagtctgctttctacatgcaaataagagaataaaacctttccccctatagtcaaccaaataaacactgctgagaatgtaattacacaatattgtgcctgcaaggaatccacaaggaaagtctaattggccagcaggtgttctgaaggtaactgctgataaatatagtaaacagaaaaggcctcttcctcgagggagtgcaaaagcacaccataatgtgtctagaaaatcggaacgctatgtaactcacacccttccaactgtgagcaagctttcagaagtatctacactggtcgtatgatggtgtgtgtcctactgaatagcagtgtttaatggtcatctggcattcctctaaagaaatctacatgacatctctaaatattttacatattatacatcactttgtgcttaggaaatgaaagatgtttcagattgatgaccaccaagccctttctcctggcaaagatgtgagttatgtcacaaataaggcatggctcaactctaattcacgtggctgtatcttgctacctttgaaaaaagcagcgttcgatctgactcctcagaaggtttgaaaattcaacataaaacataaagtacagcaaggtttaaattcccaattttaaacaaactagataatgaaatgtagttcattcttgcaaatacaggctataagtgattaatcaaaatcgtcaacactactcgccaaaccaatctataccaacatattcaataactttttaaacctgtcaaatagttccaattctggtccttatgaaatattttagagaaggtcaaaattttccaatggaatgaaatttttagaaattccctgatatttattattttttcgctcgaattaaacctgtgaataaaaccctaattgctactttctgtagaaatgaaagctgcatgcagagcttatgttcccatgaattataaaatggcattttgagtaattctattaatcacagaagatattgagtgtgcttgtaaagagcatgatgactgatttcctcccattgttgatttattaaattagtcttatcacattgatttgaaagcatgcacttgctgttttcttttttcaaatagttaattgttttgcatttagagcatgatttggtatagtaagataaatgtggctatgcaagccttggaaggagaagcatttatctcacataattttttattagttatgttcaccaatatacgaacagtggtgacacttctacacatacagcttggaacagtttataagacaactaaaatggctttatatttctaatcataaaatattaatggcctatgaaactcttatgtaggcatttctaaaaacatgaatgtatattggttgagtacataaagttttgttgatgagccccaaggctaaagatatacattttagaattttacctattttaagtcagatacaaactcactaggtttgtgagtttgtatctagttaagtcaattgtattcgtatattaaactcttgcacataaactacacaacagttagctcattaagagtcaattgaatgtgacaaaatttttaagcaagtttgaacatgctaagagaaaatactttaagtgtgttattcaggtttcttagcttcctatacatgggtcccgcctcatgcataggcaatttaattatgtctttgtatattttgcatttaaatatgattttaacctaagttgtacaaaaagatgagggacgcaaattattttgataaataactgcagccagaagtgcactatacatatatattgatattttaataatgtctgcaccatgaacaggatttgaggtctcaaagaagaaaaaaggctctagaaatttctcatcagtggtatcagtacaagaggcaggctgatgatctcctgaaatgcttggatgacattgaaaaaaaattagccagcctacctgagcccagagatgaaaggaaaataaaggtaatgttgttttagaatgtcaataccagattttattatacagtttaattaacctgtgaagatcatatttaaaatgttgatgttcttgtttctattaacgttctctttgatttgatgcatttccttgtattgtgtgttgttttcagtaaatgtattgtattaagtgttattcaattgacgtaatgttgaatgaataaaatgttttagactatgtaaagtgatttaagaaatgtgatgtgttttctggtaaaattgtaattgactttgtgtatctttgttccagatgaactaatgacttatcggtatatggacgacttcttactcatgttagcccattcatttcatcagagcatcttcacacatcagtgttcactctctatagatttatttgcatattgtctaaatatgtttttttctgttattattttacactttttattttgcttcattctctgttgagttcctcaaacctttaaaaaggaaataaataacttattcacttaccctctaaattatattctatgtggacggtccctaataaataatgagttatcactccaaattgtttcaaatcccaagacaccagaggaatttagaagaaagaaaatgttagaccaatttcaatatttacttaattagaatatctaaaaccaagcattcaaaggataactgaaataatatttgggttattgagcgaggatgacagtcatgcctttcatatttgtaaacttcaaaggatgacaataaagggacaacagcctttgaaattttgagagaagtatttgctgcttgcaagtcggttgatgtggttagctaactgccctgggccctgtattggttttgctcaataggaaattgatcgggaattgcagaagaagaaagaggagctgaatgcagtgcgtaggcaagctgagggcttgtctgaggatggggccgcaatggcagtggagccaactcagatccagctcagcaagcgctggcgggaaattgagagcaaatttgctcagtttcgaagactcaactttgcacaaattgtgagttgttactggcaaacccacgtatgtgtttgcaactactactctattaacagaggcctactaataaaaaaaaaagagacaaaaaatctgggtacagttttaaacttctaatgtacattctgaaagtgagtggtttccctcactttgggcttctgtaacactagtgcttaattttgccaattaaagacacaagaaattaacagataacagggaaaaccccttatcaaaaatgaaaatacatcttaattttttttgctacatcatttttcataacattggcaatgttaatttgtcaatttatcatacattcactttacttcaatgtctaatccaaaaaatatgtattgctttcctgagatcatcccatgctgattttactttcttaatgtatacatgataaataataaatatttcatggtacatcttatgtcaacctgcataagccattatctcattgacttgaagaataatagcttaatcctcacacctggtttaactacttaatgggttacagtgcccataaaagaactggatgcctagtaagatggttgctaattgattgcagattgaacaatatcagataatgttattactgaaatgttaccagccaaaacaaaaaggagtgactgctcttctttcaaacaactgaatggaaagtgtatggttctctctttaaaaaggcgattcagaattgttagcttggtctcacttctttatttgtagtaggtataaaccatagaggttttctgacaggtacatttttgttcctattattaacacttgtaagatgaagaggaatgatcatcatctgtaattatagaagaaagtactcctcacaaaaccaggatgtcaaaatctggaaactaagtctttatagttaagttaggttgaattatatgaatcaaacagatactcaaccattttgccctatgtaaataataactgcatagggttcagcccatgtatgagacttcttgggaacttcttctgtgatagtgtcagttccatttaatttggtgtatatttttaaaatgtcaaaagcagttaccataacttaattttataagcatataagggaagtatgttgcatattattgtgacttcttttaatacttcaagaaaattaataaatacactgttttctgttaaatctaataccctaaagtttaatagcaggtgaattattctgagcaattggaagaatacgagaaatagcgaaactgtattgcatgtgaagtctaattccacctggctgaatgtttcagcctattatccttcatattagatgttatgaatgtaatgtgtcataaataaccttacactaaccagcaagcctgtgtctgcagatgcaaaatgaagcgaaagattaaggcaatcaaaaagaaaattctaataaaatagtttcacctcaatttaatagatcattcaagggggagtcctttgctttgaattatctgactactaactcatttctccattccaattttccccaggtcttgacacacccaatatgcaggtttaaaattcgttacaaactaatcaagttgctaatgctttatggctaaataggcacaggatcaaaaatctccataaaccacttacttaaaatgccattatgtccctattcatagtaggctctcaacaaatatttgtacaacgtaataatgactggtgaaataaaggaagcatgtgtgaaccagtatatatttttaaaaaattgtagtaaaattctgggatatattttcctcataaacgatttattcttaagttttatatattaaagatccaaaattcagaatgtgaagggggctatttttgtgttaactcttaattatccatgataataaagtaatcacaatctgtatgaagaataatcaatttaatattgcagttatatttggcatcgtattttaattagaactgagggataattgatagatgataagtaggtatataggttggtaggtagatagatagacaggtgggtgtagaaatattcaagatacatctttatacttgaccaattgtcaatgcattttaaaactaatttcactgtggccactgattagagttatctttcccaattcttacgccctagagtcatttgtgatagtcacagtaacagcttaatgaaaagtagtatttgatataaccttacaatggctctgatgcagcatatgccatagcttcagaatttcttacctccccctatattctccttctctaattgtttgatttttacttttcctaactgtccctttttgtttttctagatataaactgtaggcttaaagttcatctttcatgtctttacagcaacatgttgaaatagtaagcggtactcttaaaatgcttagtatgtgagagctgagtgagtttaaaatgaaaaattaattttccttatctcacagataaagactcagagaagtgctaaccactgtaaaattaaggcatttaggggactctgtccatgtcagagctatatatggtagtaataaagctcagaaaaggactgagactttgagggaacaatcatgaggcagcgcccagccacacaggaatgcagaccaaagcatagtagagggtatctgcaaattgtggtcctcagggcaaacctggagatgataaagaaagaggcatgagactgggaggacgcaggtaaaaattttaccagatattcaaaatgagagaactcctgccttaattaggaattccaatcatttctaatatatttcctgttggtttagaaactaggttcctcagttaagaccaagcacggactgtaaactgaggaaaagggatagttctataggatgtactatcacagcagtgtggtctagtaaaattaactcttggataaacagccttgaatatgaatcccagtgactttgagtgctgtatgatcagggataaactgagtctcatttacttcatctgtacaatagagataaggatgtttctgaggattaaataaggtaatatttgtcaaacacctgctgcgttatgcaggctcaatgcatgaaagttttcttcgtctcctttctgtatatatattaacattggaaaatagacataatctttaatttttaaaatattttcataagtcattaagagaattaagtacgcagcatttgtttaaaatgttaacaacagatatctcgttcagtgaaaatttcaaatttaattctataatatataagcagatacttttctctagattcacagaataaacacaggaaatatcacacaaatctgatgactgccaagaaagggcatgattttccctaaactgcccctcacatcattgtagcatttggaaaataacctcagagagcccaggcatttgcaaacacaaaattatacaatgaagataccactacaacccccaagggtcatgtgaaactgctaaggaacataagcttacaaactaaaattatgattattgtggaaaaaaattataagcaatgttatcagatgccaaacgttaaaaggagaatgtatacctgaagaaaatagagataagaggataatcaccaaaggatattaagtaatttttaatgttcaaaaataaaaattaaatggatttttttccagtaagaataggccattatataaagtgaaaacgaagatttgaaaaaacaaagtctggaaatgaaaatataattaatccctcaaacatctgcgtgaaataagtttcaagttgaaaaaaatagggattatggggaagagacaatatttcatattaatgaaatttaataaaatggaataaatgtaaattttaatgaatcctcaaattcaataaaggtcaaccaacgtggaaaaaataaaaacaagtctaccagctagctctgaatgaaactcagagcatcagtaatcaaaaaggtatcattaagggttacttaagacaaaagaacatttacaggatgacaatattgactgaagacttttcatcaacaatagatattagaagacagttgaataatatcttcaaaatgctaggcacattttcaaataccaggtaaaacatgattcaagaattaaggcaaaatattctcagacatacagctagtttcacctgaacaaaaactaagaatttcttgtctatagatttttgctaaaataattactaagcaatatatttgtgtaaaataaaatgaaactagaaggaaggagacagcgatgtaaagctgtataaaattgttttctctgtaaataagaacatttattaaaaaagcttataatcctaaaatttggtcagtgccaccaaggaaaacacagaatactaggagaatgcagtgtttgactgatcctgtgtaaagagagagaaatcaaatagaagacttattgcatatcctatgaattacatatccttaattcatatcctgcatattacatatgctatgtaaagggagataaaaacaagacttattcgagataatggcaacaaatataaggcttgtgcataatgtgttctatgtaaattattaccaattataatgtttctagatagcaaaaaagtgctaaacctctgaaatatgtatacatacatgacctttccaagaacagcagcaaaaaaatacaaaaaaaagcccacttcagtgaagaaaaagaaatgtccattttctaaatacatttccacttgagctgagcatgttatgacatcaaataccaagtatatgatcttgatgtttaacattttatatccaacagtctcttatcttggatgcctaatgagcatctcaaacatacaatagccaagtgaaaaataaatgatccaccccccatctacgttaattggcatctaccaacatctccagatgttattaaattgcactattatttacttaagtcagaaacctagacatccttcatgattcttttctcttacattaccatgtaaattatttccactcttgttggatatacctgcaaaatgcatcaaatcactcctccgtatctgttatggaagtgctaatctacaagattattatctctcatctggattacttcaacaacctctaacctcttcttccagtctttccccacttacaccatatttctcctggtgaaggcagagagctccttctaaggagttaatgagatcatatcaggcccctcctgcccattactctttaaatgaaatcctgtgatccgctatatgatgtagccccttcctatcacttctgttactcacactttgtctccctttttgctcttctgctaacatagaggcctaaaggtttcttttctatacttaaacacaaccaatttcatttccatatcagtatctttgaacatatttttctaatggaatatttttcacctagaattttgcataggtgctataacttatttagatatcctttcatttaggaacaatgaatatttagtagaactttgatgtataatctggttatgtaatgtagtagtttctgttataaatgttttatattccctatacttatgtatgcaaattcggagtttaagactgctcgttcagaacatcagtttctcttacggttacttctagaagtaggcatactaaggaaagacacagcttctggaacataaaagtgaggtggtaaaagatgaatatgaagagggttacaatattgtattgcaatggatagcttgtcctacagcagagtaattgtaatgggatattttgacaaaattaaagtacacatttccaaaatatacatgctcttggaaggctgatagaaaattaaccttgtttgtagattaaatgctgcaataaatgtgttatttaaaatagtccttggctgggcgtggtggctcacaactgtaatcccagctctttgtgaggccgaggtgggcggatcacttgaggaggagttccagatcagcctggctaacatatataacatgtcatgtatatatatgacatgctatacatatatacacatgttatacacacacagataacatgttatacacgtatgcacatgttacatataacatatataacatgtacgtatacacacgttatatataacatgttatacacacgttatatataacgttatatatacacgttatatataacgttatatatacacgttatatataacgttatatatacacgttatatataacatgttatacacatatacacgttatatataacatacacgtatacacgttatatataacatacatatatacacgttatatgtataacatgttatatataacatgttatacacatataacgttgaatataacatgttatatatgcacgttatatataacatgttatacatatatacacgtgttatatataacatgttatacatatataacgttttatatatacatgttatgcctatatacacatgttctacgtatatacatgttatatatacatgttatgtatataacatgttatatgttatatatacatattatgtatatgttatgtatataacatgttatgtatatgttatgtatataacatgtttgttttataatgttttatatataacatacacatgttatgtatataacatgttatataacatatacacgttatatataacatgttttatatataacatacacatgttatatatataacatgtatatataaatgttataaatacatgttatatatacatgtatatacatatatacatccatatataacatatatatacaagttatatatatatgttatatatatgtattatatatgttttatatataaaattagccaggcttgctggcagttgcttgtaatccaagcttctcagaggctgaggcatgagaattgcttgaaactgggagacagaggttacagtcagcagggatcacaccactgcactacagcctgggcaacagattgagaccccgcctcaagaaaaaaaagtagtccttaattgaataaatttgtaaaataaacacctatatattgtgaatatttttccactaacttttttaagttgtttgaatctgaatagtattatacattcacaaagagttttcacatgcatctagtttgatcacagtaatgaccctctcaagtatcattttctttgtcattttactgtaagaaaaattagcataaatgaggttaagagatttgtccaaggatacatctgagaaatggaagacgccaaacttgaactcactgctttccaaaacatggtgggagttattaataaaaaaggaaaaaagtttcagtgtttaaacaattttggtaaacagtagattaagcaaactttccttactctataactttctagtgcgtttgatatgctaatgggattatgactttctatgaaggggttagattctatagactttcacatctagacagttgcagtagaaaagggaaatttgatttcagattgatgaaaggtttcttatttgagtgatggtgaaataagaatattctttagaaaaaaatgggaagaacatcaccgtatcattattcttctgttgtttgggatttccttaaatttaagcagagatgtacaagaaaagtaataacagaactgtttgccaccaccttatgtaaaataatgtctgagcctagatttaatggtctgctacacattttttatattgtctcctatcttgtaataaaagcaactcattttgagaataaaattaggggaaatatattgtctttgcataattgccacatagattttcttctttgccttgaaataacaacaaagattgtcagctgccagtgcaacatccttggagaatttgggaagataaatgattttcttatttagagacagaatgttctttagcaaatggaattgtaaatacaaaagactaataatggttgttaagggaaatgttgcaccaggatgtagctgtttgtagaatttttctcctctcagctcaattttgtaattaacatattacaaggattaaaaaagaaattagctaacattttatgtttttctagattgttgatgatcatagtggttataaatatttgtacggagtttttttgttctagtgtctagttgtgtagcataatcagtttaatggttaagtagaggcatgttcagcgagtatcagcttccagaaagatgacagactgacttaattcctcaccccctcacttcaaatgcgtggaaattctgaataaaatataatttttaaaagttttaaatacacagctgggctatggtggaacctctcttccctctgtgtgccatgaatgatcaaatcatcttacgtgaaactgaacctggattgagagcctaatggctaggaagaagttttcaagaccttttaggacaaaatatgtgaccttcaacaacacataatatagaggtgaaaataaaacccctccttaaagtctgaattttcaagggcttccctcagctgtaaaggggaataaataaatcctacccacaatggagaagaggcattatctgtagtgataatagcttaggattttcaaaacttaatagaaattccaatactccgattgggaaactgagcaaatctgaagcagaaaagattattaaaaaaaagaaatataagtatagatcatcactatgagacgatgaatctgatgaatccaaaaaaagcaaagaaataattttaaatactgctgtatttccttagaaagtagtgacacttaaaatggtacctggttttagagcaatgatagaagccagaagacggtagaataatattttcaaaaacaatgaaagaacatccacgtaggaacctagaattgtgtactgatagaaactctctttcaggaataacattgaaataaagatcttttcagacacacagaaaccgtttactagcataaaattccctttagaggacgtcaagattggtctttaagcaggagaaagatacaagatggaagatttaagctgcaaaagaaaatgatgtgcaaagaaaatggtaaaaaaatggaaaagtcttaaataaacatttaccgtgtatgaaagtgtctattaaaaaacagaaaaatgctggacatcaatgaaacatgagaaggtggttaagtttttcatccagtttacctgctacctttctatgtattgtttctcagtttccataggtagtacctacttctctaatgctgaaatgcctcagtgctcagtccttgggcacttgccatttttatttattctatatatgtcttgctgttttcatccagcctcgtgacttgattaaaacaaaattattcttttcccctcaaatgcagtggaagcaccgttctttcaaattttcagagaaaaaaaaaaatctacgcatgctttctttagcctatctctacacaatacacagggacaacatttgaaaaatataaaccatatttaaatctgatcataatccttcaatgaattcccatctatttttaagtgaaatccaaaactcttcatgaatttcaagggatatctgacctggctggcccacttcttaactcaggccttatctcttaatactttcctctgctccacctatgttgacccctttgctgctgctttcacagatctgacatgcacccattgcattgtgtgctacctctgcctaaaataatcctcccccgtttctccatgtggctcttttcgtttctgccttaacttctttactcaaaagtgtttttttcaatgaatctttctcatgtgtgcacatacaccacacacacacacacacacacacacacacactttttatccatgctttcctcatttatttttctcaataaagtgcatgaccaggaaagttctcaatattttccttctttatcttcttgagtatttatttccctacctagaagtagagctccaacccaacaatgcaaaaaaaaattgtctttttttcccactgctgtgtcctcaacacccaaaacagtgactaggtacacagtatatatttgtttaattcataaaataagtaattaatcaataatgaataaagcaattttaagattctcttagtgcttagaatgaaaacttgcaaaatttcttgtgcgtgttaagaattttatactaatcattaaatcgatagaagtatacaatttttgaatagtagagggaaaaataaagacaagctattaagttaaagcaaataatccaaatagaaaactgaggtttaagaacattaattgaattcatcaagggtagtaagaaactatatgaacataggattttgtgttttccgaatatctctagtccaaagccatcactatgtataaaataagatgttaattacagtttaatattcttgtaagtttaagcaaatttaccatttatacgtgatttatacaacatattacctcttgaatattgtctcaaatgactggcttcaagtagcacgttaaataaaaatagtagaataaatgtgtcaagctacacttactattcacaattattttatagttagattatggctctgttagatatacaattttatatttgcttatcttctgaattaatgttacagtaatagactacagtcatcatgcaatgtgttgtcaaatatattaataaacataagaaaaaacatagtaatatactgtgtcaaatttttctatcaagtggaaatttagcacattcttcaggaaatattgactgcaaaatctatgattaatatatttttcagaaatattggatataaatacaaaatgaagtgatgaattattgatatgtgcagttttactatcatataatgttactgataaaattaaaaaaatataactcatttttagcatcagatgaggaaacttggttcactaaagttagtattatctttatttgaatgctacaaccttgaaaaattattacatttgatagaactatttgggaacagtttgttacttctcattgtgactatggacattaatgggatgcccatattccttccattcccttttcttagcatagtggaaatgattacagatatcagttatgtttcttgactgatgttacagtcattccgcattatgaagtatgcaagactaaatttttacaaagggtatctcttatccttatgatagcctaaaaaggtgaaaatttgtcaagcaggtttcctaagatcctataaaattaggggacagggttccagcatcaagatgtagttttacttattgaattaacacagagttttgttgatgattttctttgatgatgggggtagtgatcgtggtattgttttattacattggtttcttcctttttttgttcatttttaatgggaacctcccaataatggtgaggatgcagttaaatggtaactccatacacttagtgtgagtctagaaataaattcaagttttattttgaatacactgaattggtatttctttcattgaataaacatttatctagtgcctcctaagtgccagacaacacaaaacgtaaaataccattggcaaatccatagcaatcatacaaaagacgtgatatttgataaatataactcatacaatgaagaaaaaaaagaacaagaatttatacacagcaatttgacctccgtttgcaacacaacaatataaagtgtaattttctccaatctaaatttgctttgaaaatatggaacaccagctggaagggagctcagatggcttctgcagtggggttggaaatatccttctgagcatgtccagaacaactggttaaaaataattaaatcacttgcaccatctgtgaatcattctgattcttcaatgattacttaagactctcattgtatggaacatattctgagaacagatgaataaaatctattcaagtgtatattgttttccactttgattttcacaaaataaaaggattataatattttcaagttggtaagttatctgataattctcctgccctcctttatgatccagttgcttttgaaataattaaggtttgtttaaaatttagttttatgaataatacaaattcacatagccttgatgttataacataattttgcttaaaaacattctatcatttttaccctttatttaatcttttgagtatagtttagcacccatttagtaacagccaagagaactaaatggaagtccgaattgattgcattctcaaatttagcaccatatgctataatcatgagcagtttttaaaattcctaaatagctattttaacgcatgtaaaacagaggaaagctatatttagtggtgactaatccatggatgaaagatgcatggattaaatataatccaagtgcccatatctgtacaaacttaagatgttcagataatttggaggcattgttaactgtttttctggatatcagtgcatgggcacttctcgccagaataaattaactggggaaagttccagaaggtccataattttccataataattagtgctttcttagttaatagactatctgggtgatgaaaaataaatgaattacctaacaaatacagttatctataacatataactccatctgtgacccgtataaagctcaaaatgtgttaactggttagtatctagacaatcataaacacacatgaaacatgaataatatcggtcactatattttcatttcttgcttcgtagatacactcgagtatttcatatgtggaaaattaagagatctagtcctcttcatatattggcctccctaatgggaaagggtctctttaatctgctacaaagccctcctcttctttaaacttgccaagatgtcttctacctcaggtcattgcaattatgtttcctttgacttgggcctctatttctggatatttccttgctggtctcccgtcacattgcaggatgcagagtgaacattatctccacaggtggcctgccttcgacaacctattttatgtcgttcgccacatccattctatccttaccatcatgctctagaacatcagctagacgtttcccttctaatatttactgcaatctgcaaatgttacctttgcatgtttacttgtttataatttgtctgctatcattagaatgtaggcttgatgaagtcaggagcctattctatcttgttagtcactgtttccccaagacatagagtctatcacagagcaggtatttaatgaaagtatgtggaatgaatgattgaatgaatgaatgtataacatcttcctgtggaaatccctgcagtttcagagttggttgttctgtatttttatgtcagtggtatcctaatgccagtctgccatggtccagaagttttcaatggtccataaggaaaagaaaaaaaagagcaattttttatttagcttttcataaagcaaagttttttaatgcaagaattgtcctttctttcaaaattatgggtttcaacagttttggaggtattaaaatggcctttctttttctttcttctcattttgttacaatgtcctttactagaaaaagtaaagggcagaacttttgtgatgttccctaatagttttttttttttgtaatgttgttattgacctatgaaatacaatgtccgtaaaccaccaacttagataaatttatttacatgaaggaataccattcctgctaagtttctatattggttgcttgaagtttcagaatgaggaagagaaagcatgaaaaccatcacctcctatatgtatggcctgttcggcaagcagtactggccccataacagttatccactggaataacattcttgaatttattttgtcacatgtgaggagcaaaaacaagacaaaatacacaaaaaagagtagaattagggtatcacgacatttgtctaacattgttcaacgttaacacttacaaataataaaggtaccaaaatggtattttcttgtgtataaatattttcatcctctggatttgaatctgtttttgtttgttttggtgatataaagaactcataatagtatcatttcctgatgatatttggaatccaaaaattaattcaaaacagaagtattacattttctgtccttttcataattgtaaacaatgcatcaagatcaaaaacttaacaaaatgcgttaatgttattatgcatgcttttttcacattctttatttcccagtgatcataatgactaataattaacataattatttgtgattgacaaaagactctaacgttcatcattttagttaattattatttaagaaataattggtctggatataatataagccaattaaatttgtattctgaaaagttttgagaagtgaaaaaaaatttattttttatttggtaaaatactttatttctgttgtagctgcttttacaaggagattgtggggaggaacagtcatatccaagttctcagttaattaccttttcaaaatatatgatctaaaatggagtgaaaattgattgtgtcaatatgagtttttagagttaaaacttgtaaattttctggacagaatagaacaattttatattggaatccttgccataggataatacaatgactattatttcctggaacattgacagagaacaagctattttaggagaaactatctggattgtaaagtagagcacattaagcctaaggtgtcattaaattcacaaaacttttaaaaaagaattgagcgtaatctttggtaagagaaaaatggttttcttcagtgactattaccatattttgcaaagttataacctggcaaaatatattattttgggaaaataatattaaatataaccatttctatacacacagtggcactttatttattcagaggtcagatggatatcattttaatttacctgcaacacagccaagagtcaggaatggagtagaacaaaaggcctctcgattcccaaaattgattttttaaggttcatgaaatccaaagcttacttatatttcattatgaaatgaatttccaaatccttttttggagattttttaaaaattttgctttgattaaagaggtaattctaataaacttaattatctctttttttttttgtgcccctagtagctttgaagtcaaaatgggacagaaggaataaatgactgaaacaggagataatagctgcagcctcgagtaaggtgaaaaagaacctatatatatggactcatagtttggggaaataatttagcacagggcaacacagatgagagagggagggatggaggaagggagacagagagagagaacagataattagtgtttatttcattttatacttatggataatttaattatttcaatagtttattcatatagttaggtaaatactttttttttttttttgagacagattctcaccctgtcacccaggctggagtgcagtggcatgatctcggctcactgcaccctctgtctcccaggttcaagtgattctcctgcctcaacctccagagttgctgggattacaggcaaccgccatcacgcctggctaatttttttatttttttagtacagacagggtttcaccatgttgtccaggcttgtcttgaactcctgacctcaaatgatctgcctgcctcggcctcccaaagtgctgggattactggtgtgagccatggcgcccagcccaaggatctttaatatcttacctatgtgcaaaagtgtttaatacataatgccatatggcatattagcttcctaaatcacataccactgccaccagctaacttatatctctatatttacatctgaggctgcataggcacacataaatgtattcatatatgttacacatatgcttatttatgtagctatgctatatgttatttgctatttacatctattaagttacttagcaaaatatgtcctttggctttgaaaaaaatgcctgctgaactcatcaagattatgatttttgtaggttattctccatcttttagtcgagttcctaaagttgtgtttttttaactgcctgctttttattgcaggtatatgaaattgttgtgcatatttcaaagaagaatagaatgcagggtaactctcaaacttgttatttggaattaggtcagataattttgtaaatactgttatcagtatatcacaatgtcattagtgtcccttcaagttaagggcatggaaataaagatggtctaatgtgccaggccaaagaggaaaacttttcagcttagcaaagtgacttcaaatacatggggagaattgaagcagtcatttcaaatgcaaacaaaaagttgtatttttatggattacaatatccttagctaaatgtttactttggcttgggtatttttctcattagtgatacttatttaattagttgcttataaattgaacctgggaagtgtagtttgcagtgagccgagatcaagccactgcactccagcctgggcaacagagcgagactccgtctcaaaaaaaaaaaaaaaaaaaattgagtacttaagatcaattaaaatatatcgagtattggatgctgtcacataagagtgctattagccattggctgttaaatttcctcatctccaggaatctcaggcacctaaaaataattctctttacttcatgggcaacagcagccactagtctttgccacgactcttctgtcaattgggtatgcagtgaggggcaccaatatggttttaggtgatgatgtgaaattgtttcaaaatgctttcattctcccttctgaattttgtcttagtctatgcttccataatattgggagccaattagtagtacatgccttcctgcagcttgaatagaagtgaagtctattatgaacaataaagtcaattagagggggccatgcctactgataaatatgttatgtaaagactcaatttaccttgaaatctgtatctatttgcatctactctttagtgctagttcagagctctgtgcgattattttaaatgtattgcagtattactttaatcaattaatacaaaggtagattaaggaaactttactactcttcatttcttcattctgctgattcctccctcactgaagcaaaaaaaaagtctacaatttagtctttaaaaagtctatagtttagtcttagatatctctttgtactatattccatatactgttcattcttaccaatgaatagtatatatagatatattttacttttttaaaaaatactgctttattctgtgtattattttaaatataacagtcaattagaaacatgttcccaggtaatgtatatagatcttatacattctttgtgaaagtcttagatgatgaatcaaaatgtattctattattcttctacatttctggattattatattttgattagaaaaggtggcctatcaaatctttctttttgatgcttttaaaagtttcctctctatgtaatttttgatgtcccaagtaaataggagaatatgctttttccagtgtgcacaaaatacggattaaatttagcttgtcggttttaaaccacctctattcttgttttttatttgtattttttgtctattttaatctaacaaattacagaagagttgtatgtaaggtaccaactacagctatgattttatcatgttctccttttatttctagtaatttttaccttatgtagaatgcacccaattgtttggggcatagcaattaatgactactgtgctttgggaagaagtgtgatttttgtcattacaatggttctctgagacccatttagtgcttttcggtcttgaactatacttcatttgatgctattattttgactttcactttttaaaaaatggttttctaaatcaccattaacgcagcattgtgaccttgtatttttatgtttcttgtgactttcactttttaaaaaatggttttctaaatcaccattaacgcagcattgtgaccttgtatttttatgtttcttgtaaacagcctatagatggagtgtgcattttaaactagataattttgtctttttaacttatgcaaatatttttacatctttatagggtacatgtaatattttgctacatgcatagaatgtataatgattaagtcaggatagttagggtatccatcatctcaagtatttatcatttatatgtgttggaaatagttcaactcctctcttctaggtattttgagagatacaatatattgttgattatagtcaccctactcttctttcaaacattagcacttactctttctatgcaactgtatgtccgtacccagtaaccaatctctcttcacccattccgcccacctacactcttcccagcctctggtatctataaaaaaaaatcacatattcttaccaatacgtgcttgatcttatgaagatataaaaatgatagatagttcatctttagatgagacattttaaccaacttcatttttacaataactcttataactgtgtctgttttaattccttgtcatattgatggtcattattttatcattttatttactcttatcccttgtctataattttataattcatcatcttcttcactgcactctactgcatctcttcccgcacttataggttatttataagttatactttgtactatcattttactagtgctgtttcccattttaaacaacaattttatgcctatatttctgtagtgttgcgccaaaattaaataagaacaatgccctcatcaccaagatgatttacttagtcaactcctcattattttcaatcaaaggcaaaatcctttaaaaagaaataatttataattttatttcctggctactattgttttcacttgtagtatcacatactagttcaagatgtcatgttattacttaaattacactatcacttcataaaatttgaccacaaacgacacaaggtgtatttcctgtcactgtttttttgtaccgtttatttctcattgttttgaaatctttattacacagtcatccttcagtgtctgtggggcactggtttcagcattttgatatcaaaattcaagaatactcaaattatttatataaaatggcatagtgtttgcatgtaactatggacaccctcctgaacacttcatatcatctctagattatttatagtacccaatacaatgtaaatgctatgtaaatagttgttatgcagtattgtttagggaataatggcaataaaaatgtctgtacatgttcagtgcagacacagccatccatgtatttttgcaaatgtgttcgatcgatgactggttaaatccacaaatgtggaacccatggatacagagggccaactgtacttcagttttaatttggttggaacacatgagaaatgtcctcgtaaaaacataaaggatgtaaactttgtaaaccttgcattttcgaaatgatctttgctttgcagtcatcatgatggatttattggatagtaacattctttaatatctctcctctttttttagtagtctctgtaggttatgaacaattgtcttccagtttccattgttttcttgtttcaactatcttcaagctactattgtttccagtgtaaagtctgattctagtccaagtatcatttatttgtatttaaccttttttctttctctcaaactctaaagttgctgtctgtcccatctattgaagtacagaaatttcattaagatataattttaaatgtttctaaatgtgtccctgtttattattttattttattttattttgtttttatttttgagacagggtcttgctattgcccaagctggagtgccgcgatgcaatcatagctcactgcagccaccaactcctaggctcaggagatcctattgcctcagcctctttagtggctgggactacaggccatcagtaccatgactggctaatttttaaaacatttgtttgtagagatgatgtgtcattatgttgcccaggctggtcttgaactcctggaatcaagtaatcttctcacctcagcctcctaaagtgctgggatttcagttgtgacccaccacttatttaattcttttttgcacttgggtaacgttttaaataaccaattaatattaataacttctttagctctggaaaattttctattatgattgttttaattattacaaatcttccatctcttcttttttctcattctggtacttatcattgcttaataggtatcttagatctgttctctaagtctcttattttttcactattaatgtcagtttatttctatttgtctttaaattgtgatatacttcttctggttgactgtaaagaacccatattttatttttagccatgatcattctcttttctaagttgtctattgttatttaaaaactaggtaacaggctttctgtgctctaatgttaaccttttaatgtttctaattttatttttattaaatgtaccttccgtatcttctagtatactacttgtatggactctcagctttgtctttctctccagccccttgtgtcttctgaaaaagcctttgctttattttctctcatgcctaagtcaaagaatgtaaaatgtcttggcgcaaatgcagttaaggttttgatattttgatgcatagtgattgattgagaagcaacatggatactggaagttttgttgttgttgttgttgttttgatctgatgaataattatttaacaagctgaaacctattcacaaaatttacatatgggaaaacatctctgatctcatggacaaggggtggaagtaaggctgtcctcaaccatgtagtacagccactctccagtaatgcctgcatgaaacaaactagcaggtactgacccccttcttaagtcaaacagatctccttaaatcaatggtctccaacagatcattccacatatatacttgaaaaccatcagatccatcatttctgtctcagatcgtgccaagatacacataactttgaaatatcaccagttcatcatcattctctcttcacctgcaatttttttttccataatttgaggtcctgatacatatattcttctaaattgtagcagttagttgtgattatcttgacgttgcatggactcagttcaaagtgaaacagaaaacatatctacgatgtgatttacccattctcaacatttctattttgtgtgtctgtatttgcacagacacgtacatacatacatgtgcatatatataattaataagctttgaccatataaataatgcaaattatgtataattcacaataataggtttttaaattaattatcttcagagttgagtgagattacttacagatttaggctgtgtctacctgaaaacaaaatacagtgtattagcaattcagtaaaatcaattggatatagaataataacaaattagttgagttttcaccttgtgacattttagtttggatttagtagcctgtctaaattacctttgtgaaaaaactaggctacaagtattttctgatagatataataccagcattagaattattcatataatcttagttttcacattatttaaaatagaacacattgttatattttaataagcaatttgaaaaagaaacaaatctttctttcttgtatgattgccattataaaagaatattaattgagtgctcattaggtaactttaaccacattaagtactagacagccctttggacagagactgagtagaataaaaaacgattacagaacatactttggtattaaccttttctataaataaaatgtattgtcattctctagattagcactgtcctatagaactttctgagatgatggcaatgttctatatctacactgtccaataaagtagctattgaggctactgagaacttaaaacatggctagtaaaaacagatgtactaagtttttaattgtatttgcttttaaataatttagatttacatttctttcgtcaagtgtagctaatgactaccatacgggatagtgtaattatatgcatctttactatcactcgcatttctaatgaagagaatacttccttgaaaaacataattatgacacatgcatatttagacatagatactgagttgccgcattaatctagagatagtgtccacattttctgaggggtgtgacaaatgtaatatagaaataaaagtgtgagtttattctgaaaaatctactcaagttgacagatccacaaggcaacagaagttaaaagcgatataggagggtgaaatataactgcagtatttaaggtctttccatacttattttttcttgtgttacttttattttcacactgaattaagtataagtatgtgtgtgaggtggagggagggttcgatttgcttgtcaacatacaaaaagattgctatagcaagtattcccaagctgaaattttggaatagcttaaaataaaaaatatatactagatatgtaaacgaaaacttttatgagaagagtttgggaagagttatcaaaggttaaaatgattttttgaatacaagtcttctcatacccttcaatttgctaatagacattatgatacccatgaagaagctaaaatcagtatatcttaatatcgtctatatgtcattacctcaaataattgcttatgtttgtattcaagtataatgagtcagattagtaactaaaagacaatttaaggacctaagcacgcatgtacaatagcatgtagctaatgtgctatgaattgaagaaatgcgacatagtgaaatcagatataccttttaaatctatgacaataaagattgcattataaaatgaagaaaatattcctgtttgaattctgaatattcctaaatataaattataaatgtaaatcccagcaattgtaaccacatatctatcttataattatcctgttaagttgatacttgttttttcattaatttatccaacaaatatttttgataacatactgtatgctaggtactaggcatgagtctttgctgcatttattttttgctgccttataagttggctagggtgtataaccttatctattaatttataggttattttttggagatggttttacaaagcaggccatgattgttggtgcttatatattgctgcttatgtgttgatacttatcttggtggcaaccaaagcccttttctttctcttctctcacaggccatacttagtgactaaaattttatcaagttactaatttatgttaattctttgaaaatctgtataaaaatgcaaatgttgtcctttgaaacgaaagactttaaaccactataagccattaacacattttccagattcagtttatcagcttaatttgatagtaattgagcttggccctgaggaattaggtaaatttcatggtgtagaaagtcagaatccacatgaggcaggtcaatgagcaggtctgtccagaccttttacataggacactatttatacctggccttctagaagcagggtgtatttaaagactggcaaatccagcatcatctgcatatctttttcgctgacagcctgccctgctttaaaaattaattctaactttagaaaataaataatatgggcataaaggatgattttctttcatattttaccttgactattttgtgtatgttagtgagttttattctttttaaacaaagggggtaaattgttcattgattctgaataattattctgagatggacaggccctttttttggttacatagcttcacataagcaattttttagatgatgcaataggaagggggaaatcacataagagcaaacactctctcattgctattttttctatgcacggtcataaccaatatgcttagactcattagattgattattcaacatctttctacccagtgacttgactaaaacagacaaaacgaagtactgtcagaatgctgttattgtcatgccattatatgtatccaaaacagtgacaacgcagattaaaaccatacccgtctcacctgcatcatgttgttttgtttttatgctttattgtttggggttttttaatcaccctggaccaatacaatatttttgcctaatttgtttgtgatttgcatttttatgcttacaatgcctattataattgtccaggagaaataaataaaaaatctctcaactttgtttattactgtaatgattcctagaaggaaacttgtctttctctgaagacttgtggggctaagagacagagctacttgtctaagacttaagtctttcccattgccttttcatttatgacccatcagaacctacttaaagcctgcagtcctattttggatttacatatcattgtgttattacttttaaataatccataatatttaagaatgtccctttgaggaaagataatcagatacaaactgacatactttcatattatggctcatagattttcatattatagctcacactaaatcattaataaatcttactttgaggatttgcttattttcatcttcattaacaccaacgcagttaaaaaaaaaaaggctccatcactattttactgtttttggtcaagataatagtctatttttgttacacttttgatgcattgatatatttttcatgtgccatatttatatgagatatatagttattttgtggcatatgtcataatcatatgtcatatagcacatttttcttcttgagtttctttgacctcataactcataaatgggccagtaacctcaatgcatttaaaggagaaagaagtcttttaaatcatggaggaaaacattttgtttaaaaacctagacataatgcaccatttgtttcaaaacaggattgcttttatcctttgcagttatggcccttcaagaaacaaattttatgtaatgaaaagaatgtgataacttaagtttcagatgaatgaaaatgtattcaaaactttgtgagtgatacctgtgcctatttacacagctcagaatcttaaaactgttttgactttaagtttagatcatacaaatcataattgtgttctataatagtcattaagcattgatcgaacttttcatttttaaataaaaataggcattttatggtttctttcacatatctttttgtttctagaaaatgaggctagtatattctttggggtatatatggttaaaaatgaaaataaacacaaagaaataaaatgaattaatcagattatagcatttccttgctaatgatgcatgagtatctataatgatataaggtggtaaagaacattaacaaaagcaagttgattttcaaaaggttagacgggatttgtacacatcagaactcagaaggataaaattattcaaggcagagttaatgaaattcaaatgaaaaggattaatctgaatgagtacctggattttgcataaagaagagaaaatgaacatgatatttctaattacactgatttttaaataactgtctgaaatttttattaaaccaaactgaaagtcattcaatggatgtagttttctcattatagattcgcatgactgtgtcaataggaatgctatacttttaaggaatagatagcaaactagatctccaaatgtctggttctcttttgattcaatttctggtagtttcttgtatatgaaaattacaaaaaagtctatatattaaacattattgtatatatcagattgctataataaatgagaatattcaaacttaataacacggaattttctagaaaatgagttcacagtttcccagtggtgtcaaaaagttattttggaatatttctatttctcaagaaagttcacaggatcaacccttagttttctctagtcagctgatctgtaccacttagtgtctgttatctgtgatgactggacactacgtatcaagatagtaaatctttcaatagatccgtcttcattaaatatatttaaagtataacattaaccttttagactttataacgtatagctgaactgttgcccataggtaattgtaatgagaagcatcttagaaattacaggtattctaatttatctttataatggaaagaaaaatttttgaaagattacttaattatcagtagttgaggatagaaatgatttttctcattcagatttttctaaagtaataaactatacctttttattgattatgttcaaccataagaattttaatatttctaagtgttctagaaaatgtgttcatgccatggctgagcatgtagggattatttccatgtattgacactggttgctctatggcttatttgtgacaatcttgaaaataatcacaatatgcatattattagagcattctcaacctgcagttcaatggctaatatttcttttaagagtatttcgatcaggttaataagagcttcttcattatttaaaagtttgtaaaaaatgatttctagaaccagatacagaattacaattatttgtcacttaggtatctaaaattttcttaaaaattgaactcttgtacagagagtaaaaggatgattaccagaaaaattggcaatttaaatagatgccacataacactcttctaaaagagattttctttgaaagataggtgaaaatggtttttagtttaatgttctgaagaatatttgttaaatcggtatataataatctatggtagacacatggggtcaggtggagagaagcttaacagatgagaagccagggtatggtgtgctgcctacattctttaagccctggtttaggactatgattaacactggatcttatttgctgagacacagaattctggtctgagagcacgaattattattttctaagtgaatctaatttttattttatccagtgtcactgaatgattttttctttttttttttaattatacttaagttctgggatacatgtacagaacgtgcaggtttgttgcataggtatacatgttccgtggtggtttgctgcacccatcaacctgtcatctacattaggtatttctcctaatgctatccctccccttgccccccacccgccaacaggcccctgcggccatatgttttcattgttcaactcccattatcagtgagaacatgcagtgtttggttttctgttcctgtgttagtttgctgagaatgacggtttctagtttcatccatgttcctgcaaaggacacgaactcattcttttttatggctgcatagtgtcccatggtgtatatgtgtcaattttctttatccagtctatcactggtgggcatttgggttggttgcaattctttgctattgtgaacagtgctgcaataaacatacgtgtgcatgtgtctttatagtaggatgatttataatcctttgggtatatatccagtaatgggattgctgggtcaaatggtatttctggttctagatccttgaggaatctgcacactgtcttccacaatggtggaactaatttacactcccaccaacagtgtaaaagagttcctatttctccacatcttctccagcatcagttgtttcctgactttttaatgatcgccattctaactggtgtgagatgctatctcgttgtggttttgacttgcatttctctaatgaccagtgatgatgaggtttttttcttatgtttgttggccgcgtaaatgtcttcttttgcgaagtgtctgttcatatcctttgcccactttctgatggggtcttttttttcttgtaaatttgtttaagttccttatagattctggataatagccctttgtcagatggatagattgcaaaagttttctctcattctgtaggttgcctgttgactctcatgatagggtcttttgctgtgctcttcagtttaattagatcccatttgtcaattttggcttttgttgctgttgcttttggtgttttagtcatgaagtctttgcccatgcctgtatcctgaatggtattgcctaggttttcttctagagtttttatggtttcaggtcttaggtttaagtctttaatccatcatgagttaatttttgtataaggtgtaagaaaggggtctagtttccgttttctgcatatggccagccagttttcccgacaccatttattaaatagggaatcttttccacattgcttgtttttgtcaggtttgtcaaagatcagatggttgtagatgtgtggtgatatttctgaggcctctgttctgttccgttggtctatatatctgttttgctatcagtataatctgttttggttactgtagcattatagtatagtttgaagtcaggtagcgtgatgcctccagctttgttattcttgcttaggattttcttggctatatgggcccttttttggttccatatgaaatgtaaagtagtttgttctaattctgtgaagaaagtcaatggtagcttgatgggagtagcattgaatctataaattactttgggcgctatggccattttcatgttattgattcttcctttccataagcatggaatgtttttccatttgtttgggtcctctcttatttccttgagcagtggtttgtagttctccttgaagaggcccttcacatcccttgcaagttgtattcctaggtattttattctctttgtagcaatttttaatgggagttctctcattatttggctctctgtctgttattggtttataggaatgcttgtgatttttgcacgttgattttgtatcctgagactttgctgaagttgcttatcagcttaaagagtttttgggctgagacgatggggttttctaaatatacaatcatgtcatctgcaaacagagataatttgacttcctctcttcctatttgaatatctttctttctttctcttgcctgattgccctggccaggacttccaatactatgttgaataggagtggtgagagagggcatccttgtcttgtgccagttttcaaagggaatgcttctagcttttgcccattcagtatgatactggctgtgggtttgtcataaatagctcttaatattttgagatttgtcccatcaataactagtttattgagtgtttttaacatgaaagggtgttgaatttatccaagaccttttctgcatctattgagataatcatgtggtttttttggtcattggttctgtttatgtgatgggttacatttattgatttgcgtatgttgaaccagctttgcatcccagggatgaagcctacttgattgtgatggatatgctttttaatgtgctactggatttggtttgccagtattttattgaggattttcttttttgttgtgtctttgccaggttttggtatcaggatgctgctggcctcataaaaagagttagggaagaatttattttcttttgtattgcttggaatagttttagagggaatggtaccagctcctctttgtatctctggtagaattcagctgtgaatccgtctggtcctgggcttttttttttttttttttttttggttcgtaggctattactgcctcaatttcagaacttgttattggtctattcagggattcaacttcttcctggtttagtcttgggagggtgtatgtgtccaggaatttatccattttttctagattttctagtttatttgcgtagaggtgttgatagtattctctgatggtagtttgtatttctgtgggatcggtggtgatatcccctttatcattttttattgtgcctctttgattcttttctcttttcttctttattagtctggctagtggtctatctattttgttaatcttttcaaaagaccagctcctggattcattggcaaatctcatttttatttaacgttcctttctgcaaataccaaaatagtcaaaatttgggtttgaaatttcatttaaggaagttaaatacaagttagcagacaaaagtgagtatattttgagtgtctttttcttcattatatttgaccatacagctaagtttcttgctggctataatccacaattactatatttattaagcaccaatatgaatttaagatagctgagagcatctcaaatgaaagtaatgaagactgagaaaactacatatcaaagaagaatcagaaaatagataaaaacatcttagaattatttttcttttaagaaaaagtgatgaggacatgcatcaaaacttttctgaattcccactgcttttgttaaggccacccagatttttttctaaatattttcaagatatgtccaattctgaaacaactcccttgattaaacaacaaaacaaattaataaataaatgaaaaactacaacttgtcttctacttactctgttcctgataacaaaaacctttgttttccaaaaacttacaggtgtaaaatgtatcattaaaggcagatttaattgcaccattaaataagtattataagaaatacgcttgctttagatgatgtgaagctatctttactgcaggggttatagcaactaacgtgaataagaaagacgagcttattaacttgtaaattttattaagaacaacataatggtcaccaaccaatgtaatgcgtgcaaaacacaagcttgtgttacttgtgctattgattctactgtttaatgtgtcagtgaaaatttcacattcaaatagcctgctgagttatttttcttttaaatgtgtaaaatgcttatgatgaaatagtgaaattaagaatttcttaagaaatctgttaaattctgaattttatttatcaaactctggctcaagtttctaatatccttttaaatgtaaatgagaaatatatatacattattccattgaacatgaaggaatgtgtgccatggatttggcccagatatacacaataaaacaaatgttgtaaaaggtataattatttaatagctaatttgtgcaattctgtgaatttgctatatcacaagtagatgagatatctaaattagaattacttcattttttatatcatgtaagaattgagtatgaaaatcctaggtcagagaaattaaaaacaaaacataaagtgaccagcttgtaaattttactcctctttgtgtggggttcagtctagtatccccaaagtccaatgtattacattactgcaaaaataagtatggtgttgtcataaaaggctgtgcagtaataaatggctacgttagcatgcttatcgtttgtacttccccagagaccctaccactgaaaccctcaggtgacctcatcaacaggcaggtggcagttgatcaattctagacaaagttattgggagaataatttcaattacaagaattttgctgcctatagtgtagacagaagagagcacaggtcatccatctttctgaatttgcctgccaagtagtatttattttttgctcttataaagaatagggaaagatgtattactgggaaactccaaaaggactctggagctggaaattctcatcatgtctagcacttggatcccagtcagaaaagtgtaggtgcaagagaagaggctagtgctcccttatatatcaggacattctggagttctttttaaaatataaattccgcagtcagttctgctcatatagcagcttcattagcagcttaacttagcaagagactagcaacaaaaacaggagctaatgtctagaatttggaggagaagagggcttaatacaaagttacataccagcctaactacttcgtatctgttgtatctcagtgaactttcctatagatacaggaaagttgcctgtgttaggaataaaacagatatgagtccccctcacccaatcccatatctagatttccaggaaaattagaattttaaatgccagttgcaaattagaattagaaatttaaatgccggttgcaaaaatcgtctttttcttaggataaaactactctccttatgacctcatggtctttcgtcttatatttatggtgctaatatgtgtgtgtcacttattatgaaatgcttttaacactttctggaaaaagtaggtatataattaataaatcaccgttttactagacttaccatcgtgaggttttgaatccattttcagcccagtttgtagattcaattgtcagctgtagaatgagacctatataaacttaatggaggaggtttcactgttaggaagctaaaaaaaattgttcttttgtatatctataccagcacactgtccgtgaagaaacgatgatggtgatgactgaagacatgcctttggaaatttcttatgtgccttctacttatttgactgaaatcactcatgtctcacaagccctattagaagtggaacaacttctcaatgctcctgacctctgtgctaaggactttgaagatctctttaagcaagaggagtctctgaaggtaaaaccaaagcactttcattcgtattttacaaggtgatcatactgatcattcatagtgccagaacaattgacttaaattgtatgcatcatgatggcattttgactttcacatggaattcttaaaaatacttgatagtgtggttggcttcagaaatctagggtagaaagacataagttagaaaatgtattttacaatatttagctttgagagacatcctaaaatgaagaaatgcacaaaaatgatcatttttacatgcagtagggacagaaaggaaccaccagtaaataaactttgatggaagaacagtttattcctagttaatggatgacttctgtttcattttccaaaaagggaaattagatttttcatttatatgtaatgtatattgtttttgttttatattttttatgtatacatattcaatttcaaattaatgtcaatacctgtgctataacatatggaataaaattgaatagaaatcaataaaatattttctttataactgccagttaaaggctaccaacaaaatccagctgttttcaaaccaccaacagcaagttactaaattctcaagtaaggcaaataatgatgatgaaataggctatgaatttcagaaggcagtgtctgaagataaatgaatgtaggatcaagaaaatgcacataataatgtgtctccagataattttcatgatcgtacattttacactcaaaatgaaatattatagtatacccagagcttggtattttcaaatgcaaacagtatgtgattataggcaaaagatgggtttgctatcagcagcacatattagctaaagtattttatactcaaatggtttcctggaagctcattctatatcacacatttgcctgtatgaatatacaaatggataaagctatttgtttgttttggaaatcggtgttgcagtatcttcagtgacttgactttaatatcttaacattatatcaaataagctataaaattacacagtaaaataagagcttcacagatctctggaactattccatccatgtcagtgtggcactgtttcttattctgtttgaagtaaaagtcaaatcacttattggtacaatgaagaaaagaaacctaatcagttaataaaataaagctgacatgccagaattcctgtcattatttctattaactaagttctcatggcagcatagtttgtaagtgcatcattgtcattcaataagtaaattattgccaatgagctaatatccattccttcccaggttcatggacatttggttcaggagagtagtgaccctgatcttattaagttgcccattgaataactctgtctccatacctcttagcctggcatactcagaatgttagacccttggctacactcacagtgaatcatttgttcatcctgatctatttaatattattatagctgatgtcaatcgtaatagtattgattactgcggtttataatatggtattattgtagatttaatttagctaaatggttgaatccccataagatacagttgtgggcatgattccttctgtctcccaacaaatctccagcaggtgaatgggcttcctaccttcattgacttttttgaagggggatagttttgagctcagtcttttcagtgaatatgtatttcctgttaaaggcattcatcattgtcattatccagtagtaaaaatggaaaagcagtgcataaattgtacagctgctggttgggaaggtttgaaattgtggttgattttattcctgacagatatgcatgaatcaaattacagaactatagtaagtattgctgtgctttaacatacatcttttttgaaagtgcagtacaacacaaataatatgtaatatgttaaaagaattactttctaaacaaaatacaactaaaatagcacgtatggtttcaatagatgtattgaattggaaagctacctaatcatgttgacagagactatgcagataaacacaaacatatatatatacgtatatatatatacatatgtggaaatctgcatttaatagcaaaaacactagctaaggcagagctagagaagaatgagaaacatacacataagtaatattttctttcttacttcagagccaatattaacagttaattgattgtgattgcttatatgtacaaagttaataatactcataacagacaagagtacataattttagaagaattgcaattttttggaagtttagagcaatattaacttgcatttcatttttaagaaaaaatcattttcatgataaaattttccaaaatataattactgtgttaaaccgtcaaatcctgccttaaagtatctcatatgaaagcatgaacacagaatttcttagcatcgtaagttttaaattaccaaaaggttttctctggagagagttaaatatttgaaagcttatcctaaaagcagaaatgatccacttaaaagacttaactgaaaggatttatcatcatgtgtccatatgcctaattttactgaaagcatcagttttattggaggatgaaacactcttgggatgtcacccatatcatttcctgactcagcatgccttgtactctgactggtagctgccagatccaagtgtctctgactgtttgccttagggctctctctagtaatcaaagctcatgagtgtcaggtagttaaagttctgcatcccccgtgttccccagcaaacctcaaccaataacaaataacttttggtggataaataccactactcactcattcttcagttagggtaactctgaagcatgatttatgctctgacccaaaattctgttccaggattaagaccccatcgcacacagtaaaaacctgcctcataggatacatttcacttgctccctgtcctaccttacacacactttactagcacctccttggatcattcccaaagacatcccttgtcttcgaatctgcttataggggaactctatctaggacatttttgaaataaataatgacatatttactgtgtagttagcatttacgtagagaaattcttagaaatagttcatgcctttggagtggaattcttcaagtgattctgctgctccctcattcagggaatccttagctgttcaattaggccttggtatcaataaatgtgaatttttaggacaaaaataagaacatagcttataataagaatgacaactatgctttaccttttgcaataatgagaatcaatttacagctaatattattctttatggtagagcagaatgtcttcacctgaagaacatgaacaagacaaggatatctgcccacatcccttcaatattccacattgcactggagtttcaaatcactgaaaggaggaggaaggaagggaggaagtaaggaagaaagagagtgagggaaggagggagggagaattgaagaaaagaaataaaataaggagagaaacaaggaggaaataaatggaaggaaagaaaaaatatcaggcacacatcatttcagttgtctcatcaaaaccaattatagtacagatgccttgtttggaatgaataaaatgtgctatactttgggtaaccaagagggtgatgaaaaacgtggccatatgaagaaagctcacgggtaggagacatggtggtcctaatgtagattttaaataggatcaagaaatagagacaacccttgttcaagttcgagaccacaagggaaagctggtagtgagcttataagccaaagatagtgtgaagccaggtcgttcaagtcctcttgagttcaggttttttgcattgctcttgagaaacaaaaaattgttaggacaagtaaacctaaggaatgtggattcgtatattccaaaaatagttattaagctcttagtatgtaccacacactattctaagtgcttataaaacagtgaaaaagactaacgaatctttgccctcattcagcttttattataacattgggagacagaatagaagcaagcaaacaaagaaaaatgataagtaaatattgcgtattactaggtgatacgtattttgggaaaaaaaaaaaaaccagaatctgttaaggggatataggaccactacaggggtagacgtaggtataattgaaagtggcggaattgccatttcaaatagggtagaaatgacctttgagcaaagattggaagaaggtaagggagtcagccatggagtctgtgtagaggaaatagagtagaggcccaaatgtgggactgagcttatcttaatcaagcaccaacaagaaggccaaagtggctgaagcaaaacaagccagtggaagggtagaaagagatgaggatatgggagttgtgagtgtccagattgtggagggcctttggggccattgtaaagaagattctaaatgagatgagagcaattgtaagtttctgagcagttgagtggcatgatctcaatcatgttttaaaaggatcacactggcttctgggttgagagtagaactgtaggggaccaataatagaatcaacaagagttgaaaaagagatgctggtggcttggacttggtcggtagtgagagaatgtcagattctggaaatattttgaaattagagatagcagatatatttctctggtcatacagaaacttaagcatgtgtctatgaaaacccattctcggccgacttggggctgagttagaactttggtctcgtaaaacctagcagaagatcccttgagagatgtatgatttcttctcatattttagtcttcgattcttcagtcttgccttgaagtagggacaaaagtactggcaacagagatttttaatacactggttaagatctttctcctctggaatctgtttcacagctcttaagcacaaatttaataatcccaattagttaaatgaaggcaaaattatgccatgagcaaagtgactgcttttctattctggtattaggagaattagataatagcaagaggcaccatatgtagaaatccaaacaaaatatctgaaggaaaataaaagaacgattgtttatatgcgtattgtaatacaggggcatattacattgtttatatgcatattgtaatacaggggtatttaataatattggaataagaggacattgcaattactctaaataatcatggatcatataaaatttcaaagcaaaatttgtttgcaaatgctttttgaattcgagttgaattttctaatagtttaatagttctaacagtttaatgcgtggaaaagatgatttttattaatacattgtgactttgtagaaactgatcttttgaactatacataaacatttgcaataatgtgatcagtggtttctcttagaaaaattgagtttttcaacacatttatttggttataaatataatttgtttcttcaacagcttatatgacttgggatttatttgattgatttgctatatataaatgtgtgtattttcaaatattaatcattaactgtagtttaaatcatgcttaaattatttccatagtacattatttttcatttgtattatatgaaaagatttgtactatagagaagagattatagatatttactgcctttcagtcatgcccagctcatatttatatgtgcttcggtacagttttcttttatattttatacaaatctctcttgtaggaaattatccattctttatccccaaccattattttatcaagcctagcagttgtcctaccttgactattatgctgcaatttactcccaactctgctaaaatgtactttaagaacgcactcctactccttccattctcccagcagcactgttttcataatccccatcgtgtaaagtgtagaaagcagaaacttccatattaaaacttacaaatcatgaggctggtagaaattttgaagttgcagttaagttgtggggaggttttccttttattcacaaacggttgaagctgtgcttcgaccagttataatgtcgttttttatgtgtgatatataattactgattcgttatttatgcaaagacaatgcatcatcctatgaagaatattttggtccaaatacgtagctgtgtttagaaagtgttttctcacatggggacaataaaccatgaagaaaaaattaaaaggtcaccttaccatagagccaccaaaaataactttttaactttttttggaagctccgtaaaacctagttaataagtactttaatgccttttgattgaacacagttcccaattcgatatgtcattaatgtagtgcctggtagctggatgggatgtgaagagtgtaagaattagatttatatagggtgttgcctttatctgtcagataaagacaaattccagagagtgaaaatgaactggagtttgagtctttggttctcttatttctctttttccattttaagatagatctactccccaacggccgctgtcacaacagttactaatgggtttttctaatccttttttcttagaaatgaaagttatgtgctcctctgttaaccaagttacaaagtgtctcaaggcatttctgatacctaaaactgcttaaagctattattttcaccttcccaaaatatgacgacaatagtgcctagagttttataagtctataaacactatacatgcatttaagtatatgtataacccatgtaactgcagtgctacatttttcaagaaggtgatacatacacacagccaccaggaagaaaaattagtatcttgtttgttgtttttttcctccaccactgtatctagaactcctagaacagcacctagcacttaaaggtactgaatgtacatctgttgaattagtgagtgatggtctgatacatgtaggtgtggactctgagatagaagaagacagggcagtgttagtaagcgctggtactaaaagagaaaaccaaatttacttctttttatattgtatcctaactcactgagttaaatcatctagacatgtgcattctacaaatctatatgcatataagcatgaagaaattgttctaggtttgtatatactgaatctaaaacaatcatttatgaaaatgtgtgacagggaacccacatataattaaaacattactaacatttttccacatcagtgagctttcattatgtggttatgataagcagtagagtagagagtttagcaaagtactgtattggaacctgaaaagcttagaaagatttaacctgattgttgatagttgtacccttgggcaagtaacataagatatttaggcctgttttttaacgttgaaattaaatcagtgataataactgcccctgcctactcaactgtactcttgtgaagatacagtgaaatcatgtacgactgtgtaggaaaattcctgttaaaatgtataattatataaatttcaagatttgtaaaatgcatattgcttcatcaaacatcccaaattctaagaaagttataaatttccacgtaaagtatcctaaaaacaaattacctttaagaatgtgttaaacattataaaattgcatatttatatcttaaaaaactgtaaataaaatgttaaccacataaaatatacgtaaagttatttccagatgtggcaaatattctaaagctaaaaaaactttaaaataagagaatacatacaagctaagccacgtttgcttttgacaaaatcttccttagaggatcttacaaacttttgatcatattcttctattgtacagaatgttccttgacttgtgatggggttatatccagataaacccattgtaagttgagaattttgtatgcggaaatgcattcaatacacttaacccaccaaatatcatggtttagcctagcttaccttaaacatgctctgaacacctatgttaacctacagttgcgcaaagtcatagaacacaagacctattttatagtaaagtgttgaatatctcattcaatttagtgaatactatactgaagtatggtttcgaatgaatgtatatcactttctcaccaccctaaagttgaaaaatcactaagtagaaacattataagacgggggccatgtgtatttccgaggctagttgttacttattcaggagtaatttttttattcttctatttatttaaggtataaaacaaataactcactttattgtatatttatcttgaggtgcagaaatgcaactctaaattattccaagattctgtgtaccataacttttaccaagaagaggatgctgttttctagcttggttttaattgttgttttattttgggctttagtttctttatgaaatgtgttgatttattttttccatttctagttcagtaacttaaaacccattgttctaattgtgagttcagaaccatgacaaaaattattgaaaaatattgaaactctaagcaaagaatgatttaatcagtagtgtttttttctcttttttgctttggagtcttgaaatttgcttttgttgtttattttttgttgtctttcctttgccatttaaaaaagttagtttgtatttattttctcctggttaaatttgtaaccatgaacatattaaaattataatgctattccattgaaccttatgaattgtcaagtctttcaaaaggtttaaatattggcaatatcttatagtttaatacaatgacttgtacccaagtctgcttatttctgaatattaatatatatcattaaacatcctgatggaaaaaaaacaagaactttctgttgtaaatcacgtatgattaacagacaccaattcccaaatttaatttgccaaaccacaggcaaaaattaaatagtgttatcagtaaggaaatctatggagcttccaaaaaggtaaacattgagtagagtgttagcttcctgctcccatatcatgccttttgtttatttcttttctttcttttttttttttttttagatgtatgcatttgggtacagaacaattgtatgaaagagcgattttgcttttctgtcccctgtgtaaaacaatatgatggaaagcacatttccccaacatcagaagtattagttatatataaaacgggcataatattaccaaatatgttttctgttttaccaaaatagtttactgtcatcaatattaatttttgcaggtttgattatattttatcatgtatggtagctacctatgaagttgcttaatcatttatactaaattttcatttatcaaaataataagatgctcatgattgcatatgtaaatagaattaaaaagtataacatgaattttaaaaaagcatattccattcattggtgatcatcagtttttgaggttttcttggattgttgtattgctttggaatttttcctccataaaacctacctggccctcctctgctgagtcacacaacactaaagcgtatcctgactctaagaaatttgggatcatagaatgccatatattttgaactaagagaaaagtacttacttctataaaaccccctttgccatgcatgtgagtcaatttttctatttggattttctgtaaaatgatttaggcgatgtgtacaacttaacacaaaatgtacgtatcataaaaggactggtaaaattgttttcaatttacttagtgctgatggactagaatcattttatctgagaaacacttggatcagtaaagtgcagggttttttttgttgttctttttgttcttgttgatgctctgtggcatctggagaaatgggcaggtgtaattctgaataaaggacttttttcttagatatctaatgtgctgtgaggaaaccataaggaaactcagccaggaaatgcatgtggacttctattccactgttcaacagctaatgtcttgtaaaagtaaagtagaataaacaaggaattacctgaatagctcacgtctgaccatacctgaatatctatctacaatggttgaacagagtaacaaatcttagaggttcaatgattgaattcaaattggattttcataagcaagttcaactcaactttttacttcaagtcaacagatatttattaatgctacaagtgctatgcttaacattctaaaagataagaaagaaatattaaggaataatccttgtactctggtagttgataacattattgaatatacatattatagttatacaaacaagttagagagtaataaagacattaaggacatcatccaagcaaaaatatataagacatgagtgtaactgaaatcatgaaaagaagaaagcagcacaaaaagcagaaactaggaggaattttatagaggaggaatccttagcttgaggtgtgaatataactggaatctggactaatcttgaatgtaatagctgacagttattatttttgtgccaggacacattctaaacacttagagtaacttgtatggtcatcataacagccctacaaggaaggctgtattattatacccatactcagatggagaaacggaggtcctgagcagttaagtgacttgctcaggtgagatcatttttaaatatcatagttgaagtcccactctggatgttcaagctccagagtttctgctcttaagcactacgctatacagtttcttgatgcagaaaatgttttcaaagttaaagatacaaagtcagtaagggtaaaaaaaaaaaaaattgtatcagaaggatgtgtctgaagaataacaaagagattaatccttcactttgttattcactttgattatcctttcaagtgtctctgctggcaaagcactaggaaatcaagttggataaaaactgtgaatccagttttttcttttttttcctggaaaaaaagatgggctaaaagatgggcttgaaagtgtccaaaaagctatatgtcatcatggatggattttggtcagggataatccttaaaatggcaggataaattggacacaaggaaaaataaagagataaaacaataagtaaggagatatttgtgttcagcatagctggaccgatttataaaccatacccttgattcagtagctgtaccaggactctcattattaaagttcactcaggagatgcccaacatcctagatcacccattttcctgtgttagtgcaaaatgtggactggatttcccgatacatatttctatctagttaaataaatactctgattggttaaggaaaggttttctggaaggtgtatataatcccaccatggcaacagaaccaagagtctctgactgtctaccaacctgtagacttgaattttttccctgtactttcttctagcttcttcgatttctgttatccccaaaacaccttgatgtagccttaagcagaatcaaccatcaaagggctaactccctcctcctgctgggtgccttctctgttgggccccagcagcagtgaatctatgctcccaacttgacatttttcttatcccctttcccacctcccctaaataaaattcctttgtgtcaaagtttgatttaagtgatagaaatggctaagattgtctacagggttgggtttggaagaaaagaggtctggaaagggaatatagcaaaacatcagtattttctgagcaagtttggaagagattaaaaattacccctagtgactctcaaatttatatctctagtcaagattcctctcctgaatcatgacatatatatatatgccttttatatattcacttagaagtataataaacatcttaaatttagcatgttaaaatcttacaccctaaccttatcctcctgcagttttctacactatagttaatggcaactccattattccacttgtctgtgccaaaattcttcatgttatccttaaggcctttctctaccaacacacatgtaattggccaccaaatcctaaggattctgcctttacaatgtatccggaattcaaccctgcctccactctgatccaaagcaccatcatctccagcatggatgattgcagttgtctattaacaagtttccccctcattgccttctcccctgtagactctactgtcaatatactagccagagatacctatttaaatggaaagtcagattatatccccctttctgcttctgttcaaaacccccaatgctccccatccccctcaaagtaaacagggaagtccttatgttcataagtaccttcatgggttacccaccccattctctgatatttctctggtagtcgctagctcatacactccagccataatcacttcctccatgttccttggccactcctccaggcacattccagtgtcagggcccttatacttgctttacctgtctggaatattattctcatgatttttctttcaatggttaatttctgcatttccttcagatctttacttaaaaactgccttcctggtaaggtcttccccgacccctcttacctaaaattctgacccccactttatccttcatttcttccttccctgctttagttttgctcctcagcacttaaccactatctaactgagtatatagtttagtcatttctctatttgtttactttattctcctgtagaaggtgagattccagagagcggggcttttgctttctggatcactagtatatacccaagatataatatatgactgtctcaggctgggcgcggtggctcacgcctgtaatcccagcactttgggaggccaaggcgggtgaccacagggtcaggagttcaataccagcctggccaacgtaatggaacccgatctctactaaaaatacaaaaaattagccgggcatggtggcgggcgcctgtaatcccagctactcgggaggctgaggcaggagaattgcttgaacctgggaggtggaggttgcagtgaacagagattgcgccactgcattccagcctgggtgacagagtgagactctgtctccaaaataaataaataaataataaataaataaataaataaataaataaataaataaaatatgactgtctcatggtaggttttttcaacaaatatttcttgagttaatgaatgaatacagcgatgtagctgtcagacacagagagagaaacctagaagatagtattactagttaaaactagtgtggctaggtctgtatgatgaaaactgtgcctaactgtactgaatcctgccaaggagggaaagatgaaatggggaagctattactaagtgagtgaataggaatttccttcaggaaataaatatggttaaaaatgtgaattataagtgcttccagctgtctgctaatgttagtccttcagagaaatgaaaactgagaaaccattagaaagcaattttatcacttcttttaaaaaataaagttcaatatatttcaaaccagaatatcatcgaaatactgaagtcattttcaggggaaaatgccctgaaacaacaatttcatattatcttatattttaacttatgcttttatacatttgaaattttatttcatttgaagacttttttctaattgaaatttttgactgagagaacactcacaacttctgatgtaaaattttattactgaggaaaaactgttaaacagaagacaaattagccaattaatgtttgtatatacatcccacagtggacatattatttaaaatcttggaaagagttgtagatttgtgaaggtatatgtgagcttatttctaggtatgaaataagggagcaaagacacttgtaaattatagacatccttatttagtaattggatgttgaagatgaagaaatggctgaattgaatgaccacagagacgggacagaggaagtgatgtttgtttgtttgtttaattgtttattgagacagagtttcactcttgttgcccaggctggagtgcggtggcacagtctcggctcactgcaacctccgcttcctggggtcaagtgattctcctaccttagcctcccaagtagctgggattacaggcgcccaccgccacacctggtgaatgtttgtatttttagtagagacagggtttcacatgttggtcaggctggtctcgaactcctgtcctaaagtgatccacctacctcggcctcccaaagtgctgggattacaggcgtgagccaccgcgcccggctgctattttaaataatagaactttggcacttttcacagtattcgggaagcaacgagctttgctataggtacaaaaatatatttaaaacttcagtaaattattttaagtttactttcatcaaaagtgattaacagtaagttcaatttgtcagatattactctcccctactctagttctcttcaggttctgcaatatctactttgacatttatacacataagtttaccatttagatggtaaaggcaggctctgcaatgaaaatctttgacagcaagggagtagttgtcactttacattaaatggaagaaaaactaaacagtagaagtctatcccttatgataaagaatggagcatagttaagggttgcttcatacctttatcttaaactgattagttggcaaataggtcccttgtttgtttcctagataaattttctgtattctctggcttctccttttatcctgttaaagacacatactccacaacacttgaataaacaaagcatttttatgttcaaattatttctgtatgtgtctcctttaaaaaccaattatcttcttaagggagagactcacattttaaagtctttattttcatatctcacatttgaggctgatattatgtctgtattatcaataaacacttatttaaacaataagcttttcaaacagataaatgaattgaagccacatggcttatagatttctgcttttccttactttaggtatctggatttcatctgccggttgtaaaagttactgtgctatctaatttttctctattcacagtgcataatcagggtcttctttaacttattggagactgtgaatcagagatgcaaatatcctattttaaaatattaaggactcgagttgtataaattcgtgtacagatgcctttcagaaattaaaattccatttgtatgtatatttagaatttccttttgcagaaagagtggccaaaaataaacatcttacagaatttcagcggaatagtgaagtggtcaattcataggggcatgtcaaaattaagaagggatttgactaaaaagttggtactttatcattttgacatcatattttcagataagataaggaactattcagggagagaaatagaaatgctatattctatagtgattctagggatgtttatatcgccatagcaactacaagggactatggcttcctttttagagggtcagaaactataaagatcacttatttctagacaaactaaaatagtaaaatactatcagagatctcatctctgactttaaactatggaaagtgctacagcattttctttggtgcacataccatttttctgtgtgcagtgccttgaggacacgaatatgtgcagggactttaaaaaggatgtatttcctggactccagccaattttgacagcattctctgagaatgcaccaaggagctattatctagatatccagggagtgtgacatcccctgccccagtttttgctttttgcttttctcctttaagatagaaagttttcccgcgttagtaacatgctgtacagcattgctaaaaccgttcataacttgatgctgagcaatgctacagcattccaaagaattggtagctccccagagactcagattaaaatcaggaagctttgcaagctcaaatcctcagagagtatacatacacacacatacgcacaaacacacgcataccatatcaaagccataactggataacttttatatgctgatggggaagatcctttatctcttcccttgaatgtttttctccatgggtgcttacagctatgcatttaaagggtttgggcctgctatgtactaacaaatgtgattggttgcccaatgtgaatttaagtaatcagcctttcattcagctggagtcttggtatcaggtggaggacttggcagagttatgtatctttgccattggactggcagccaagcaagaatgatggagacagtgacttaaaagaattcagagttgaatcaagtacttgtgaaatcaggctgcccaggtcaggcaagttaacagaagcagccaagaagatatgttggtgcacgtttctggtacctgacctaatcaggctagcggagtagccctaaacattccacccaagactccaggcttggagccatcagaagatggtagtaaaattctaccaggtaaataaaagtaaagaaataatactagagatacgcttgagttcaatggcttttagggcattaataacaggtattacatccattgtatctcttttattataatttcaagtgtattttagattcaggaatacatgtgcaggtttgttacatggatatattgtttgatgctgagatttgggatatgaatgaccccatcacccaggcagtgagcatagtatccaacagtttctgttttattatgagttttgtttttatcaatatgaaacttttcttcaataagcaagcctctgatgtcaaatacagcatactgcaatgtcgtacaaagctattttctattttatagtgaaagatgatgacagcaaaagacagtctggtctgcctacatttatgttttccacttccaacatgctgttgttgctctcgataagatcaccaatgacctcctaaattgcccgagctgacttttccctcctggtcctggctgcatctgacttgttgacaactccctccctccttctggttctcttcctgggtctgatgactattattctttagggatactcatctccttcctctgcccatgctttccacataggttcatctttatgctacctttcttctcactcttttcaccctaaacacctttcctgagcaatctgaccatccctagtcttattcaacatcacacacattccaatgactatcaattctctatgtgaaattgctaaaagacagttttaacctgcattcctccagataagtaaattctcagattgtttctgtgttggcttgttctttcttttgtatggtaatacctgacctgtcagataagtactttttccacagagttaaattgaggtgcgaaacaaaagaaataatgaaagctttccatcacaaggtgtacatagactggaagagaatgccttgaaattttattttaaaaacaccttctttctctgaaattcactcacatcacccataaccattgtatcttatcctgttgctgagctgataaataagacacgagaacacagttgctttttataaggttcccattgtaagcattgacttttaccttttacaactgacattatctgtagtctcacctgcctcttcagcttagttcttgctcaaggcaagtcctcgtggaccacaaacgtgaaatcttagaataaggcagaaaatcctctaagttttattgttaacttctttcctgtttccctctctgattgtgaagttttcttcagagcccgtcatctggaaagctgtacgatcagcagcagtcactccctatctaacacagtctccaacttacaaatgattaaaatgcttcccaattttgactgaaaataggcaagaatattccctttgttttgggaggctgaggcgggtggatcacgaggtcaggagatcgagaccatcctggctaacacggtgaaaccccgtctctactaaagatacaaaaaattagccaggcgtggtggtgggcgcctatagtcccagctactcgggaggaggctgaggcaagagaatggtgtaagtaaacccgggaggcggagcttgcagtgagcctagatcagaccactgcactccagcctgggtgacagagctagactccatctcaaaaaaaaaaaaaaaagaatattccctttgttgatatttgttaaaatttatatttatctagtcaggaaacataagatctctggatgagagaatacatcattaattactcaaaagcatctcagggcaagatgtttatctgtgagtgcaggggttgtagtacaggagagaaatcccagaattgtggatcttggagattatatagagcacctgatgtatcaggaggagagaaagtgagagagacagacatacaggaagacagagactttgctctgggctataaaccaatgatctaggtctattatttttggaatataagttgaaatgtaatcaaagggctcttggagataaaagtttttaaatctctccagagcaatgcactaaactccaaggtacgcttgccattcagtcaccctttaagacagttactacaactctttgctcagaaagcctagtccatgtatccaaatgtgaaaatatgtatggctcagcaatccctgccatcttactcctcttctcaaaatctgatttcaactgcctctggaacatctacagtttgatgcctcaaaggcttttcagaatgaccatgtccaaaattgaactgatcacttatgcacacatacacaagcatgtaaccatggaacctcttcatctgtctgaaatcctgttacccaatgacaccacaaatcatgtggatgcccaggccagatacctaagactcattcaagttcttcctcttcttcacccaacacacagtcactgaattctgctgagctgttttcctaaacttccttcccacttcagctcaaatgtgaatagcaactagatacttgattcaattaatgaacttttgttaagactgtaggtgtgttaatggtattatatatgtactttccgaaaaaagttctcatgagagaatatttcagcaagagaaaaatgctgaagtatttatggagaaaataatatatcagtttgtttcagaataatctagttgaagaggtgagtgggtggattgtccatggagtcataacagttggcactggattatagggttatgggagctatttgtattattttcctactttcaaatatatttgaaatcttacataatgataactttttaaaaatcatagttccccattagctactgaagtacaggcagaattttctgttgagattcaaagcacattattgaacatcctcagcctctgtttcatgccccatcttcccctaagcttctatgttactgaaaaggcagccaaatatgactgcgcttgttacctagctttgcgtgtgtgttacctactagctctaatgttcttcccacttctactactcagatatgtctactgcaatttgcaccttcttcgtgaattctttcctgagcctatgaccaaatatatgatacatgttttctctaacttctagaaaatgtttggtaccacttggaacactcatttcttccttcttctcatccagctaaggcttctatacttggatttttttcttcaattcttcaaaccatatcctttcttactactacaataaaacctacttaaaacttcttaaaggcaaactaaactgtgtttcacccacctttgtttctgctatattgctccttacacatgggaagaactcaataaattttgctcagtggaccttatgtataatttagatgatcaaaataacaaaattcgtactaggaagaatagccagaatgtagtttttagcaaatttattgagaataaatatgtttagatttttctttcttcccgtataacccatttgtggtttgtgatttttccgttaaatagaatataaacaaaacattatggattaaatttatgggaccatctattcatttattcaacaaaaaagcttttgccatctatcatgtgccaagcacaggtttgagctttggaagcccaacagataacaacatccctgtagtcatagatttcaaattagtggtatataccggctacttgatatatattttaatgttagtaataagtactataaagaaaagggaagagtaatgccaggaataaagagtgattgctggtgctatttaaaatagagtagtagagaaggcccctttaacgtgagaaagaagtaagggaaccactgatagaaatgtgggttaggaaaactatttttggcaggtagaacagcaagggcagaaatcttgaagcaagaatgtagttgttatactcaagtaatgcaataaacctaatgagggtgaagtgttgtggactatgaagagactgggaagagatgagcttggaatggtaggtagtatacaaccaagtcatgtagagatttataggtcatagtgaagattatgcttttttaaaaaaagtaaaagcaagtttattaagaaagtaaaggaataaagaatggccactccgtaggcagtgcagtggcatgggctgcttgactcaggatacttgtagttatttcttgattatatgctaaacaaggggtggattattcatgagttttctgggaaaaggagtcagcaattcctagaactgagggtttctcccattttagaccatattgggtaacttcttgacattgccatgcatttgtaacctgtcatggcactgctaggagtgtcttttagcctgctaatgcattataattagtgtataatgagcagtgagaaggaccagaggtcacttttttcaccagcttggttttggtgggttttgactagcttatttacagcaacctgctttatcagcaaggtctttgtgacccgtatcttgttctggcctcttatctcatcctgtgactaagaatgcccaacctcctgggaatgcagcccagtaggtctcagccttattttacccagcccctattcaagatggagttgttctagttcgaacgcctctgacatatttcccctctttcttttacaagggaacccttaatcctaagggtagtagagttacccttaggattaagtagtagaagggtaatacatcttctgtaacttcttcaggctgaatatgggtgatgatatttctgcctaactattagggtctcttgtattcagggtagagaggagctcagtcagcaagcatcagcttggtgagggccattcataactgataaatggtgatatctggaagattagtaagttttcaatctaagaaaacattgagtaagcttattctgcattcctatacaaaaagtaaaacagcaaatatattccacaacagtaaaacacaataagtaaaattatcccaagtaaactaaattagaaggctttccgtgaactgggcagctgttggaaccaaagtgatgtggggctgctagctgattccaatacatgcccagaattagaatactgatccaggtttttatattacccatccttcttgtttcttctgaggtgcagtcagagatcactggcaggttcacaggaataagcaggatcagtctatattgcaggaaaaaactcaaaaacagctgacgagactaataacaggtgtaccatagttcttaaaacataatttttttctctctccagtctcccatttttactaaagatggatcatcataggactgatttgctttattatacttggcctgattatttgtataaagtgttgcaagaataattatttttcatgtaggcttttgaaattggctgtgattgaactctgtgatgaagagccaccagaagattttgagcagaggagtgatatgatcccaattatgttttaaaagaatcttttcggctcttgtgtggagaattatccagtaggggggaaagagcggaagcaagaggaccatttagataggtagttctataacccagatgagagacaataatagcttctatcagatctgtagcaagaaaggtagtgagaagcagtcaaattctgcatatgtcctgaaagtcaagccaaaacatttgcccaataatttgaatactggagactgaaaaaattaaggatggctccaaagttgtcaatctgagtaattgttaattgaattactataattcaattgaaatcagtaattgccatttactgaaatgagggaatctatgggatgagaaggattaggaaatgcagttcagaattttgtttgcgtcatattaagtttgaaagtctcgtgagacctccaagtgttgagaaattagcatttgttagactggagttcggaggagatgtccgggcttgagatacacatttgggtgtcattgtcttatataagatatttaaaattatgagaacaaatgggatggattatggacagagaagaaaagaagtgcaaatactgagtcagagcactctaatattaagatcaggatgagaaggatccagcaaaggaaagcagaagaggtcaggatacagaagccaaatgaaggcagttttaagatgtagggagcgatccactctctcaggatgaggtctgtgatttacctattgaatttgaacatgtcaaagtcactggacttcatggttattaactttaaaaagtcaataattaagaattgcaacaccatttgctacctttgggatttgtatatatatatatatttttctctttctatagacagctaattcatttttttactgttttaaaatttttatattacagaatataaaagatagtctacaacaaagctcaggtcggattgacattattcatagcaagaagacagcagcattgcaaagtgcaacgcctgtggaaagggtgaagctacaggaagctctctcccagcttgatttccaatgggaaaaagttaacaaaatgtacaaggaccgacaagggtaggtaacacatatatttttcttgatacttgcagaaatgatttgttttcagggaactgtagaatttatttcagtaccctccatggaaaaaagacagggaaaaagaagtatcactctcattgaaaaatggtaagtaaaatgagaacaaataatgatgaacaattcagacaaatgagctgaactgtagaaattattcagtattaaatttagcgttatgttgaagcattatatcttctaaaatttcaggtaatcgtaaatcagattggggcattgaggtgctataaacagttgttcgatataacatatttatctttagtcaaatctgtatctacaaatttataggagtttgatacttagattaacatgtttaaaatactacctatcaataaaaaaattgattttcatttatttatattttggagggtgacactttacactttgcattaccctcccccacatttttttttgccatggggaatttgttaagttgatttaaaatcatgtttctttttatcttaattgaaatatttagctgttgacttaattggggggtggcagaaattcaattacattatttagcttcacatcacaagaagtggattactctttcttttacatttttagattaaaagtaataaagttctctaacagcttaaagtgattcatttcagaagtctttatcctcaaggtaggcttcttaattattctcagaggaaatcaaatcattcgtctaataattatagggaacctccatggtatctcttacatctgtccatttctaaccatctttactcctattttagttcttggtttactacatcaggcacctaaagagagatttctagcattaatctcagttgtctcaagtgattatctccactttgttctcaacgatctttcagtggccgtcatttttctaaagtgtaagagctttggtactataatctcattcccttgagaatgaaaccctgactccttaattgtgcaaaattatctggtcagcctcactgcttatttcttcgtgcctgccctatagcaagcccctccaattatgttctagcgatattaaatcaatttgcagatgcccaagtgttttgtactccctctgacctgcctgttcttcaggtctcacttcagatgttgtctttttctagaaatcctaaaactattagtcgctcctaacatctggaaacttggatattgtttcatcatttaatgtaatttaatatcaataaatcatttatgcatttgtaaattttccagacttggtggctaccgtgtagaatatatgatctgatgtgcctgctcctaaaacctaacacatagtaatcaatttgtttacttttctgcctcccacacaagctccttatagaaaagggctatgttttatttgtgttatatgctcaggactgatatagtgctgagcacaaagtgggtgttcaatgtgtctggactcaagcctcctctccgaaacctgagaatatttcccctttggatagtctaccagatttatctcactgcaccttccagggcaggtgcggtggctcatgtctgtaatcccagcactttgggagtccaaggcgggcacatcatttgaggtcaggagtccgagaccagcctggccaacatggtgaaaccttgtctccattaaaaatacaaaaatgacctgtgcgtggtggcatgcgcttgtagtcccagctactcgggaggctgaggcaggagaatcccttgaacccaggaggcagaggctgcagtgagcccaaatccaccactgcattccagcctgggtgacagagcaaggctccgtctcaaacaaaacaaaacaaaacaaaaaaacagatttatctcaacttccttgaaaatagctggtcccacagtatccaaagccaggcttgataaaggcaaagaaactcagccactctgtgtatatgctacaaatacaaacttaaacttataaaatggtggctcatgcctgtaatccctgtgctttgggaggctgaggcaggagggtcacttgagcccaggaattcaaggctgccacgagccatgattgtgccactgtactacagcctgagtaacagactctctctaaaataaattaacaaaaatatttgaataaacttatatcgccaccatggtgtactttctcccagcatttcacattgagacattatgaggctctgcgggctactccaatgatgtcagtttcattaccatcttttgggatgttcattccactcttgggaagttcttccccctctggtttgtcttcttatagtcagtgttttctccaagcattctaggccacccacaccatcccctaaggaccgttgaggtttcttggatagccagtgattactgtgcttctatatacacctaccagttttgcactaaagtagaaataacgctttctgctttttgaggtttctcctccgctttactcatgagtaatttttggcaaatgatccaggtattcccttctcactgggtcatatggacatttccctttcagtttaccttcaccttagacttaaacagaaacactaacgccattccacagagagggtcgctgaaatctcaccccaactctgaggacttttctggttttgacaaaggatagagtttctctagccccaatagatccaccctgtccttatccagaggttgaaattgtacttccattgacattctataggaattggtcaggagctgttaaatttcctatgacttttagtacaatctcagatacaaactgttttaagtaattgcttataagcacaggctctagagttccaacccgttttggaattctggcctttctgctatctatgtgcccttgagcaagtctcttaaatcttctgctccatacatttctgatgtataaaataggataagaatagtgtctatgtcacagggttgttatgaggattatctgacacaatatatgtggggagcttagtgggttgcttaaacacgataatggctcagttaaggttggcaattttgatgatgaaaatggtgatcttatggttctgatagtcatgatatctgttaattcattcttacatgctttcaaatttccctgagaactacagagagaagaattagactcagtccctgctttgaagagcttcacagtcttggagagaaaaggcacaaccagccagtaaaataagggttgatagactggagctgtacaagagggcaagaacaagatccctggggaatggaatgaagctatcttactaagaatggggaataagtcaaggtctatagaccattcaaggttctgagttacaactaacagaaagtgactctagttactttaggtagaattatataaattactagaaggatatcagatacctcatggaatcaataggaaagcctgagagctaggtttaacaatgggcagaaactataaaggaagagcaggctaggcatccagaatatatctactatcaagctatgaggtaaatctgaattattttgctgtcatgccagagtccattgctttaccaggagcaccattgcactggacattgcttgctatcgtcactgcaaaaaaaaagtatctaaattatttattcttgctgtgtgtcgctcattctacaactagggtctctggcagaagcatctgatagtcagaggatggatatttttttctgtaaaggggcagttagtcgatatttttgtccctgcaggtcatgtagtctctgtcacaactactcaactctgctgttttagggtgaaaaaaaccatgtataatatataaatggatggacatgttgtgtttaaataaaactttatttaccaaggcagatggcaggctggaattgctgatgggccatagattgatgactgctgttacaatacaggtttaggccacagaactaggttcttattgccagagatcagggaaaataaatagctgaatttgttcttcattgtagtggcagtcaacacctcgtgtcctactaagtcccatacaatggtagattcttgaatccttggagagatttagaagctatgcattcctgaatacacaaatgttcagtacagccttcatgtggtgttctcaacaaaaatctgctgagttttttagtaagccaatttgggttaaatcaaaataaatttgagctagtaagaagggctatattggtatttttcttaaatggtacatgtatggtagtattagctatgaccgcaataatgctgtgacacaaatcaccctagaacttgctgactgaaaacaacaggcatttctggctgtttaggttacttgtaccttgactgactcagctgggcttggccgggaagctctgcttcaagatgtgggttagtagagctaggttccatgatgcatgttggattaaggtctgctatatatgtctttgctctggacctaagatgaagggtcagtgacatgttttcatgaccagtcaccaaagtataaacctaaacctcccaagaacactcatggcctctgctcctgtgaagttcactgacatttgattggccaaagcaaattacgttgccaaatctgacatcaatagaatgagaaagtagactcttcctacagtggaaggggggagagatgttaatatttgctgaaccataattcaaattattagagatagttaataatttataacaggattgttttacagctagaaaatgccttagtggttttgccctgcttcattattttataagggagaaaactatatttcaaagatgttatgtgacttgcctaagcacatactaaatagtacatctgcgtatttctcgttcagtcatctctattaaatgtcataaggtaaaacagacattacgctttagatgagaacaggaagatatttaaaaagccagactaatttatgactgctcattcattatctaacatacctgcttccatacattgtctttcagcaaatagaatttcaacatgtatctcaacaagttacacatcatcaaagtattaaaagccttattttcacggacattctgattgttcactaacagtcaacacagtcaacagtaaatccacaagcaccatgaacgtatggatagatatgcctatatgtaagattactagttaactttttgggaaattaatattactgctaaattcagttttcattgattttcgggtgggtaactaactgcttataaaatatacctataggaaacatgtaaaaacaaagaatttacataagatctatctgggattagagaaacaaagctcttttcttctttcaatgaacacttaagaagggcctactaaatgtcagatgttatactctattgtcgttagtttctttctgataccatctttactatcctgtaagccattagtgagtgtttcccacttttagaaaatgacttcccaaagactaagagggtagaacagttcaaatgctatcatcaaaatgaaggcagtttctagactacaaattgctgtacagccataagatggcattattgtgtaacaacaaggtccctgtcaaacatcaagaaagtaatgttttaaaatcagtatttccttcttggaattctacttagtcagatatgttgggttgacttacccacccatataagtagttaaattcaagatggttctgagctttagatatgatgtaaaatagacatgagactaagagtatttatttctatattattacatttctatagcaaaaaaagaaacctctaaaaaaattagagaaagaagtataagggcatttaattaatcaaatgttcttattaataatatttcataaaataaaggaaatgttgaaaaataaaatatgaacacagtgttgtataaagtaagtcagaaataagagaacacttactgtatgaatctattatatgaaactaaaaaattaggcactttggagtttagaggtcagataggagttacctttgtgagttgtgattaacaagggctgaagcaggcttctagggactgggtaatgttttgtttcttgatgtggatgctgcttgcattgatgtgtttcctttagggaagtttatggaaccatacacttgtgatgtgtacacatttctgtgtgaatgctggactgaactaaaatttatacttacattttaaaaataataaatatgtactttaagtacaggagggacataaatcataattgttttaataaagaaggtgtagctttaggaaaagcataccgcattgttctatttttggcatttcaccatggacccctgaacattttataattgcccagtacagcctgtcagataaatatgtgggcactactgctttagagaaagtattttccaaatttatcaccaccattctggaaccacagttccacaggtcattaggatgctgagggtgggacagttggaagctgcttccccagggatttctccattgttcagttctcatagcagtaagcctgcagcattaaagcactcacaggctctggctgccatttgtgctacatgaagaaaaatgagaaaatgaaagaaacgaaaggagagaaaacaggagtagaaaccaaataaatcagattcgaagagaaagtccctaatcgtctctgtattcagacagtagggaatgagcatgcaattctgcaagcccattcctaatgtgagtttctgataagaatttgctatctcagttgtaatctttctactgagacattcaataaataattttctttcatgtcaaggtaaggaaataacctcacattacccatataaggaaagaatagtatactaatcctcacgttatcactatagaattttatcttttaaagtggaagctagagggacagatgcataatctgggagcttttccagaattgtttgttcctaaatgagacattcagctatagcagcattagcagcctcttctatttgtcacaatgccatatgtagttgggaagatacatgataagcacatacaggatgctgacaactcacgaaggattatcattgcagtcttagaattaatctctaccatatttgaagatttttatgcaagactggatcttcattccacaacccaggtataggtatatgtgccaatacaaaatacttactgttggtttctgagcttggtagaattaggaagtaaggggtaaaaaacaagcaagtcctgaacttaagaaagttgttcatatcctattccatggccactgttttactgactggaagaaaggaatcccgtggattcagtcatggggacaatgcagaagaagatacagtagacagacagagaagtacaaatttctatttatgttccacttttcaaaattttttatctttaaatgttatttttaacgtttgtgggtacatagtgtgtatatatatatatatatatatactgtatatatatatatatatactgtatatataaacacacatatataaatatatactatatataaacatatactatatataaatagatttactatgtatatacacacatacatagtgtatatatgtggggtatatatatatgtggggtacatatatatatgtggggtacatatatatatatgtggggtacatatatatatgggttacacatatatatgtgtatatatgtggggtacatatatatatatggggtacatgagatgttttgatataggcatgcaagtatcatggaaaatgggatgttcatcccctcaagcaattattctttgttttacaaacagtaaaattgtatttttttaattgtttaaaaatgtacaattaaattgttttgactatagtcaccctgttgtgctagcaaatagtaggtggtgttcattctttctaactattttttgtaccaagtaaccatttcaacctccccctcaacccccccactacccttcacagcctctggtaaccatccttccaccctctatctccaagtgttcagttgttttgatttttacctgccacaaataaatgagaacgtgtgatgtttgtctttctgtgcctggcttatttcatttaacacaatgacctccagttccatccatgatgttgcaaatgaaaggatctcattctttttatggctgaatagtactctattacgtatatgtatcacattttctttgtccattcatctcttgatggacgctcaggttgcttccaaatcttggctattatgaacagtgcttcaacaaacgtgggagtacagatatctctttgatatactgatttgctttctttgggatatatacccagcagtgggattgctggatcatatggtagccctgtttttagtttctgaggaacctccaaactattctccattttggttgtactaatttacattcctgccaacagtgtacaggagtccccttttcttcacactctctccagcatttgtaattgcctgtcttttggatatgtcgttttaattggggtgagagaatatcccattgtagttttgctttgtatttctgtgatgattagtgatgctgagcatattttgatacacctgtttgccatttgtatgtcttcttttgagaaatgcctattcgaatcttttgtctattttctgatctaattattagactttttcctatagagttgttttaactccttatatattctggttattaatcccttgtgagatgggtaatttgcaaatattttctccctttctgttggttgtctcttcactttattgattgtttcactgcggaggagctttttaacttgatgtgatccatttgtctatttttgcttttgttgcctgtgcttataggatattactcaagatttgttttacccagacagatatcctggagagtttctccaatgtttccttgtagtagtttcttagtttgaggtcttagattttagtcgttaatccattttgatttgcagttctctgatggccagtgatggtgagcattttttcatgtgttttttggctgcataaatgtcttcttttgagaagtgtctgttcatgtccttcacccactttttgatggggttgtttgtttttttcttgtacgtttgtttgagttcattgtagattctggatattagccctttgtcagatgagtaggttgcgaaaattttctcccattttgtaggttgcctgttcactctgcatcaattttgcatcaatattttttgcatcaattttgcatcaatatttatcacatggtagagttcagcagtgcagccatcgggtcccaagcttttctttactgggagagtttactaaggcttcagttgtgttactcgttactggtccgttcaggttttggatttctttatggtttaatcttggtaggttgtatgtgtctaggaatttatccattacctctagatttttcaatttgttggcatatagttgctcatagtagccactaatgagcctttgaatttatctggtattaattgtaatatctcctttctcatttctgattttacttatttgggtcttctcccttttttcttcattagtctggctcaagatttgtcaattttgtttaccttttcaataaaccaacttttcgttttgttgactttttgtatgttttctttattacaaagtcatttatttctgctctgatctttattatttctttcttccactaattttgggttcgatttgctcctgcttgtctaggtctttaagttgcattgttaggtgatttatttgaagtttttttcttttttgatagaagcacctacagctgtaaatttctctcttagtactagttttgctgtatcccataggttttggtatgtggtttttctttcattttttgaagacatttttcaatttccttcttaatttcttcatagacccagtggtcatttagtagcatattgtttaacttccatgtgtttgtatagcttccaaaattcctcattgttgatttctagtctcattccattgtggtcagagaagatgcttgatattatttcattgttactgaatttttaagactgcttttgtgacctactgtgtggtctatctttgataataatctgtgtgctgagaagaagaatgtgtattctacactcattgaattaaatgtcctgtaaatattagatccatttattctatagtgcagattaagtccaatgttactactttggttgagcttctgtctgggagatctgcccaatgttgaaagtggggttgttgaaggctcctgctgttattgtattgaggtctttctctctcctgagctcgaataatatttgctttatatatctgtactccagtgttgtatatatatttgctttatatatatatactccagtgttgagtgcatatataattgttatatcctgttgctgaattgacccttttgtcattatataatgaccttctttgtctcttcttacagtttttgtcctgatatcgatttggtctgatataagtagagctagtccagctatgtttgggtttccattggcatggaatatctttttccatccctttatttccagtctgtgtgtagctttataggtgaagagtgcttcttgaggtcaacacaaaattgggtcttattttttcatccattcagacactgtatctatttttcttttcttttcttctctctcttttttttctatctttctttcttttcttttctttcttgagacagcatctcactctgttgcccaggctggagtgctgtgacaggatctcagttcgctgcaacctccgcctcctgggttcaagagattcttgtgccttagccccccaagaggctgagattacagtcacccacaatcacgcgtggctaatttttgtatttttagtagagttggggtttcatgatgttggccaggctggtctcgaactcctgacctcaagtgatccacctacttcggcctcccaaagtgctaggattacaggcgtgagccaccatgcctggtcgagacactgtatctctcttgattggagagtgttgtccaggagctgagcctagaaatgggtcctcacaacactgtccagtgccctatcctactgtgactaagctggtatccaagatgcaagacagaatcctctttacttttcactctcctctccttaagcaaaagtaaggagtcacttttgttactgtgggctgcactgcttgaggtgggggaggaatggtgcaagcactcccttagccatgccagctggtgtctccctaggtcacatgccaccctagtcctctagctcttagcccaggctatgactagaagttatctaggaattgcagttcgtgtgtcccagactgcctctcaggtttacctgggactccagagcactttggcccacaatggtgaggcttgccaagaaacttgagttctgactgctgggatgggcgattcccttctggctggggctagttcaaatattccctccgtgcacaggcactgactgaggccagcatggcttttttctctactgtgacagcacagcagttagttcaatgtaaagtcccccagtagctgtactgtcccttccaaaagtgcaaagattccctctctgcactgcacgtccagtgctgggtgattgggaaggtgtggtgttggtgattcaagactgtgtctcctgcctttcctcaatgcctcttttagcaagatgaagttaaaaccaggtaccatgattccgtacctggtttttggttctggtgacagtgcttttctgtctgctcatagttgttacaatttgatgtttcagtgagggagattagttatataggcttctattctgacatcttgcaccactccgtctcacttttttgaattgttgaaaccatggtttatggggaaatgttctgttctggtttttaccctcaagatcttctttgaaaatcatgatttactaagtaactagttggatagaattcatttttaagaaaataatgaataagtagttcccttagatatagcaagcaatgttcttataaactgacacaccaaaacacttaccagttcacctaaacactgaaagtatttaaaaatttatttttaacctttaagtttttctccatttgagtatcttgtgcactatacgctctcctacatatgtctacaatctttggtctgatttattttattggttgttgaatgtcagaaaccacctgaattttgcttgtatatataatgcccagtagagtgcacattggtaatcaatacgacttgatgataataatggtaatgaacactataatttgatagcatcaacttggcatgtatgccagaaataaaccatcataaacttcgagaaaaacaagtctcattaatctgtcatttattataatctccctccatcaagcgtagcctctatatactgtcttttttgccatatgtaagtttcttcttgtatatttcagattagagcttgcctcctcccacacactatcttctatttcacactgctctgttcaagtgtttatgtttctgctgaaggctgtataatctaagataatccctagctattgtaaatatcattcactggccagtcattgcattttgcacaccactgagagagtgattgtgagccaaatagaggagattttgtttccacccagcaacccaaaatgaattgtgtgatttgactattgatgccaattacatggaagttttactaccagaggcaaagctttaaactgcaaaagattaaccccatatagttggtgtcatgaggtatttaatgtatattggactatcaaagcgtctccttacaacaaaccaattatcaatgaataatattcttatcttattgtgacttattgaaactctttaaaaaacatgaaccattcagcacactataccgtctaaattagatatctaaactagccttcatttacatttccttgtttagttttaaatataatttcttctgaattcttagttgttaagagcaggtggtgaaagaatttaaagaagaaaatttgttgtatttattaagtgaaagagctttttgaaatgcattaaatagaagtttgtttctgcccatcagcttatcttctgcatattcctatttatagttcaaagcacttaagagttgcagagtgatttgctttttatgatcaccgcttcatccaggatcatttgccttatatcttcaacattttcagattcttataaatcttcacagttcacttagaggttagtttaaaactttcttcagataagaaattgactagatataaaattcacataatctcagagttagccatagatcaatatccccagtctttttctcaaagtaattgaacatttttgtttcccaggatagttgtatacaagcattttcatcctcaccatagatgattcttgttcttcagtatatgaggggactgtatttgcctgcttgttatctaaataaacatttttattattgtcaaaggaaaaagactctaatacagaaagaaattttgtgtccataggactagcctcattttggaggctgatattaatatttgactttattcattgtgtatttcttggttttgtcatttcacaaatttcccttctctaaatatgcattttttctctacctggaatagatgagttttaaaagacattactgtaaaataaaactgtgctaaatgtacttttcccagaaactctctttattttatcaattataatttgctttggctaagtgttacagaagctcaaggtagaaatgacttaaataaaagagaagcctatttctttctcctgaaaaaccctggaagtttgcagccaaggcagatatgttggccccgctcatttctgttttctactgagtgagttatctttacttggtggaatttcatccacatgttgcaagatggagctctcatgacatccacattccaagaaggatgtaagaaggccagaagaagggtcaaagggtgcataccaattgtcttttagggaagtttcgtgggagctgccatgttatatttccacttacgcttcattggccagatgtctgtcacatggccacatctaagctgcaagtggggctgggaaatgtgtttatttcacatgtgctctgctaaaaactgttcagtcatgaaaaaaaaaaaaagaatattggaagagaactaacagtcttcaacatgtatatttaaaaagagcgttatttttcttttacttatttatttttttttgagtgagagtgttgctggggctggtctcaaactccctggatgaagtaatcctcccacctcagccttctgagaagatgggattacagaggcacaccactgcacccggctcctgttttgttttgttttgttttgttttatttaaggagccctaagaagagtgtaaaaagggcaactttgtctttagttaacccttccctttttttttctttcctaattttatgaactctgattcagcccgcatcttactctggcttactaaattctgccaatataagagtagaagttttcatcatttccctaggtacctactcttctgtttctccatattctcaaagtaatttctcattcatcaacttttgtctgacttagatttaagctactgcttaggaaatgtgagaaatggagaatttggttgtcatagcgctcctacttagagggctaatgctttcctaaattttactaaagttggatcctaagttatataagttacctaaatttaattagcaagttttgcttactaattcactgactaaccactataaaacaaggacctaagtttaaagctgatattatgacaatgtactgaaatttcaagacattactttttctggacacgtaggatggaccttgcataagataaaagagcttatttttaggcacacctatgtgccaggcatgggttcagagccttacatatatcatttcattctcaagagaaccttaattttagagacgaataattttgagttttagaataaataattgtcttaagctcacacatgaagtatgtgccagagtctatatcgtgaccccagttatgaattcttttccactacatagcctgcctccatggcatttcacataggatttcttatgctcaaggattatgttcttccttccagatctatagacatcagtagaaacaacacaaatacgtataatgactttttaaagtctcatatacaagaccaaagtactttaaaaagatgtttaaatttttgaaggtgatatctttatgttcgagatcagtagcagaaatggattgtaattcattacaagatgcttagcaaagccaagtggtaaaggattttctgatgtgcttgaggagtcctgacttgctccttagcaaattcctacacaccattcagcattcagtgcaaataccacctcttggaatccttctctgttcttgatcaattattccattgtctggattcatagaactctctgtttacctatttatcttacaggttattatcatgagtttatatgtcttacatagctgtttgcaacatgttaccattcagtggagtactttttcctacagggaagaggctgtactatataccttttgtcacccctaagtggaatgcagtatggtttcatgttagatgttcaatacatgttaatattttattgatgagcccttaaatgtatataataagcttctcactcaaaagctgtaatattctagaatgaataagtttcttgagaaactctttggttaacagaatctccatttccatcatagtgtattcaataaattattaatgcagggtaaatttccttatatttcctttcatttcgctatactaaggtcaaatcatgacttttaggtgtggatacagcaatatataaaataatctaagacctggatatatgtttttctaattagggaattggagatacatgaacagtctctcatagagaaaaatatatccattagtcactaaagtcagtataacattctggtgaaaggtttgcttgcttgcttgtctgcttacttgcttgtttcaccttctattctaggaggatgtttgtcacaattatgaaattctaacgctttaaaaatctgtttaccctatgaaagttgcaaattcttgcctgtaaggcaattttcacaagaattattttcatattagttttagtttatccgtggatagtctcaaattcctcttgaaaatatcagtgttctcaagggaaaactgcccattacaagccacagatgtggttttttgagagatttctgcctgaaatacaagttttaaaatattctttgtagtttcctagtatggctagatacttgtaggaaatgacaatttagatgcacatttgaaaattcttagcctttgagtaatttatatgtttgaataaatttaaactatctttgttcataaaaaggcaaattttgtctgtttgtcttgaaatgcttttttagtttcttcttcagttctttcacttgtctttctgtaatattcaaaattatagcatagtacttgaaaaccaaggatggtccagtctgtgtcctttgttttgaaggaattttggaatcatcagagatataattctggaatttctttgggtaccttccataaaatagtagcatcctgataaggacgtagatgctaacttttatttttatctcattttctttcccctatctctcagtaatgtaggagtgacccaaggtagctgtttattgggccctcaccaaagtcaatcaatattagtcagctacaaccacaataatgctgtgtgacaagcataccccaaaagaacaataagcacttatcctcatattcacaggcctactttgagtaatctctgattcagaatctgactgtaggttgaccaaacatgtctgatctatgtgtctcattctggggctcaagctggaatggcagtagatatttggggcacattcctccatggctgagttctaaagatctcagaagggtaagcagaaacacatgatggttcttaagacccagatttataactagcgttctctcttccatccatagtcaattgtcaaagcaagtcacgtggcatatccaaagatcagggatagagaaatacacttggcagttagtgaacccatttcaagagtgtgggtgtataacactactacaaaacagaactgagacttgcaacttgaaataccacaccattctagtagaattttattacagtattaattaaacatttttgataaaacacagacaactctgttagaaagcccaacttacaatttgttgatcccacttggaaaggtattctgaatccattttttcacaagttttctttctaattcaatgtgttggggtacttttattttacccagaaaagtaatattataaagcataaagttaatgccccctgtaaaaatagaatactgaaacaaactttaagtcacaattttattatttactgacttgagaatctccttgtgcttcagcacacttggtagttggatttccaaatagcatcatgactttccatacccagctgtctgctgctcaaaactaccataagctgactatcacagctcacaggatacccttgaagaagaccatctggtttatgtctcttggcaaaatttgtttaaaaacaagcagctgcatgacaaagtaagaaagagtctctgtctagctgtggtaaataagtagctttgcaatactcataataaagcatttttctaatccaagccaacatcttcaaaaggaaagcattattttcttacaactgaaagaaaaatctacagaattcagtgatgagggaaggactccattaaatttgtttcagcagcttgagatagtgagaaaaacaaaacaaaataaaaacctgtttgtgattagatacagtcttgtaataactagttttaaaagtatttatttagaatctaatacttggatattattttaattctttatattaagagatttacatttcataaaagcttgtcctttgaaccctaatactcatattgtgatggtgagccggaatgagtaaggtcacttactatatagtcggtatataataattcgttgaataactctctctcctcctgttactggcagtgaatccatacgggtcttcagcaaccttaattcatgcctcctcagaagaaagaattcgaccaaggaggcataaggcagaagaagagactgaggcaagtgttagagcaggaatgaaagtttatttaaaaactttagagcagaaatgaaaggaaataaagtacatctggaagggggccaagtgggcgacttgagatattaagtgtcctgtttgaactttgatttatggttttgtattttggcatacttccatggtcttatataccttctccccaattcttcccttggggtagggggctatctgcatgcacagtggtctgctgacacttgggaggggagcatgcacggtgtatttactggagttgtattcaagaggtgttcccttaccagtcaagtgtttccagaggaaggtcgtataccagttacactatgacattttgcctcttagtgcgcacgcgggagcccatttgcccaactcctgcgatcttatcgggaagctgctgatcaccaatttcaggtgtttttatctattgggagactgcctttccctggtattggctgtgaccaattattattttaaagacacagtttaataaccacctgactgaccatcacttgatggttgcctgacattcctggttggggtggcgggggtggggggtctcctaccctgctcatatctgactagctatctactgtaacactactattaggtatgtctgtatcccattacactcactctctattacaaaaaagagtaccttattcatttttcaaaagaatgagtgaattttctgctccagttaagtgcttttccttacctctatgtagagtgtcaaactagccatgcttaaggattgattctggtattaataatataaattcttgcattatgagtgtctcagtttgggttcttacataagcaaatcctgagacaaggatgtgagttcaaatagtttctttgggcagtgattctaggaagctgtggtaggatgttggagttgtgagaaagttaagagaaagcaacctgtaaagagtatgttatcaagccaaacaccactgtgagaactagggcttaattccctggagaaagtctgggaaggcataaaacacttgtctcagagttatcttagacaaggtgcaggagctgaggtgtttatatttcaactcttgttagtcacttttaaagggccgctcagggtgtcagggtattaatttcctcttgcaactacttccaacctgtttttgcatgtggttgtagctactttttctgcgtcaaagatagactttaggctaagacatgcagtttccggctgtaggacatcaaccagagtaccctggagtgtccaggcccaagataatgggtgagctccacctggatctgtggcaatgtgagggaggggcattattaccctagcaagggccactgcacttccctatccagctggtcactcttctgcgtatttgtgttacttttctgactcctgcattcctctggatcctgattcaccatcagcttttgtattctgaggcttgtgtggctgtgtctttctatttcttccttattgacttacttgtttaatcttttgctaatgtatacctttgatattcctatgtactcacctttggttagctctgtgaattattgagtcttgctttacagctttaaaaagatcatagccatggtttgttttttaagtgtgattcataacagttagtgacaaaattagaagtggaaattaaaggtcacgtgcacaatcctacacaagccaatttcttgaacgacataaaatacttgaatttgtcttttactatcaccaatatagaaataatttgggggtatttctcaaagtattgatttaacaaaactttatttttgtgtgaagattttttcaagtctcctggaaattattcaaattattgtctttaaagtcaaaggaaaggttaatattagggttacttttctttggtcacagaattgctggaggcttctatgacttgctttgaagcagctgactttatgcacagttttggttagaaattcactaccaattccaacattttcaaagtcctaaaagaccaaaagtacaattcttgaaatatccctagagaaagcaagaataaattagttttcactagaaatgaagacaaatttttctcattagttcattttgcctcatgatcagaattctttgccacatgaaaatattttggttaataggttgtaacataaagagtaatatgaatagagatctagcccaattagatgacagaaaaagagcaaagcttttgaaatgtataaagaagaaagtttaagagagacatgaacaaggctggatgtagtttaaggttgaagaacacagaaaaatgagataagtgaagttaagtgaaaatccttcccttactgagaagaaagagaactcaaaattatgtgaaggtttttgttttactttgttttgcttcttaataaggaaacaacagtggcaaatctggggcattaggaatggtggaacttctataacagtgatgtttcaaaggtcacaaaggaaattaaattgtagattgggtttaaaagcactggaattacttccagccccattttttcaggattttgtatgtagcaggaaatagatcaccgcatagctaaaggggagaatttaggttttaactggtctcagtgcaaactgcttcatagttcctttgcatttggtggtgtatgtaaaacatgaaaggtataaacatttattatcataactttattattatacaactatttattggctgcataggaccatgtgtcttcttgcaggtataatcaaaaataaaaagacagaaatgtatcttatatgaaggctgccattatcgctcttatcaatggccataaaatcagatttcttacatgtacaacatatgaaaatatattaaatatgaaacgttttccattaaataattctgtaaatgattttcataacatttctgtccatgatgtgtaaatctgtagatcaaatactgcaagtgtacagaacttaaaatgctttggtcaaaaaaattctcttattaatatgacaatggcgttcaaaagtaaaaaggtaaaaatacagtttagcattaataagtaaactcagaaagtaaaatatattgatcatacagtctgtattagtctgttctcatgctgctctaaagaactgcccaagactgaataatttataaaggacagaggtttaattgactcacagttccacatggctggggaggcctcagggaaaacttacaaccatgccagaaggggaagcaatcacatccttcttcatatggtggcagaaaggagaagtgctgagcaaagggggaaaagccccttataaaaccattggatctcatgagaactcactatcacaagaacagcaccatggggataaccgcccctgtaattcaattacctccaactgggtccctcacatgacacatggggattacaggaactacaattcagaatgagatttgggtggggacatagccaaaccatatcatttcatccctggcccctcccaaatggcacgtcttcacatttcaaaacacaataatgccttcccaacagtcactcaaagtcttaactcactctagcattaacccaggagtccaagtccaaagtctcatctgagacaaggcaagtcacttctgcctaggagccataaaatcaaaagcaagttagttactttctaggtacaatggaggtaccagcattggttaaatacacccattccagatgggagaaattggcccaaacaaaggggctccaggctccatgcatgtcaaatccaatgaggcagtaattaaatcttaaagctccaagataatctcctttgactctgtgtctcacatccaggtcacgctgatgcaaggtgggctcccacagccttgggtagctccactcctttggcgttgcagggtacagcccccttcctggctgctttcacaggctagcattgagtgtctgtggctgttccatgcacacggtggatcaagccctcttctcacagctctactaggcagtgccccagtggggactctatgtgggggctccaaccccacatttctcttctgcactgacctagtagaggttctctctgagggccccatctctgcagcaaacttctgcctggatatctagacatttccatatatcctctgaaatctaggtagaagttcccaaagctcagttcttgacttctgtgtacccacaggctcaacaccacatggaagctgccaaatcttggggcttgcaccctctgtagccatgggctgagctctatcttggctccttttagccatggctggagtggctgggatgcagggcacctagtccctaggctgcacatagcaggggggctctgggcccggcccaggaaaccattttgccttcctaggcctctggtcctatgatgggaggggctgccatgaaaacttctggcatttcctggagacaattttcccattgccttggtgattaacatttggctcctcgttacatatgcaaatttctgtagtcagattgaatttctcctcagaaaatgagtttttcttttctattgcatcttcaggctgcaaattttctgaacttttatgctctgcttcccttttaaacataatttccaattccaaaccatatctttgtggatacataaaactgaatgcttttaacagcacccaagtcaaatcttgaacactttgctgtttagaaattccttccaccagatgccctaaatcatctctctcatgttcaaaattccacagatctctcggacaggggcaaaaagccaccagtctctttgctaaagcgtagcaaaagtgacctttactacagttaccaagaagtttctcatctccctctgagaccacctcagtctggactttattgtccatatcactatcagcatttgggtcaaagccattcaacaagtctctaggaagttccaaactttcccacatcttcctgtcttctgacccctccaattctctaggaagttccagagtttcccatactttcctgtcttcttctgagtcctcccaactgtttcaacctctgcctgttacccagttccaaagttgcttccacatttttgggtttctttatagcagtatcccactctctgtggtaccaatttactgtattagtctgttctcatgctgctataaagaactacctgagactgggtaatttataaaggaacgaggtttaattgactcactggtttgcatggctggggaggcctcaggaaacttacaatcactgtggaagcagaagcaaacacatcctttgtcacatgatggcaagaaggagaagtgccgagcaaaggaggaaaagccccttatgaaaccatcagctctcatgagagctcactatcataagaacagcagcacgggagtgaccaccccccatgattcagttacctcccactggatccctcccatgacatctggggattatgggaactgcaattcaagacgggatttgggtggggacacagccaaaccctatcactgcctttaagatctatgaattgtttttctacattgaagaaatttgtagacatttgttttttattctctttttggtttgctgagagcagtagtctcttggaagtgagtttcatttacattttttcctttgggtgtcaaatatataaaatattttttaaaatcaatggctgagggataaatgagggttggtagaaagggaaaggataagggttgtagttaacggaccatgttttaatgtgtctataattagatggaagttgtctcttaccattcaacatcctggatggccttcctatagaggacattttcatcttcttttgtcgtccagagctagcatatgtgtttcatgtctttagatagtgaaaatcaattcagattttcatggaaaatgctctctcttcatcctaaagacagaattgtcacggctatttcgtttattgaaaagtgaaacctgctacagttagcatatagttaattccatatatgttacctgtatcatttaatacattcacaaagtaaaaaaccaaattttgccaagttcttgatagtaacaatagtaaaatggaatttctgttggcatattttcatgttattctgaaatgctgaatggatttattaagattgataacaatatgttgtacctttatgttctaaaatttaataacagttattcttccaaacatgccagcgtcctcaatagttgacagtctgcaaaatattctattatgcaatcagccatatctccttcttgagctttctttaagtacttgtatcctgtatttttccctgaaatctagcagtaagttgaagaaatgataaacaaaattgtatcattgtatataatggctatttataaatactgatgtacattttcataatgttatttaaatgattacttcagatatgtatttctgttttctacattttaacttctcaacatattaggttgttatcttagattggattttctaagacatagactctaagacagagatttccatgcagatggtttcttagtgagtgcttttaagaaaaatgcctgggagggagtaaaggcagcaggattgaggagagagaggagttgaatgatgatgcagtgaaatggaagatcttatctggtcccatgtggggttgggatgaccatttagagtattaccgtatgaagcaaggaaggtggaccattgtatccctaatccattagtcattagatgtgagcctcccaactaccagcttccgggcaatatcatcttggtcaaagaagtgcctgtctgctgagagaaatttcttggaagagcttaggtatgatctgttagtagataacaatcccagcaactgggagaatgaatgcttcatttgtaattggtgaatctcggtggcacaccacagtgttcgctacggtaatctttatacttattgagacatatattgtttttaagtaaaacttgtatacctagtaatgcatttaggtagtgtattggccaagctagtcctttttggaaacaatttcattgtggtataaatgatatacaataagctacacatttaaatagtacaatttgataagttttgacatatgcaaataccagtgaaactattagcacagtcaagataataaacatatccaatatcctcacaagtctgttttcggtaatcactctctcctgcccctcccttgattcccaggttaccactgatgctgactggcattatagataagtttgcgttttatagaattttataaaagtagaatcatgaagtatgtaccttatttctggtctgccttctttcactcacaaactactaactttcattttgtgaataatatgatctccgtgtgattacacacattaagaaagtcaataaaaacattgtaatttgattccgatactagtttatgggtctacattatgtatttaaagatactatcatgtttggattagcccttaggtatcaagtaaccctggagttgaggcagttactgttttatttgctatcaatctttttataagctcaccttccactaattacccaaaaatatttgatttaatacctgagtacagaaaaagaacatattcacaatgtttaaattttataatttaatattataatttacaacagtttaaaataactagtcctgaaattgagtatttctcacctaatattctgctctatttattacccactccacgaaaaaatttcccagaaaaatcacaaacatgtctcttgagtgtattattacccaacccacagaagaatttccaaaaacagtcgcaaacattctctcttgagtgcaaccattttctcgggccagccattcattgaaacaaaatagcctgtataacttctgtgggtagacatttgtaggttgttcttttgaggcattagtgctattgcatttaagataaagaaataacgaattcacaaattttataaagttctcttaaatttaccaagtcaatagcaccaccactttgattcctataacctgtgacttagttaggcttctcaattccaagaacataccaccattatttcttataatgtcctcagattaaaacatgtgttgtcctttctttatacctccctgcactttaattgaatattttgccatttactggattctgtacactttttatgttttcatgccctcccttttcattctcctggacatcaatcgcaagtcagtagataccttgtaagagatctctctccacccaaatcactgtttcttttgaaagagttaacctttctgaagcagcactcctgcttcacatttcccagcacaggaaccttcagtgtttctctgttgatagctttgatttcaaacgggtagccccaggagaaaagagagctgaaggatatgttttgcttggctgctttgtttgacctgcaaggaacattaaaaggcaatgaaaccgggcagagactggactgatcaacaccatcagtttagcacttattgctatactttctaaggctttacaattttatgtgtcccacgtgtcccctgaaggcatttgattttctaacctcctaggccagaggctaacatccagaattcatagtctggcacttataaaccctaacttagcttctgtcacttgtatctctatgcaactctacagcaaaatgtacttattttctctaaaatacccttattccatacttctttggagtgtaattttatatataaaagtcctcaccacctgtaaacattaggaagctttgattcgaagaagcagaagccatctccatttaactgaagtgaaatgaaacttactggagggataatgtatagttcttggaaatgaaggaaaagaaggcaactgtggcagagggagggcagcactgagagtcaggaactccagggaagttactttttggatgctgtcattaaaatgcttcagcttcaaattgtactgactctacctttctcaattctagattcaaatttctaaatgtaattggcataaattaggaacttgtcccaccagtttatagagtttacagagcactatgattataggtccccctaagatcatgcagaatgagggaagagtaatttcatccaaggaaaagcagggtaccattcaccaaagagtggagatacttattcagaacaattaatgttagatgccacaaaaaaactaaccctgaaatcaaagtggcctaatgaatgcttatttattgctcatataaagtctgatataaatcaggtagcattccttcacagtgactcagggacctaaattgctttcatcttgtggctctgccatgtcaacattgaaacttcagaggtattgacaaaggagagctgagaaattgacactaactatcaagtacctcaggcaagaagtgatgcatcacttcctacactttcccactttccaggattcaatcacaattgcactcacgaaacctcaagggaacatgagaaacataatgaaatcaataccaagatatccaaagagtactaattttcttcaccacagaagggatattggacagacaaaaaattttgggacagaggaatatccactaaatgatccttccatgccctgctcagatgctacattttccattaaggctctcttgaccaacccataaggagatgatctccaactcctctgaacatctggaacattgcattctacttatttttactgtctcctattgtaataattgttggctattccttattagacaaattataagcttttatgggacggtgatcaaaagtcctaatttatcttgtcttcctacagcattcaaagcattgtagaccttcaatacatagcagtcttcgaagccagagtattagtattttttctaaaactgtattcatcgcaacgaactcgatggatgttcaataaaaatgtattgaatagtcattcatgcagatagcaaatttcttaaaacatttcttactcaatgtttacttatattcatcatgaatataaatttaatataataatatcaaatcccattacatttagtacaaagtaaatataccaataattttatatatgtttaagtgaatttttatatttcatattatttgtgaatgatacacatcgtcgtggaaaatttacaacgttgaagtaaattatacaatatagggtatttgtattaaaatacatttcatagaaggtgctttaaatttaaaaagttagcatgaatacatattaaatgtaaaagagtctttaaaatgaaaaatatttcacacttgtgggtttgatctaaaaatatcagtcgctatatgatatggctagacagatttgagtaggtataattttaatgaataatattgtgtgatattttagggtccaaaattgaatgtttctattaagtaacagatatttaaatgccaagcagaagctacactggcaaaacaagatttagtatgttatcttaagtgtatcctaaatcctctttcatcttatggagaagaaatacatgcttttagtttccagccactcctgtctatattcatttaaaataaactattatttatatcagatatgatgccatgtgagtccacaatttgtagtatagagaaataatttcattgaattattttggctgtttgtacctgagacctgattctgaatcatttatttttctatttaagttgtgctattttatgatcctacctatggctatgttcaaaacaatgacaaaatatattttaccctgatctttttttcattattatactttaagttctgggacacacgtgcagaacgggcaggtttgttgcataggtgtacacgttccatggtggtttgctgcacacatcaacccatcatctacattaggtatttctcctaatgctatccctcccctaaccccccatcccctgagaggccccggtgtgtgatgttccccgccctgtgtctatgtgttctcatcgttcaactcccacttatgggtgagaatatgtggtgtttggttttctgttcctgtgttagtttgctgagaatgatggtttccagcttcatccatgtccgtgcaaaggacatgaactcattcttttttatggctgcatagtattccatggtgtatatgtgccaattttctttatccagtctatcattgatgggcatttgggttggttccaagtctttgctattgtaaatagtgctgcaataaacatacgtgtgcatgtgtctttataggagaatgatttataatactttgggtatatatgcagtaatgggattgctgggtcaaatggtatttctggttctgtatccttgaggaatcgccacactgtcttccacaatggttgaactagtttacagtcccaccaacagtgtaaaagcgttcctttttctccacatcctctccagcatctgttgttgcctgacttttgaatgttcgccattctaactggtgtgagatggtatctcattgtggttttgatttgcattcctctaatgaccagtgataatgagctttttttgatatgtttgctggctgcataaatgtcttgttttgagaagtgtctgttcatatccttagcccactttctgatgggtttttttttttcttgtaaatttgtttaagttccttatagattccgggtattagccctttgtcagatgtatagattgcaaaaattttctcccaatctgtagtttgcctgttcactctcatgatagtttcttttgcagtgtagaagctctttagtttcattagatcccatttgtcaattttggcttttgttgctgttgcttttggtgttttagtcatgcagtctttccccgtacttgtgtcctgaatggtattgcctaggttttcttctagggttttgatggttttcggttttaggtttaagtctttaatgcatcttgagttgatttttgtataaggggtaaggaaggggtccagtttccgttttctgcatatgactagccagttttcccaacaccatttattaaatagggaatcctttccccgttgcttgtttttgtcaggtttgtcaaagatcagatggttgtagatgtgtggcattatttttctggcctctgttctgttccattggtctatatatctgttttgctaccagtaccagtctgttttgcttactgtagccttgtagtatagtttgaagtcaggtagcatgatgcctccagctttgttcattttacttaggattgtcttggctatacaagctcttttttggttccatctgaaatgtaaagtaatttttcctaattctgtaaagaaagtcagtggtagcctgttggggatagcattgaatctgtaaattaatttggacagtatggccattttcactccactgattcttcctaaccacgagcatgaaatgttttttccatttgtttgcgtcctttcgtattttcttgaacagtggtttgtagttctccttgaagaggtccttcacatcccttgtaagttgtattcctaggcactttattctctttgtagcaattgtgaataggagttcacccacgatttggctctctgtttgtctattcttggtgtataggaatgcttgtgatcttttcactttgattttgtattctgagacttggctgaagttgctcgtaatgttaggggcagccagagagaaaggctgggttacccacaaagggaagcccatcagactaacagtggatcactctgcagaaaccctacaagctagaagagagtgggtgccaatattcaacactcttcaataagggaattttcaacccagaatttcatatccagccaaactaagtttcataagcaaaggagaaataaaatcctttacagacaagcaaatgctgagtgattttgtcaccaccaggcctggcttacaagagctcctgaaggaatcactaaacatggaaaggaaaaaccggtaccagccactgagagaaacataccaaattgtaaagaccatcgaccctatgaagaaactgcctcaactaacaggcaaaataactaaccaacatcataattacaggatcacattcacacatgacaatattaactttaaatgtaaatgggctaaatgccccaattaaaagacacagactggcaaattggataaagagtcaggaccatcagtgtggtgtattcaggagacccatctcacatgcaaacacacacataggctcaaagcaaagggatggcggaatattttccaagcaaatggaaagcaaaaaaataaaaaattaaaaaaaataaaaaaaaaaacaggggttacaatcctagtctctgataaaacagactttaaaccaacaaagatcaagaaagacaaagaagggtattacattacataatggtaaagggagcaacgcaacaagaagaactaactattctaaatatatatgcacccaatacaggagcacccagattcgtaaagcaagttcctagagacctacaaagagacttacactcctacacagtaatagtgagagacttttatactccactgtcaatattagattaacgagacagaaaattaccctgatctttaacattccaggcaagtatgttttcagtcatacatagtacgtgaatctgttatattttaaatccaagcttttggaggacaaatgatttcacagttatacaactcagcctctcccagactcaagtctctcacttgatgcagtattcccaccccatcttcaataaaagaagaaagcatgaaacatcgcattgatatagggaaagtatatctgagttttctatatagcatataaagaagtaaaataactctgtgatttgtgatgagatagatttagctgcaacaatgaggtctggatattaatattggattaacttcctttgagattgcaacttccatgtggcattcagcactttccttgttttctcatatgtaggccgagaataaaattatcctgtttctatttcccaacatgaaaggtcttttaactgtttgaagacatatgtttcatgtgaaaccaaggaattgctactgcaattttgtaagacagaagttagcaaacttattctgtaaggaacaagatagtaaatattataggctttgcgggccatatggtctatctcacaactattaaactctgccatttttttttttttttgcaaaagcaaccatagacaatatgtaaatgaatgagtgtgattatattccaataaaactttatttttaaactacaagactagttcttaaaataaaatttaacaaagaactattatatgatccaataattccacttctgggtatatacccaaaataattgaaaacaggtattcacacagatatttgtacacccaagttcatagcagcatattttactgtagagaaaaggtagaaacaaatgtacactgtgtacactgaccaagaatggagaaacaaaacgtggtgtatccatacagcagaacagtattctgctttaaaaaggaatgaaattctgtcacatcctaaaatagggatgaactttggagatattccacctagagtagttaaattcttagacaaatagttgcatggttgccagggaccagggaggggtaggggaaatgagcagttcttgtgtcattggtatagagtttcagtttagaaagatgaagagttttggagatagatggtggtgatgtttacatatccatgtgaatgtatctaatgccactgaactgtatacacttacaatggttgaaatattttgtatattttcccacagttaaaaaagacaagcccatgtgcccaaattgctgatataaatctgtattcctattagtgagcagtaatgagccatgtttagtgcagctgatatggttaagatggaacaattgcatgtaatgcaatggtgggtaacatctaataaaaattggtactcaccaatttccatttccattgtggatataaacacccttcacattatgaatcatgttatttgttatttgtgtacttacttattaaatcacttttctccatctctctcacctctatgactctgtacatgtacaaacaacatacacactgtgaacttctttagaatgacagttacattttcgttacttgattcattgtttggccaagtagatacccagtaagcataactagcaagtgaataatgtatatgtgatcattttccttttcaaaaaccacttcttatctctaccacaccaccacacattattatatgctacacttcttatataaaacaaaaaagaataggccaggtgtggtggctctcgcctgtaatcccagcaatttgagaggccgaggtgggcagatcacttgaggccaggagttagagtccagcccagccaacatggtgaaaccccatctctgctaaaaatacaaaaattggccaggcgtgttggcgcatgcttgtaatcccagctacttgggaggctgaggcaggagaatcactggaacccaggaggcggaggttgcagtgagctaagatcatgccactgccctccagcctgggcaacagagcaagactctgtctcaaaaacaaacaaagaataaataagctttaataaactcttttgcagaagagttttcatttttaaacatagaggaaaaagaagatgaggatgaacgatagtgatgcccagaagagaaaattgtgtaagacaaaatcaattgaccaggcgtggtggctcacgcctgtaatcgcagcactttgggaggctgagacgggcagattatgaggtcaggagttcgaaaacagcctagccaatatggtgaaaccctgtctctactaaaaatacaaaaattagccgggcttggtggtgcacgcctatagtcccagctacttgggaggctgaggcagaagaatctcctgaacccagcaggcggaggttgcagtgagccaagatcacgccactgcactccagcctgggtgacagagcgagactacatctcaaaaaaaaaaaaaaaagattaaatcaattttagattgatatagagataaataattccctaagtacaattaaagcaaggatcagaccctgatgagtaaggatgatctaacaaagggctgacaatataaagtgaatgcgattgtcaccaaataaacatctcccaagagctttgggacaatcttcagctaagcatattctgcactttacatcgttctgccatatgccctatgtagcttttcatcctccagaaatttgaatagcacacagtattttttggcaccgagtaattgtggaacttaaacttcctacaaagagagaagctgtttcagtcagctaagtgaccagttagtaagcaacttctattctcttagtgtcgatagggttaaagacagtcataagctccccaaacccttggccgcctcaattttttcatttaaatacttatcttcttatcttcatctattttttagagtcacacataaactctgtctatgaggttcttaaagacctggacaatatatttaatctctgtatccttaaatctcaccatgatatctcaaagatggtagataaaactgttttccctcacttctctgactccataccaatacttaatcgatcgggaaagttttataaaccatttaccgttgaatataaatatatatacacacacaaacatatatatatttatatatatttatgtatatatatatttatatatctatatatatttatgtatatatttatatatatttatatatatttttatatatttatatatttatatatatttatatatttatatatatttatatatatttatatacttatatatatttatatatatatttatatatatttatatatatttatatatatttatatatttatatatatttatatatatatttatatatttatatatatttatatatttatatatatttatatatatatttatatatttatatatatatatttatatatttgtatttatatatatttatatatacacatatttatatatttatttatatatgtttatatatatatatatatggcactatatatcagtgagcaaaggcatcataatctttatttttatttctgtattcatttattcaacatatagtaattctgatcctgtctcaaaaactctacagaaattaacaaagaacacattgtttctgcctttttggagctgaatgtttagtgggggaaaatgtattttaaggcaataatcatatacatgagtgtatatttacaagccgcagtaggtgctatgaatgaaaagtataaggagctatgagatattctaacaaaaagaaatgctgcagtctagagactgagagtaattatctgtgaggaaaagtattgaagcagagacctgcaactcagtaaagagtgtagggagtcacatgaacaaagtcttgagatgttggtagagatcttggaatgttcgaaattctaaaagaaagcccttgtgtatggggtatggtgagagagggagagcgtggcaagttttacgttgtacaagtcattgtaggccacaaaaataagtatagattttatctaagtgcaacggaaaaccattacaagtttattttttgattcttaaattttgttttacttatttatttatttcaagacacaatctcactctgttgcccaggctggagtgcagtgacatgatcacggctcactgcagccttgaactccttgggctcaagcaatcctcccatatcaccctcctacctcagcttcctgggtagctgggactactacaggcatttgccactatgcctggctaactttaaacaattattttgaagagacagggtcttgttacgtttctaagtttctaaggctgatcttggattactgggcccaagcaatcctcccgcctcatcctcttaaaatggtgggattacagatatgagccacctcacccagcaaggtagtgacataatcattgtttttgctgaaaacaatgtactttagggaacctccctgaaaacagaatggccacttagaataccaaagcatagaccaagccttgagatggcaatggaagtggaaataaacatgtctttgatacttatgttaatggagctattagtagcaacttttgacagatttgaaagtggagttgaaagacagtgaagtgtcagggatgatccctgagcatattagataatattgagctggagaacagaaaagaaggggcagatttggaggtggagacctttctagatttatattcaatttgagatacatctgaaacatctacatgaaacgtggatgaaatatctgtgaccaagatacatacgtgggatacctaggcatgtaaataatatttaaagttatgtgagtgggtgcaataacctaaagagagactgtaggtagaagattgatcaggacaaatctttgaggaacttttttttttaattattattatactttacgttctgggatacaggtgcagaacgtgcaggtttgttacataggtatacacgtgctatggtggtttgctgcacccatcaacccgtcatctacattaggtatttctcctaatgctatccctaccctagccccccacccccaacaggcaccagtgtgtgttgttcccctccctgtgtccatgtgttctcactgttccactcccacttacgagtgagtccatgcagtgtttcattttctgttcctgtgttagtttgctaagaatgatggtttccagcttcatccatgtccctgcaaaggacatgaagtcatcctgttttatgaggtacttttaatgcatttagtgactgggtaaggaataaccctgaaaaggagcacaaaaaccatcgaggtatgaagaaagccaggagatgtagtttcacaaagcagccagtggacagtaatggacaccagcataagcttaagacagcagtgatagtgttcatcagtgctgaaaactcattggaagtggctgaccatatgttgattgcgaatgcaatgccttctcccatctcctattgcttttcactgtttccgtcatgtccagagtgaaaacactggggaggcagaactgtgtaccaagaaaaatgttttgtgtcagaggaaacaagagctcattaatttccttttgacccgcatggataggaatacgataagcaggagaaaaataaaacctgctaaactaggcaaataaagcttaatagaaaagagagaaaatattgcttacaaagggaagaagacatttgccacaatattagctaaaaagagagtgaggaaaatccacatttaccatttttattatgtgtttccaaagtcgacattaagtgaatattatcactttgaagacagagaatagattgtaagcagaagaggaagtgggattttttaaatggcatatatttaaatgttgaaaaacccatttccaatactcccactgagatatatgcaataaaaacactccgcaatcagtaatatacatgtgaagctcctaaaaatcctccattgagaagattctataaaactataaagtattattatttctgctatcagaaaataaacacatactttctaagaacaagatgaagaccttaattcatcttcccaggaatatacttgtgtacttaatggttcaaggcgtttgtgatgcaaaaaaagtgggacattatgtacaaaatagttttaatcagaaaatgaaggaagtttggtatggtatggttctagggttgcaagttttcctgcaaaaagggagtacttatggctaggtgatgcagccaaggaagcatctctgaggacaggttatcctggctcctattccaaaatatttaggtctccttgagtgttcgatccttgaaccaaggacaagaatagaaagaaataaaagccacttgtataaaggttgccttcattttgtgtcgaatattgacaggagaaagccagatttgtagcttttccagggataagtgagtctcagacacagttaagagcttggctttggaattagattgacctgagtttgaatcgtggctccatcaatctctgattgtgtgaatttttggcaagttttagctgaacctcaattttctcataagtaaaataggcataatacagctatgattctgacccttgccattagcactctgagctacttgtcagtgtatcctggtctcttcctcaagcacttttccactttgttatttcaagattctttgaaattatgaacagtagctcttgatcaccaaacaaatgggagaccatagattcaaaggaacattttagtaggatatttgataagctttgtatttttttgtgctttgaaaattagagtagatttagatttaaggaactataaagctatatgtttacaaaactttattcagttgggcagttctgactcagtaactgaaataaaattgatgaaaacaaaacatatgttttactgttgtgttcacatttaaagattatttaatgcataaccaaaataggttcagcaaatgtttatacatacatgtacttagatatttgtaattcttatggtagagcatgggaatgaatgagaattctcctaggctggaataaaactaatgtctaactaagaattggcctttcacttcacgaatatatatcattatatataaaagattcatcctttgttaacttatttgtttagcttagtactttctaagtacttttctatcctgtcttggtccctatataagaatgatactattataaaaatgaacatcctattatttcataatgattagcatatcagcatatttaagagcaatgcctatatctttaccttcattattattttcatgtttaaaatcctgataattctagaaaaacaaggttgtaattatccattcataataaaagtcacaccaagttattcttgataattaacttggcatagtggagtgcactgagcaattaataattaattacgtggttactagctcaaattttattgagaaccaaggagttaaaattaatagtattgtgtttgcaatgagttaattactttgtttctttgtttttttttttggaatagtgccataattagtatcctaatagaaacagaatataaagtgggtttctgagtgcttgcttgtcgaggtgtgtaacaacatatattttaattataatttgagtcactaattgttgtcaaatacaattttaatttcttagttcagagattaaaagatatgtaaacagctccaaaaaagaatatgataagatggtttatacaagtaaataaataactatatgacttcagaagttttatttaacaacagttgtataagtgttttaactaatgttaacaatgccttttttgtaaatctcctctaccacaaatatgagataaatttaagaacggcattttcattaaatattgattattaaaattcatatataagtattggctgtacctgagcatttacagtgaaaccatgaaggactggcaggtttggggctgtttgataatatccttccttaatctttcttcgtagcatcattgtttaattttggctgaccacaatcacttatgaaaagaaacagctcaaataattagtataacctctttctcttcataaaaccttcaaatcaatgtggtcataattatgaaagtgtaagattataaaatcttctcatttaaatatacatcttcatattagcagacttggctaatttcttcatttatccttgacatccacacttaaactctgtcaaactggtcattcatagactcattattcattcaacaaagattagtgtgaccctactatgattctgagggctagaaatataaaactgaataacatataaaccctgatttctgtatttatatatacagaaaggaattatgaactcacagttttaatgcacagtgacgagtcctcagttcatgtctgccttgggagctaggcatataccaaagcaggactgtctaacacagtttgggggtctcagtctggaaggatccgggtgagatgatccttgaattgagttctaaaaaatgaggagaaattatccagataatggaaagtttaggagaaattaaccagataatggaaagtttaggaaagaaacactatttatatgtcaaggacaaagtttgaccaaatgtgtctctgaatctaactggctttatgtaagataaaattaaaaaataattgtcactaaggtttttcacatctgcagcaactaccatcatatctggctcaatatttaaaagaaatacttaacgatttttggcatttattgctactataatagattgtgctatttaaagagaaattctagatacatgccaaagtattttcaggtgaagtaatgtgattcgtgggttttgttttgacaaacttccaaggaaattatttttaatataaagagcaatggaggaagattaaacaagattcgcaaatgttgataattgctcaaggtggtgacaggtgcatgggggtccataatatactgttctctttacttatatatgtctttgaagattttcatgatgtaaaattttaaaatcagaattacagtaatacctctttctttgacaatcgttttcaaacttggttcaacaactgaatttaaattacctacatggctataaaaataaattagatatcctggttatttggtctggggtgggtcctggccatatctgtagggtgtgtgggtgtgtgtgcatttagcttcacatttgactctgaagtacgtggaaaaccaattctgggctctacatatgcaattccaatgcctgacattaggtggtgctggttgtgagccatgatttcaggtttgacttgtagagttaacagaagtgatatcaccaccgatcccacagaaatacaaactaccgtcagagaatactacaaacacctctacacaaataaactagaaaatctagaagaaatggatacattcctcgacacatacactctcccaagactaaaccaggaagaagttgaatctctgaatagaccaataacaggagctgaaattgtggcaataatcaatagcttaccaaccaaaaagagtccaggaccagatggattcacagccgaattctaccagaggtacaaggaggaactggtaccattccttctgaaactattccaatcaatagaaaaagagggaatcctccctaactcattttatgaggccagcatcattctgataccaaagccgggcagagacacaaccaaaaaagagaattttagaccaatatccttgatgaacattgatgcaaaaatcctcaataaaatactggcataccgaatccagcagcacatcaaaaagcttatccaccatgatcaagtgggcttcatccttgggatgcaaggctggttcaatatacgcaaatcaataaatgtaatccagcatataaacagagccaaagacaaaaaccacatgattatctcaatagatgcagaaaaagcctttgacaaaattcaacaacccttcatgctaaaaactctcaataaattaggtattgatgggacatatctcaaaataataagagctatctatgacaaacccacagccaatatcatactgaatgggcaaaaactggaagcattccctttgaaaactggcacaagacagggatgccctctctcaccgctcctattcaacatagtgttggaagttctggccagggcaatcaggcaggagaaggaaataaaaggtattcagttaggaaaagaggaagtcaaattgtccctgtttgcagacgacatgattgtttatctagaaaaccccatcgtctcagcccaaaatctccttaagctgataagcaacttcagcaaagtctcaggatacaaaatcaatgtacagaaatcacaagcattcttatacaccaacaacagacaaacagagagccaaatcatgagtgaactcccattcacaattgcttcaaagagaataaaatacctaggaatccaacttacaagggatgtgaaggacctcttcaaggagaactacaaaccactgctcaaggaaataaaagaggatacaaacaaatggaagaacattccatgctcatgggtaggaagaatcaatatcgtgaaaatggccatactgcccaaggtgatttacagattcaatgccatccccatcaagctaccaatgcctttcttcacagaattggaaaaaactactttaaagttcatatggaaccaaaaaagagcccgcatcgccaagtcaatcctaagccaaaagaacaaagctggaggcatcacactagctgacttcaaactatactacaaggctacagtaaccaaaacagcatggtactggtaccaaaacagagatatagatcaatggaacagaacagagccctcagaaataacgccacatacctacaactatctgatctttgacaaacctgaggaaaacaagcaatggggaaaggattccctatttaataaatggtgctgggaagactggctagccatatgtagaaagctgaaactggatcccttccttacaccttatacaaaaatcaattcaagatggattaaagatttaaacattagacctaaaaccataaaaaccctagaagaaaacctaggcattaccattcaggacataggcatgggcaaggacttcatgtccaaaacaccaaaagcaatggcaacaaaagccaaaattgacaaatgggatctaattaaactaaagagcttctgcacagcaaaagaaactaccatcagagtgaacagggaacctacaacatgggagaaaattttcgcaacctactcatctgacaaagggctaatatccagaatctacaatgaactcaaacaaatttacaagaaaaaaacaaacaaccccatcaaaaagtgagcgaaggacatgaacagacacttctcaaaagaagacatttatgcagccaaaaaacacatgaaaaaatcctcaccatcactggccatcagagtaatgcaaatcaaaaccactatgagatatcatctcacaccagttagaatggcaatcattcaaaagtcaggaaacaacaggtgctggagaggatgtggagaaataggaacacttttacactgttggtgggactgtaaactagttcaaccattgtggaagtcagtgtggcgattcctcagggatctagaactagaaataccatttgacccagccatcccattactgggtatatacccaaaggactataaatcatgctgctataaagacacatgcacacgtatgtttattgcagcactattcacaataacaaagacttggaaccaacccaaatgtccaacaatgatagactggattaagaaaatgtggcacatatacaccatggaatactatgcagccagaaaaaatgatgagttcatgtcctttgtagggacatggatgaaactggaaaccgtcattctcagtaaactatcgcaagaacaaaaaaccaaacactgcatattctcactcataggtggggtgggaattgaacaatgagatcacatggacacaggaaggggaatatcacactctggggactgtggtggggtggggggaggggggagggatagcattgggagatatacctaatgctagatgacgagttagtgggtgcagcgcaccagcatggcacatgtatacatatgtaactaacctacacaatgtgcacatgtaccctaaaacttaaagtataataaaaaaaaaaaagttcgttcctcttgttagaattttcatacaaatgcaagactccttattttcaaagagaaaacaaaattttatataaactaatacctgagaagaataggaaaaattaatgatgtatgggataggtactgataagaacctcttcttttgtgtacattgtgataaactaatgtttaacttgagtcgatgtgctggaaatacttgttaaattttcaagaattttgagatctgttaaacacaaccattatcaaaaattaaattatggtaacttacattaaatgaaatatattgttcacaaatgtactagatgcacaaaagtcatcactacctaattcttttattatatttcactattatctacgggtttgttacctgtataatggaatgactgtataatggtgtagtgctaacttcatgtttggtgacattataatgatagcttaaaattaaacatactgggaatattcaaatatgtccttcctctcaggggatctgattgttagacatttaccagcatagcactgtcttaattaacatcatataattgtcttttatccttaagatgttgagccagtaaatatcacaggagagtttgttccttaggttttaatacttgctttaccagtttactgtagcatcatgtgaaaccagcttctagaccagctgtctttaattggtatgtacccaagctaatccttgtcaggctatcatcaacccaagcacttttgaagttatttttattattacgctacagaaagattttatggcctttttgctcttttctttaccctagccctaggatcatataatttcatctcctatttattcctatttatttccttatctaaaatcttacttaactagcttgcttgcctgcctgtctgcctgtctgcctgcttgcttggtttttctttttttctttcttttctttacttctgctttcctttcctttcttttgtttcttccttccttccttccttcttcctttcctttccttctgttccttttccttttccttttcctttgcgttcctttgctttccttgctttcttcgcttgctttcttttcagtaccacaaaaaaactaacaataacaaaaatattgctacaaaaattgtgacctcccaattctatcctcatttcacggacccataaaatgattatatatctatgccaatgcgttctaactacatgatattattattgatgataagagaatccaaccctcaagaaatgaagtattataatgttttagaacacacagaagcatttttaaccaaaatgttccatgtgattttatagggtgcatgttttaccttttcttatttggaaaagtagcaaaagtattaacaaataaaataagttacatactctttgtatataaatctttcgtgtacataataatgccatttcccttctagtgcttccattattgaaaaaaaatagacatatagcaacgtgctagacattgaagttaactgttaaaaagtcatcagagggtaatgttaaaggtggtatttcaggtaataaagcatatgcagaatgattctattggctttatttccaacatgagtgttattagtaccaaggacactgaagtttaaaggaggggagtgatgagactgatcattactttgtcttctgtaacaggacttaggtggcccagagtgatccttgttggttgattggttagttgaacttctatttttgttactaggcctgcagatctgtggaatctccagagtgctgtgtaatgttacataggccacacaccagacactgttccctgaaggactgaaggtggaattggaacaatatgtagacagttcttgttgcagttaccaaggaaatttggttaggattcaggcctccatgtcagaaaaggaagtctattttatgtgctagaaaaataaccctaatcatcttatcttgggtctctctggggagcatgatgatctacctggtcttgtaaactgtatagaaccggctgggttgagacacatatgtctcataacagagcttccacttaaggctataaaatagtggtccctctattgggtatatgccttatggaaaaatatacgttatgctggtacctattataaaaaccaatgcaaaatgattagagatttctaatccaagtgttatcctcatctgctcccaaaatacagcaatgaaaaaatagaaaataaaaaaggatatatttacagaactgtatttacagaaatatatgttgatgacaagataatcaaatacatatcaaatcatgatgtgtatttacagaaatatatttacagaaatgtaaagcagagaatggggcggaagtccctgacagacttgacactgaaccacaaaacaacagtggaagccaggaatttggatgctgcgggatagttgggattaaaattgcttcaagcaaggtgtggaactggagacaaactcagtattcaaaaccagaggctgggctgtggtgcttgcattcgtgaaagaaaacctggggaaaaagtgcttcttcaggctgtagcctgacgctatggcttgcctaaacttatgggcctatgtaggtgtaagaataaagacatagccttgctgctgggaactgtgttgcatctgttctcttgcttgatgaatggattgaaattatccccagtaacattgcagtgcaagaactttaaaccttaaaggggtggctggagaccacgggacgcgatgcacatgcaactactaaatgctagatgaggatacctgaggagagagaacaagacacaaacgtgaacatggacctccaatagaaatgacaatcgaaaacatacatttatcttctctctctcccaaattgttcaaagattacgctaagggaataaaaacaatacagtcataaaatgacaaataaaatggaagaagagacatctgcacagacatatcaagtcaatgagatgaaaattaggacaagtaagccaatttgtttttcaggatcccagaaaaacttgtggattgaagacgctaggtgttttagaaggccatatattcccgagaggggctggaaataaaggggttgttttgaatcccttaaaaggggcaattacatttcatgtccccagctcagggtagttaattagacactactcctctctcatcccagcagacgtgagtgagtggtttgctttctggtgaggctgaaacaacttttggcatttggacaacaggattagttgatggaagagagagccaccatactgaaaatacaggattaagttaaagtcaacatatttaatggtgagaccagcagtccctcttcaccttcttggctcttaagtttctatcctctgggcagtagattataaatttattctcctgagagcctacctgcaatacgaaaactatttttagtcaagttttattgctataacaaaataccatagactggatgccttataaacaacagacctttatttctcaccgttctggaggctgggaagttcaagatcaaggcactggcaggtttggtgtctggtgaaagctcatttcctgtcttctcactgtaacctcacaaggcagcaggtccaagggaactgtcttgggcctcttttgtaagggtactattctcattctggatggctttggccttatgacctaattaccttccaaaggccccacttcctaatgtcatcaccttgagggtgaggatttcaacgtataaattttgcaagaacacactcagatcatagtaacctacaattaatgatatgtaatgatccaccagtgaaatagccagatctgtgcctaatgaccatatattgaagcccaccaagtataagccctacatacgcacaaggaatttccaaaagcatttaatgcctcagttttaagagacaatcaaggatttccagatatttgaacatgtctcaaagatggaagacagaaaccaacataaaaacaaaaagcagaaatattgggaaaaaaacaatagccacataaatgaaacagaaatctctgcagaaagagagacaaggcatagaccttaagaaaactttttaaagatagctataaaattattatctcacagtgagactagtcactgtattcataagaaagaacaagagactatagaaggtggtatttccgagaaagataagggttatttaaattaatagtatagcaggttaagtttttaaattcttaattgtataaatttatgggttaccagtgtaattttgttatatgaatatattttatagtggtgaaggcagagcttttagtatatccaccactggaataacatacatggtatgcatagcagttttagagcaatgaaactactctgtgtgatactataatggtggatacctttcattatatatttgtccaaacccatagaagatacaacatcacaagcaaactctaatgtaaactatggacttcgagtgttaatgatatatcaatgtatgtaagtcagttataacaaatgtaccactctggtgtgggatgttgatagcggggtaggctgtgtgtaatgaggaagggggccagagagtatacgggaaatctctgtactttcccctcgattttgctataaatgtaaaattgctttaaaaaatcaagtctattaaaaatgaagagcagaaataaaagttcaaaagtagaagataaatttgaagaaatatctcataaagcagtataaatagccaaaagcatggaaaatgggagagtataagaatcttagaagatcattctaggtaagtgtttcacaaatagaggtgattttgtcctgcagaggacgtttgacaatgtacggagacctttttcgttgtcacaaataaggaaaggatgtactactggcctcttgtgaagagtgacgcaagaggaatgcaccatgcagccatccacaaccaagaattactcatttcaaagtgtcaatagtgtttatgtttagaaaccttgttctatgtaatccaacattcaaataatagatgttaaaaataaaacagaagagaggcaactgtggagagaaaattatcaaagaagtgacaacatcagttttcttagaactgaagaaaatgagtgtccaggtttaaagggcttactaaatgcccagcacagcaaatgagctaaaaatctacaccaaggctcatcatcataaatttttacaaaaacaaggacaaagagaagttcacagatcagaaatcagaatggctttggacttttcagcaatagccatggaaaatagcagaaaggaacacttcctttaaacttctaggaataattaactttggctttgatttcatatcctatatgaaattatgttcacaaattctgtgatgctcttctattcaagagttacagctaaatgtccctgtcattgagtgtggactagattcagtgactcttttgtgatgatatgtcatttccaagtgtaggttgtagaaagactgtggtttatgtcttgtgttctccatccacgcctatctctctctgtgtctctctttctctctctctctctctctctctctctctcatgcattgcttcttctgtgggaacacatgtcatgagcagccctatggagatgcacgtatgctgagaaactaaggcctcctgcaaagagccacaagaatgagcttagaagtgcatcatttaacaccagacaaatctcgagaggctgcaagcatagacaacagcttaactacaacctcataaaataagctatgccagtcccaccctgctaagccactctcagattcttgaccttcagaaactgccaaataataaacatttttgtttttaagctgctaaattttggaatgacttgttattcaacaatatataaattgtacaccctgataaactataaattgtgcggagaaaataattttcagagatagccttatgtactcccctaaaccttttttccccagaaatctattttcaaaaatatactctaccaagtgaagaaagaaaccaagaaagacaaagaatgtttagttgtgattggagatcagaaggagagtgttttaggcatgattcgccttgttatgctgcaataataagcaattccaaaatattagtggctagaaacacaaaggttgattttgtatctttgcaacatatccaacacaagtcagtcaagggttctgatcattgtagtcactcaggaatctaagctgattcagtctctagtattctatcattctaccgtaacaataagaagctttagcgttcaccatgtcagtcaaaaatgcgtggaaaattttaaactgactcttacatgcctctatgtaggagtgatatatgtcattttcatttcacttcatcatccaaaggaagtcacgtggtcatgcctaactctgaggggacaggggattataatcactaatatttttaagagaggtaagagaattaggaaaatattggagcattagtattacctgcaaagcctaggatccggaaaacagagaacccaacgtgggaggaagatgcaaagtggtgccagaaagatggtggaggagatcctgtaacaacagctgtataacagttgtagagagaaacctgtacagattggagaagaaaatagtgctccaggaattttgttaccaagaaaaaaaaaatctaatgtattcgaatgtattgagaggtggtattcttattgtgtaagagtataatatatgacatgtatgacagacagaagtaccatttaaaattttattaaacataagaattagatccctatctcacactgtacataaacataaaaatggtaaattgatggattgcctaaacatgaaaggcaaagcattaaaatatataaaaatattttggggcatgtagggcaaaagaggtgtcccttaagcaacagcacaaagcaaaaattgtaaagaaaaagacatatatttgatcattttaattaaaaacctgtacaatgcaaagacttcataaacaaagaaaagacataggctcagatagtatatttgcaatactaaaacaataaaggatttatgtcataatttaagaaaaatatttacctatcaatagaacaaaataaaaataacctaacaggaaaatatttttaaagtttaaaaaataatagacagttcacagaacatctgtatgtcaaatacacttatgaatagatgctaactctcatttattattggaaaaattacttcatattagtcggttttcatgctgctgataaagacatacatgagactgggtcatttatacaggaaaaaggatttaatggacttacagttccacacagctggggaggcctcacaatcttggcagaaggcaaggaggagcaagtcacatcttacatgaatggcagaaggcaaagaaagtcccctttataaaaccatcagatctcatgagactaatttactatcacgagaacagcatgggaaggacctgcccccatgattcaattacctcccacgaggtccttcccacaacatgtaggaattcaagatgagatttgggtggggacactgccaaaccatatcgtactaagtgagataacgtactcccatcggactggaacaagtaaaaaataaaataagattgtgaaaggtcacaaactctcattcttgtagaaatttaagttggtacaaccaatttagagtgtaatttagcaataatctagttaaactgaggatggcatgtcctaccaaacagcattccagttaatcacattgaagatagcatgattgttctcaggcttccatattttctgttgaacggtaagttgtcagtctaattggcattcctttaaaatagacttgtttcctcttgatgattttcacattgtaattttgtctgattttcagcacttcaccggtctttaaatgattatgtaagattttcattgctgaggaggaaatcctatcacctcaaatactatcttattagttatattttcattttattttaccatgattttaaatgaattccttaaaaaattaggttagagaactaataaatgataaagagaaaaattattcttcatcctgatagctgttatgtgagggtggaatggtatggctggtttttttcactgtcattttgtaacttggaaattcttattttttaatacaatgacaatattttcatagttaaaaaacactaaaactaaaacaatagtctgttaatgacaaatttaagggcgatttcattaagttaaaaatccatgttaaggcattataagatgaataaatactccaaatgaaaacaaagtgaaggccacttttatttaccttttgtacatgatacttatttttcaacagttgtcatgttagaaaaagttgaaaaaataaaacaagatacacccccttttggcctctaaccttccaaaattgtaatgggtagacttcaaattaaatatctaattcgactcctttccacttctaccctcatagcattagagacatttggaaaaatgaaaaaaatatagtattttatggcagggtacctcaaccccagagccacagacccgtaccaatccgttgcctgttagggacccgattcgcaaagcagtaggtgagcagcagcgggctagggaaggaagcttcatctgtatttacagctgctcctcatcactccatttctgcctgagctccacctcctgtcagatcagcagccacattaaattcccataggagcacaaaccctattgtgaactactcatgcaagggatctaggttgcatgctccttatgagaatctaatgctgcatgatctgtcactgtctcccatcaccccccagatgggaccatctagctgcaggaaaggaagctcaaggctcccactgaatctacattatggtgagttgtataattatttcattatatattataatgtgataataatataaataatgtgtgcaataactgtaatgcacttgaatcatatggaaaccatcctccaacccggtccacggaaaaattgtcttccacaaaatcagttcctggtgccaaaagggtcagggaccactgttttatgggataagtgaaagctggatttgaatccaactctaccttttacttcccatgtgaacattaaaagatgacttaatgtctctgaatctttttttccttctaagtaataactaccttgcagagttattacttgaattggccataaggtaaagaggacaccaaatacagtaaataataacataataataaagaaaccttatgaattctattcagtgatatccatattgaggtatttaaggtgaatgatactgatgtcagcagtttacctggatatgcatcaaaaatatgattgattgatggatggatcggaggaaggaaaagatatgtgatcaaaacgagtatagtaaaatgttcatggtggaatctagatatatagatatcacttgtaatttttaaaaatgttattgcatttttgaaatttgttatgttaaaatattgggtgaaaattctgatgccctggccatgtcccaaatcagttgaatcagatctctggtgtattttttttttaagatccttggatgactccattgtacagcaagtttgcaaaccactattctaacttctcaccacccccttctttatagcttacaaaattatatttttaaatgtcaaatgtcacaatttcactttccttcttcaagaactgattagacttctagcttctcctatgctctcatcttgcataacgttcatttgcacgtggttaaaactgataggcaataaataataacccatctgtcttttcctgacccaacataactaaaaccttcctttcaaggcgaaaatgaactataatctcacagacaagagtagctatagacaactaattctttctggtctctcgtggtcatgggactattcaccactgccgtccctgctgtctatttggtggaccagccagttttactgtgacccataccatggctcttgagaagcatgaagctgccgaaatcgcagttgtagggttaatggaaaacatggtgaagtatagcttacatatatatacaattttggcacaaaatgaagcctaagaaattgtaccgggctgggtgtggtgactcatgcctgtaatcccagcactttgagagaccaaggtgggcggatcacctgaggtcgggagttcgagaccagactgagcaacatggagaaaccctctctacttaaaatacaaaattagccaggcatggtggcgcatgcctgtaaccccagctactcaggaggctaaggcaagagaatctcttccaccctggaggcataggttgtggtgagagaagatcacaccattgcactccagctggggcaacaagagcgaagctccgtctcaataaataaataaataaataaataaataaataaataaataaataaataaaagaaaaagaaattgtaccaggaagtggattgggaatgctctatatattctccccctccaagaagtttttttaatttattgtattgtgaaagatctgcagctatttattttgtgtggtactcttttgcaataaactacttctgcataaatgaactcaaaaactttgatattcatgaaccttcataatgttgatctagtacatcttgcccaactagcccttgggccattccttccatgccactggttgaaaaatatgctccccaccccagtaacatcagcatcagacctctgcaaccagaaagattccataggtaatgaaatccaaatgctggcatttggaagtcaaaccagtgtattttgaaatggaaaggcaaggggaagtgcatggagcaagtacagcatgtgctacaacttcagttcataccctccttaaaatactgtgcaactaaactgtcaattgcccattgatagagatagtatctttttcagctttacaccttccgaattcaacacactgctagcctcaggactaagcgctcaataaatgtttatcaaaagattgagtaaatgaatcagtggtgaaataaaatgtacaaacacatacgcttcatacacgtttaggaagcatttctagtgagctttgtggatattttatttcttaaaggttctttttctttccatgttcatgttattctttattttttaaaatgttgcttctgcttatttctctttctacggcagctatatttacttgcctgagagcacagcatatactgatgttaatcaaactttagatgaaacacctaaaatgatagaaaagaatctgctctaattaaataataaagcaacccctacaggtttagacatgtgccttccggtgtgggaaagaaaaaatttaatgaatgtagtagttttatgccaagaacatttccctcgtgcacctgtgttttaataagatagaatataaaatagcaaaaggggcccgacttttgtgatgatatttactcataaggtagtaagtcagatgtgatgacattttctttgacttagagctgctatacttgggtcagatttcagttcagtaaatttgcagtgaagttgtctttctaacatggtgtcatcctggaactgccctgctcccacagttacatacaggctagggagtgggtaggagtgggggtgaaatcctcttaatgtttatggtgtcagtagattcaaactaaaattagccttacagccatactcctaataaggggcccctggcatatttaattgatttaacaaatttatcaaaaatagataaactgaaatctgccttgaaattaattactgtatctctatttttataagaaaatattttggacccgttccctctgccttatgggtgcaactcccggcagaataggtcatgtctcctgaaaatagttcttattttctttactacttatgacctcttatagcctagaagtttttccttgctatttctagttgaaatgctaatctggcataatttctagttgaaatgctaatctggcataatttcagaactaattttctgttaatgccacttggaacatctaaattcctcctttttcaataatactatatttgtgtgttgcaaacacacacaaatcatactatatttgtgtgtatatatagtaaattccaacttataaaagtaaaattggaatttttttctttctttggaaaattattttataattgagaattataaatgtcacttttttaaatgctgcaacctttgagattggtttcaataaagtaaaacttagtaaacattaagaaaaatgatagcttgatatgttcactaatatggtaaatgaaaacttttatgtgtgtataggctcttgttaattataactaccttcacaggaaaaacagtcttgtggaaggtaatggtgccagtgagagaaaatagagaaagtagaatagtagtaagagagaaaatagaatttcccgtttagaataaagctaagtaaaaagtgaattgtttcagttttatttatgtatttgtaagtgtggtctcatgccatatatattcaaagatagacagagatcttaatctttaattttttatggccaaagaaaatgagtcccatgtaaaagggacattttcgtaagctgatctcaagtggtgtattttgatttgccgcagcagcctatggaagaaatatcattttggctgcctaagaagaaaaatgtcatacctttctattttttattcatactccgcatatttggaattcgtattctcaccatacttttgggaagataacacgaaattgccttacttgcctcgaaatcaaaatctgccattcgttttaaaataaaatggctttttcatctcattttcctttagcagaaaaaagtaagttaaatttttttgtagctgtgttaagtgtactgttcctccctcgttgagaacgaaacaaagacatatgattccatttactgtaattgttttggtttgcccaattacaatagcagtaaaatcatttacacatagtaaaatgtttgagccttaaagggcaagaagactaaatttagctgaagatatacaactttcatgtgccaatgaggaaatgtataaaatcagttatacatattttcctcattcatagatattgaaaatattcatatatgtgtacatgtatttgataacttaatattttctaaataacagaaattatatactgtatatatatttggatattatgattattgttattgccaccattgagcacttactatgggctcagaaaacttcactgtattatttttaattcttataacaaccctgtgaaatatatattatgcctatttcacaaatgagaactctgaaatcaggaaattaaatcacttgctgaagtttacaaagcactgttaggcaataaaacagaatttcaaactcacgtttgcttgtcttcaaattttgtatgctgtacaacctgattgttttactacttgttcttaatttcaaaaaaaatcttcatactaaaagatgatactttgggagttctaaagaacatgtttttggccgggcgcggtggctcacgcctgtaatcccagcactttgggaggccgaggcagaaggatcacgaggtcaggagatcgagaccgtcctggccaacaaggtgaaaccccgtctctactaaaaaatacaaaaaattagccgggcgtggtggcgggcgcctgtagtcccagctactcgggaagctgaggcgggagaaaggcgtgaacctgggaggcagagcttgtagtgagccgagatcgcgccgctgcactccagcctggttgacagagcgagactccgtctcaaaaataacaaaacaaaacaaaacaaaacaaaaaaaaccatgtttcttttcagaaggtatactcatttgaagtggataccaattatttgtattaaaattacttatggataaatttgaatctgcaaaaattaagtgcaacattattttttggcacctgttataggaggtaaaaatggtgattcaatatagtttctacccttagggagcatttagtgtggtttagacgtaatgacactaatgtaaattagagtagaataaattctttaaagcaggacaaaaggagtgttaaagactacaaagtttcagttatggaagataaaattctggagatctattatacagcatagtgcctatagctaataatgctgtttcggacacttaaaatttcctaagaaatcttatgttgtgttcttaccaccagtaacaacaataataaaggggacaagaggaaattttgagtgatgacagatatgtttatagccttcatggtggcgatggttttgtgggtgtatacttattcccaaactctttgattttatatatatatatatatatatatatatatatatatatatatatatgatgaaactctttgagatatatatatatatatgtaaaatatgtacagctttttgtatgtcaatcatacttcattaaggtggttacaaaaaagaatcaagaaaaataatcaccctaataaaaagagtgttattaaagaggggagggattacttctaattggtagtatcagaaaggttctcatggaggaaggtatagaaaaatttaggacaatataagcaacgatactttaagaaaaggaataatataaacaaaaataaaccaaaagatgaagaaccaccaaggatgtttctgaaaaatcaagagaaattccattttgatttgagagtatgaggtacttgtcatgatatataatgagaagtgtctagaaatatgttattttgagcaaatgctgcttagaaaggaggttaggttatttattaatccattcctttgaaatataaatttcatgatcagaaacacgtgagtgtaactatccaataacaacatgatttatttccaagaggatagtatattataggagaagtaggattttttctctttcacaagctaatacagtgtttactgattcaaatgacacttaaaaaaaacaagaaacaaaaaacatacactataagctatccttattcagctatgttattgtcttgcattcctgattagaaacatacaagttagactcccaaagtctcagttttctcatttgcaaaatgaataaaatgatagtacctaccccaaggtgctgtggagtatatttaatcatgtacttaatctgaagttttaattagagtgcatagcatatatttgtggttgcttttgctcctatttctgggtaaaagttcctacacctattatatatgttttgtgtttgaatgaagagaaaggcatcattatttcaaatatcccctctagccaacaaatgaaagctaagacttggaagctaggatgtctaacaccatatcctcttcatgtggactatatagtagaggatatgtaaattaagactcaattaaatgctcacattttataaaggagacccttgaatatatcaaatcctcagagagtatgtcagtttaaacttattaagaaatttaaattatttaacttagcctgctgagtcagtttctgtagctgatttctccaaaaggtcttggtattaaaagtagcattacagatcactaatagcaaactatttctgctactttgggtatttttacagggtgctaattgtgccaaatcaagacattgaaattgcataattttaggttaatattagcataatcctacatattttttcagaagcagtgcaggaatagtacaccctgaatatttttccatcatgatggaattttcaaatatcacaacctttacattgtcagttgtctgctggaacattatattgtgtcaaagagatttataaaagagaagggcaaagaaaatttgcggagttctagacaatagtaatatcagggacacttttgctttctttgttattactaaggagttaaataatcagataccaagcataggtaaagaaatgaatctctaactatttgagtacttatcaatttatctcaaggatatttacggtgttttcccctaagccaaaatagagtgcttaattaaggtccccttagccccctaaaaatcactcaggccaagtttctgatatgtgtgtatacttatatacatattaaagtatatgtatttttgtgtgcactttcagatcaaaaagtcctcgtttatctaaagcaatttcagcttattgatgaggcttttctgttacagcgtcctcctccacagatctgcctgtctagagatttaagcccaataagagtccagcaaagtttaaacaacactttagaaatctaaagaattttaagatttattttaatagtcttagtgataacctgaattgtttgtgagttcttacaaataatgcaatcaacatttaagtaattttattatttttttgtttgtataaatttaaggtatacaagtacatttttgttacatggatatattgcagagtggcgaagtctggttttttgtgtacccatcatgcaaatgatgtaccttttctccattaagcaatttcctatccttcgcccccatcccaccctctcgcccttctgagtctccagtgtctattattccacactctgtgcgcatgtgtacacattatttagcttccacttgtaagtgagaacatgcaatatttgactttctgtttttgagttattccacttaagatgaccaccagttccatccatgttgctgcaaaagacatgatttcattctttactatggctttgtagtatttttcattgtgtatatgaaattgtttattccatacgcaatttgtgtgtgtgtacatatatatatatatatatatatatatatatatatatatatatatatatgcttagacttagaagctaggatagacacacaatggaatactacacaatggaatacattcattcacacacatataaataaaagaatatgtggagatatatctccacatattctttatccaatcatctgtttttaaataatgctattgacttctttagggtgaattttatcaatattgttttggtttaaaacactcaccttaaaagagtcacagtccctaaatgtgcatcctcatatttaaattaggtctcagtaaatttgtgcaaagtgtattctttttaggatggtgttgaacttgctaaattatttatctttaagaatcatcattttgtgtcttttattaatgaaaacaacaattatgtgattgctgatatatttggaaaatgatttctgatgtagattgatttttttattctaaattctgtgtcggtattaaaaatttatagattactaactgtattaatatcgataatactaaattttattgctatttataacttggagtgtactttcatcctcctgaaaaagctgaatgaggtaggcagtattattctgggtttatgtgtgagataactgagactcagaggtaaaatagtgtatccaagcattcatggctcttaaatggaagatataaggggtttgtgaaattactcatggacttttttattcattcattcagttattaaaatgtattcaacatttatcatgtaccaggaacagcgcttagtaccaggaattcaaaggtgcataaaacatcttccttattctaagaggtacatagtgtactggaacaaacagccttgtaaatacataattagaacatgaagtagtatgttaatagaggttttcacaaagctgtggaagcttgtcttatgaagtaactaattccaagggagagaagccttatggaatagtgacattttagatagggtgtcattctaaaatacagcaaaaggcccacagtaaaaaaggaattttggttgttatgaaaattttcagattttctatgttttcagtacagtatacatggtgggctatgtgaatgtttgtatagggaccaaagtaggaagtgaggttgtctgttagagagcgctgagaaaccgaaaatagggagagatgagttggaatatgctgaggaaaagttattaggagttttcaagaaaggccacgacagtggggctagagagaagaggctaaattaaagagtcatttctggtttagaattgataaaatatagagacaagcatgataagaaagaagtcgagaagtaaacgatggtctcaagatttctagcttggaaatcattgactaaaattaaaactaaggactggattaggccattcttgcattgctataaagaaatacctgagactgggtgtttataaagtaaagaggtttaattggctgacgattctgcaggctctacaggaagcatagcaacatctgtttctggggaggcctcagggagcttttactcatggtggaaggcagagcaggtgtaggcatttcacatggcgaaagcagagagagagagttggtggtgggggtgggtggctacctacttttaaacaaccagatcttggagaactcactcattttcatgaggacagtaccaagaggatggtattaaaccgtgagaaaccaccctgatgatccagtcacctctcaccaggccccacctccaacattggggattacaatttaatatgagatttgggtggggacacagatccaaatcatatcaaagacttgcatgggaaaataaggaattgttgacataacatctttgaggttcacatcaaatgttctgatgaggatagtccaagtagcagttggctatatacctcagataagggctgaaatttggagctatgtcataatcagcctagattaagagtcaataatctcctgcccatgggccaattacacccaccacttgtttttgtaaagtagtattgaatcccagccatatccatttgcttatgctccatgtataccttttttttgaacttcaaggcagagttgagtagttgtaacaaaaaccatacggcccacaaagcctgaaatatttgttctcaagatctttatctataaagtttgccaatacctgctgtagatgttagttgaagctttgaaagcaaatgaggtttcataaggcagtgtccatacaagacatttaacaagtttacctataaaaactagaattcctttgaggggaacacatcctagtctccattaagcacagtagaagagtcccctataatgggaaagaggtcactttaggtgttgatgttggtggtacaggtcaaagaaaatttatctttgctgtttattcagaatgcaataagtgaagttatgagaaataagggaaaaaatgtgtagaatttcaacagcgaagagaggggataaaggcatgagaatgagttcctaagctcaagtattataaacactgtgagaaacttaaaatcaaagtatgactccaaacgtatttgaagcctgagaacaaggctcacaacctagggaggattagggatcaataaaatagagtgttacaaagtataatgtcaatccagagttgtaaaaatatcagcattgaatatattgaaagcagtaaaactgaatgaggagactatcattttatatcactgtgtttatttctttgccttgttctataaatatttaaaattataaaatttttattaacagtgagagcagaactaccagagtgagcagatcaaaattgggacagatgcttttcactgcacacacttttatttttctgctgttcatgcattatcttgtacagtgcacatgttttacctaaaaaattaaaatggagtctcctgcttaggaaaaaagtatatattctgtttcaaactatatacaaaaataaaatcccaggtgactaaaaactgacatgagaaaaaaacaaattgataaagcttttacagtaaaatagaggagaatatgttaattaatatagggtaagaaaaaattgcttacacaaatgatgaagcactaatcatgaataaaaataataaagtggactaccttgtatattaataacatctatacatcaaaagacagcactgagagagtaaaaatgaaacccacagagtaggataaattatttggaatacacacataatggatgaaatgtgtgtattcataattataaagaattcctacaaatctttcagaaaagaacagataatccaatagaaaaatgggaaaagttcttgaaaagtgaaccatggcacaaaaagggcttgtggcctgctggcaatattctgtatcttgacctggatggcatttttaaggtgatcactttatagtaaataactaatgtgttttatgcatcatagtaacgttaagatttttgtcatctttacaaaataagaaatccaaacggccaataaatatataaagaatttctaagtcccattaatggtccaggccatgcaaattaaaactaaaatgaaatatcactgcttaccaaccagaatcattgaaatttataagtctgacaattccatgtggtggtgagaatatacagcaattagaaatttcacacaatgttacttggtctgtgaattgtaaatagaagtgtaaaattacactactgcttcttggagtgaaatccatttggcactatttagtaaattcaaagatctgcataacctatagcccaccaatttcacttctatatatacactctacagaaatgcatatgttcatattccaggagacatgtttgggaatgtcatagcagcatagtaatagccccaaaccaaaactacttcagtatttattaatagtaaaatttgctatagtttgaatgtgtctctttccaaattcaggtgtcgataatgtgctagtactaagaggtagggtgtttaagtggtgattaggccatgagggctccttctttgttaataaaaataagacccttataaacaaggcttcacgcagcattcagtcagcttgctctcttgcccttctaccttctgccttgtgaagatacagcaggaaggccctcaccagacaccaaatgccagagcctttatcttggacttcccagcctccagaactgtgagtgaatacattggtattatttgtaaattacccagtctcaggcattttgttataacagcacaaacagactaagacaatcatacagtgagaaattaatcaacaactaataagcaaagaggtagattaatcttgaaactatgatatagagtgttccatttggctgctggaagttttatttcttggtctgggtgatggtcaccatgggtttatatgaatggttccctatattatgtttcacaacaaaaagcatttaaaaagtaaatatatgtaatgtactcagggataggcatggccaaccatggattctatgctgaaataatgattcagatttcatcagcaggctaatgacactgcctatttaaatactttaagtcctgaaattaaagaaggtaatttctcaagaaggaatttctaatttatgggtgggtctattccccaccagagagacactagcatggctcagattctatgttggtcattttatttgcatttaaagtcttaagccaaatagaggtacactaataatgacaacaactactactactcatacttgtggaacactgccagatgctgttttaagaaatttgcattttcatttgtaactgagcttacttgaatcttctctctttttttcttggttaatctaactactggtctatcaattttacttatcttttcaaagaatcaacattttgtttcattgatcttttatatttttgtttcaatttcatttagttctgctctgatctttgttatttcttttcttctggagctttgtgttggctttgttgttgattctctagttccttcaggtgtgatgttaggtagtcagactgtgaactttcaggctctttgatgtaggcatttggtgctagaaaatttcctcttagccttgcttttgctgtatcccagaggttttgaatagattttgttgtgaatgtgatgaaaacggaacatttgtacactgctggtgattgtaaattagtacaacctacatggaaaacagtatgaagatttcttaaagaactaaaagtagatctaacatttgatctggaaatctcactaccgattatgtacctagaggaagagaattcattatatcaaaaagacacttgcacgcatatgtttatagcagcacaattcacagttgcaaagatatggaaccatcctaagtgccagccgaccaatgagtggataaagaaaatgtggcatatattttcatataccgtgaaatactattcagccacataccatgcaatactactcagccgtagaaaataatgaaataatgtcttttgcagcaactttgatggagctggatgccattattctaagtgaagtaattcaggaatggaaaaccaaatactgtatgttctcacttataagtgggagctacgctgtaggtacacaaaggcagacagagtggtagaatggactttgaagactcagaaggggcagagtgggaaggtagtgagggataaaaaattacctttggggtgtaatgtacactacttgggtgacacgtgcactaaaatatctgattttacttctatacaattcattcatgtaaccaaaaatcacttgtattccaaagactattgaatttgaattttttaaaaacattaataaaataaaagatgtaaaaaaagaaatttatatatactcatttattgagctcccacaattaaccttaggaggtaagtacttcataattggtagtatacttatcttttactaaatatttgtattacttgggaagttgagggttggggagaagtagcaaggtactatgatttggggcagataactaacttatttattcgcacatacagtttggaccatgagacacgagctcaggtccctcctcctcacctaatcaaagatgaaatatgtgggatgggatgaaataatcagcagtccaatgctgagtttccagaccgaagtataaagcaacaatggatatgtcagaagtctactagggtgttatttatttaaatctatttcatggaatttactaccaccttaatggcccgaaagtgttaaagtatgccccagagtaccgaattactccctaaatgtaatttatgcttgagaataatctgactaacttgatttagaacatcagaaaataagttatgctgcacataaatgaagcagcagtgtaattttaaataccggttgcacggtgaatgagaattttaatatttgcaaaattctaaaatcacttgatttattatccttatgtttatactgacatttttttgccctttgttaagttccatccatatttcttcttactgccaagaaaaaaaactttttttcctagaaatattacagaaggcaaaaattatatttgtttccctgaatgctatttttgatgtctctacttgtttctcattgttaccatttgcttcattcatgggcagcccaattaatggagcgagacaaatttagggagcacagtgactaattagatattaaattggtaaatctaactttgtaaaaccagaaaaaatatatatatatttttttcatttggaattttccttggtggaaaagagtttaaaagtagtcatgataaaaaatgtaattttacgtagtaaattcaagaatagatttagactgtgctattaacagcacctattaaatactgaaaagtgtattttaaaattttatgtgaggcttgaaatggagtctaaagtattattactcacattaagtgtcatcacatgtaaagcccatgattttattctttaatattttgtttgaatagttacttatttcaacagtaatttcaataataaaattaaatcaactttacagttttcaaaggtttagcagttgcatgctgtaataaatacttcatatttatatatttataaagtgacagcataagtcatttttattaggtccttgaggatgcaaaagtttggattatacgaggagacgagagaaaaagggaagaagggcatttcagaaatatgctaccgatatgcaaattcacaagtcctaagacagtagcaggggtcgggcagaaagtccatcctgcctccctcttgtgggcctggaacaatggtgtaagtggaaggcctgttccccttctcttcctacctccagctctgtcttacagagctacggataccatgagcaagtgtatgaacccttacggttttcttctcttgggagaatgtaaaggaaagataacttgtagaaacttgtagataacttgtaaaaaggaaaagaattcagggtgagagggggatttgttgaatttgatagaggatggcaattaccaatatgatgagtgattgagaaacaagtctgtgcaacaggtttgaaatcgaaaatctttgaggtgtacaggatcctgaaatgaagaatgggcatttatagcagtatgtcagagaaacagtcacctcctagtagctaaaagtgttggcaaaagtatagttcaagtgattgggtaggaaaaacagcaaaccaagagtggagactgatggttgctacaaaggtggagtggtaagtcgtgaccaactggtacttctctgtgctctggttagctgctgactgtttctcagactgtggtagcaggaggagggttggagttagcagtcatttgcatatgagactgccatttaaaaaaaaattttaaattatttcatttttctgactctcaatatgaaaagcacattgtagacaaattgaaaaatatagaaaaattatataagaaaatatagtctcaccagtatggaacaatgctaactatgttgcatagatttttagattctcattcaaaagcaactctttgactccagtgatgcaaatgcatgtaacatatgcaatgtgcaattcatttttaaagggaataaacttacgatatattcataggtcatttattgtgtgttatataccattgaaaatatatgaatgctaaattattagtaaacatgcaaaaacattggcaagatcattttgttgtggaaggatatattgtatctgaataactctagaataccataaatcatcaaaggcaacattcttatttttcactaactacagttagagaatacctcttcggctaccttcggttgccttttttatgctaccaaaatgctgtctgttttacaagattttaaaggttaagcatataattattcattaaatacaatgagtgcaatgtacatgtagatacattattaaattttgggtagttaataaaaataaggggaaaaaacctctagaactatcacttttaattgtttaactgataaagtgaagcttcatcttggaaaaataatttcacaagagagcatgtgcactggtagaaaagtgccattgaaacaagagatatttgggttagaagcctctctctactatttaataccattttcaccttttggcaaattacttggcctctgttttctccaatggaaaatgggaataataattgttatgctgcagggttattgtaggtgtcaatgaaatgatgtgtctggcactataaaagcacagagcccggtgcctggctattagtaactgtttaataaatgttaattcctttctctgcccaggacatcagtaggcagatgtagcaatttaaaacttctagtgttactttaaattcctgaatgaaggtagaggactgaaaagatatcatggtattcaaaagtatgatccattgcttcttaagaatagagttcagaaaagcttgacagattcctgtactctgaggcagcaccatagccggtaatctgtaggatggctattggttttgtgctcacaaatgcttgcttgggcaggccccaggaaatctggtagactgtaagcccagtaagatttcaaatcttactttacggcagtgtttttcaccttgactgtacattgaaatcacctggatgctttgaaaaataacagcgtcagtgtccaacctccagaaatactgattaagttggtctggaatggagccccaggatcactgtttggttattgttgttgctgtgttttaaatgccccagttgattcttatgtgcaactgtcttaggtaaacatacagccctggttcatattatttctgcctcagtctcttttatgactggaaggtgaccaaatgcttgtttcctaatattctttccatgtgtagtattaacacatttgacttgtactaagttcctgcagtattccaatctaaaattttagtgactacaataaaataagaaggattaaagaaggcatcgcatagtttagtatatcggttatttaatgcttacatgtgagcctacaatatgaattatatctgtcatcttattttaaatattgacagaatctttaatgatagtgacgaattattgatttattggtgtgataatggtattttagttatatttttaaagttttatttgtaataactatatgtatttatggggtacagtgtgacgtttcagtgtaatgtttcattgtgtaatgatcaaatcaggtttcttggcagatccatagcctcaaacatttataatttctctgtggtgagaaaatttaaaattctctttcactattttgaaatatacagcacaatattggtaactttgttcatattactatgcaatagaacactagaacttattactcctttcagttgatgaacaggcagttttggatcaagaataatattgaaagtgatagaatttatgaagtaatttttatccaaaaatattttgaaagggaatatattgcttccaaataatttattacaatgttaagatatttgtaaatttctagaattaaaaaaatatatttttaggaaagaaaatgccaatagtccaaaatagttgctttatctttcttttaatcaataaatatattcattttaaagggaaaaattgcaaccttccatttaaaatcagcttttatattgagtatttttttaaaatgttgtgtgtacatgctaggtgtgtatattaatttttatttgttacttgaaactaaactctgcaaatgcaggaaactatcagagtgatatctttgtcagtataaccaaaaaatatacgctatatctctataatctgttttacataatccatctatttttcttgatccatatgcttttacctgcaggcgatttgacagatctgttgagaaatggcggcgttttcattatgatataaagatatttaatcagtggctaacagaagctgaacagtttctcagaaagacacaaattcctgagaattgggaacatgctaaatacaaatggtatcttaaggtaagtctttgatttgttttttcgaaattgtatttatcttcagcacatctggactctttaacttcttaaagatcaggttctgaagggtgatggaaattacttttgactgttgttgtcatcattatattactagaaagaaaattatcataatgataatattagagcacggtgctatggactttttgtgtcaggatgagagagtttgcctggacggagctggtttatctgataaactgcaaaatataattgaatctgtgacagagggaagcatcgtaacagcaaggtgttttgtggctttggggcagtgtgtatttcggctttatgttggaacctttccagaaggagaacttgtggcatacttagctaaaatgaagttgctagaaatatccatcatgataaaattacagttctgttttcctaaagacaattttgtagtgctgtagcaatatttctatatattctattgacaaaatgccttctgaaatagtccagaggccaaaacaatgcagagttaattgttggtacttattgacattttatggtttatgttaatagggaaacagcatatggatgataaccagtgtgtagtttaatttcaacttgtggtgtcctttgaatatgcaggtaaagatagattagattgtccaggatataatttggttgctaaattacatagtttaggcataagaaacactgtgtttattacacgaagacttaattatttttgcatcttttttagctcaaattgttcatgttgcaatagtcaatcaagtggatttgaattgtagccaatttttaatgccagaaaatactgattaagacagatgagggcaaaaaacacccagtagtttattaaatactttagatatttcaaaatgctggattcacaaaagcagtatcacatttgactttacaagtcttcattctcaaatatgtttccatagtaaatatgccctttaatattaaggagttaagcatttaaacacctatttatatgataagctatttaaacacagaaaatatttttaaaaccttgtgtaattatatgtgtatcaatcaaacttgcatgcacaccagcgttggcatttgtatagagaggaaatgtatggattcccaatctgctttaatatagaagatacattttaaaaatagcactgaagtgaattttgggctaatgtagcataatggggtttctgcctgagaggcagaaacatattagagttatataaaatgttttggggtagatatagaaaccacttgccattttcaatgatatccaacccaaggtagttatatatttcaatttatattttattatcaaattagtacttattgtgaaaaaaatcaagtaacatagaaatttgtaaaagtacctccattctactctttggaggatagttgttcagtatgaattttgctacatatttcaggctgggtttcttggaaagccattgtaaaatggagatttgtatgtagaaggttaactagggagtacttttacgatgaagcaatttgttttgatgtaacttggtgtagttttcttcatgtttcttgttcttgaagtcagttaagctcttgaatctgtgcatttaacatttcatcaaatttagaaacctttcaaccatttttttaaaaaaaatggaactccaattgtacatttattaggctccttaaagtgccccactactcactgatgttatgttcattgtctgtttggtctctcttttctctgtaatttgttttatataatctctattgtcaaattgactaatctttttcaaagtctaatctatggctaatcccatgtagtatatatttttaacatcagacattttcatctcttagaagtaaaagttgggtctttttatttcttccatgtgtctactcaacatgttcagtctttactttcttgactatatggaatacagatataataactgttagaatattcttctctactaattttatcatctgtgtctattctgggttaatttaaattgatttatttttctcctcattaagtgtgttgtttaactgcttctttggatgactggtaatttttgactatatgccagacattgtgaattttaacttagcgcgtgcttgatacttcaaataaattcaaatatattgaaataaatattctcaaacctcgttctggaacacagttaattcacttggaaacaatttgatcttttgagaatcttccttttatgctttgttatgaccagaacagtgtaagtttagggctactttttccccactactgaggcaaaacccttctgagtactctctctgatgtcctgtgaatgataaaatttttcactggggctcgtgggaacaggtggtattactagccacgtgtgagctctggtgattgtttcctttaattcttttgtgaagttctttccttagctttgagtggttttcttgcatacatgaactgatcaagactcagatgaagaataaaataaagctttctacaaatctccaaaatttcctctgtgtatatatcacctctctggtattttgccctgtgatcactagtcagccttgggctgctgaaactctcagcttcatcttttaacaaaagcctcctggcaaggatcactgtccttcaatgtctgatgttcaatgtgttgaaaaccgttgtagcatatattttgtctttttttttttttttttttttttaagtgtttcaggtgtttcaggcaggagattaagttcagcctcctttactccaacttgaaaacaagtccaaaacaaactattttgatgtaatttgatcttttaatacattaacattacacaattttgtgaatatatcataatttaaaattttcagagaatgtctaatggtcctcatttcttgacagtgtggtttagttgaaactgatgaacattttatcaaaacttttcccctcaattggatacttttttttttttgagatggaattttgcttttgtcacccaggctggagtggcatgatctcagctcactgcaacctctgcctccaggcttcaagcaattctcctgccttagcctcccgagtagctgggattacaggtgcccacccccacacctggctaatttttgtatttttagtagagacgagatttcaccatgttggtcaggctggtctagatctccgacctcaggtggtctgcctgtctcagcctcccaaagtgctgggattgcagacgtgagccaccatgcctggccaactggataattttaaaaagaccattttatttagtctattttttctcaatctatagatgagataagaaaaatcattctagatgtccaaggaaaaattctttcagaaaagagctgtgaatgatatcacaaaccccccaaacagttaaggtatttctttcctggttattttatgtccaaaatcatgcatatgaacatgtgcacacacatgagcgtgcacacacacatgaatacatatacacgcacataatgtaccttaggttatctttccattctgagtaattatcgtaaaatgggtaaaatcaaccccgtaagataccttcatcgataaggcaaatcaaagctttggtaatttctgctatcttggcctttgttgattgactaataatgaataagagaatgagtttcaatatttactatgaaattattttagaagacaggatgtagacagtggctgttagcaggcaattgtttggcatgagccagtaatggttactgtgaaaaaaatcaaccaagcagcccatatattaaacaaacacacgcagaagcacgttggagtctgaagcctcatatgtacaattttcagtaaagaaataacttttagatatgaaataaacaaatagatatatgttgtaaacttgtccctatgtattttgatcaaattgcatcatatttttttcactttaaagaagagaatttagtgctttaactgagacttagtgttatcattcaaaatatactgactgccaatagcagtagaaagataatctggttccatgcaactctattttttttcctctgtcgcaagtaaaagacaaaattaagtacatgaattagtgctttttgaagatattccagagcaatataccatgccactatggagaacctctctaaaaatatcccatttttttacctgagaaaaatattgatcatgttatatgccactcaaattggtttattaaattcgttgaatgatatcagcatctcttaatgcattcactaaacaagcagtaattgagtgcatatacaaagttttatcatccaccaaaacagtgacaatccacatgaggctctaatagaagtttagaaagggggttaagtggttaaatgctggactcagaaagattggattcaaatcccaggtcctttagcttaatagttgtagaatcttgtgaaaatatcttaattcttttcatgtctctgatttctcttctctaaaatggaaatataaatgagatgtgtataaagccacttggaatagcattttgcacaaaataattactcattaaatgtaagcccctattataactaatcactctttataagtgattagttcatatcaatacaaactaagacttatttactgaattatcgtctctaaacatccacactgcagaaaaaccaacctggaaatttcataaaaccttatttttatgtagtataatttcttctcaaagcataagggctcttggattaggaattgaggaaaattccaattcagccaaacgcatctgtttcagatagctgacacttctgcctactcatttcctagctaacaagaagaaatgttaatgggagttttcaaaggaaaagctgaacaccatgaaggaaagtgacacaaataatgttagctcatatattgacagggtgaatttgtgtgctttcaagtcccttcagtgaaaataggaaagtagaaattataaaatgccctaacatttaaagctagcatgttcttggagactaggaaaaaataagttttaaaacatgggctatgatagaatgagatggaaaatgtttgtagttgccagtagaaacaataacaattaccattagattaagtatttaaaccagctgaatatttttattaatggaaatggcatctgttttatgaaataatgctgctgaatgaaccatattaaaaatgaccagtatttcctgcagaacgttgtcgcagacatacaagcctgagaccctaaaatcttaaggtattccatttgaaatcgaccttaagacattaacagtagtggtattgtttagatgaaattttttaggctttaaatcaacaaatgttaagcagacatggggagcgaaacaccagtgtgttattctgacatgaataaactgctgtttttagggaaaaaatatagtcttgttaaggttaagctaattggttttctggtatcttttgcaatgttagtgtgttttactgctccataacctatgttatatggtaaatgtgcaatatatttatatatgttgctgtaaagaaatgtaataaaaaactgtttactttgtgatatgaaagtaaaaatttattcattgtcattgagcatacagaagtaaatatggattacatatgtcatattttaatgttcacatggtcccaccatcaaatgttgaaaaacttatagtttaacgtcatattctattgaagaaaaatacactcccttttctcaaatgtgaaatgtccagagagaatggaaaattacatataaagcatgtagttatagcatggtgaccctgctgtgatctctcagatgaggaacaaaagggagaaagaaagagcacactggtgctttggagttgagagaaggcaaaaaaagagtacaaaaatgtcaaagccaagtttagctgctcttcagctctccctttagctgctcttcagctttaccttaccatggttattagtgattgaagaaaattctaaagcactttttaaaggacccaattctgaagagtttagattcagagagcacaatggagttggagtgactcctgctcaaaagtttgagacaagcgagtccatgaaaagaccgtcctcctcttaatggaaatacccaggttttctcattcttctcgccttgctttcagcactcgcagcccagaaagcccttatctaacaggtactgccgttgaaaggtcattgacttgtacaaaaatgatgagtgctgaatagatgtgcataggtcactgacagtatctgctacagagaatgagttttcgtatttttattaggatacacctaacatggcaatctactgcctcaaagaactctataggaggtaagtgaatttatattaatacagattgaattaaaggataatctagaaaaaggcatatgatgtaaaaaaatcagacacaagtatattttctgtatagtcagtttttacattgtgatttcaccagctggctgctgagtttgacggcttcttaacagccacactgctgagattcaaatgctgatagaaactttgatggaaaaatcactggagtaaatatttctaccatctgttgcccttcactgggaccctaacgttaagaataattcataccattgcttgtcctttatatttccccagcagtaataaaatttcataagattttgttttgtggtcacaaagctatcctggtttctgtaactagaagacatacactagcataagggaatcagccggaaaatttactgctaagagaatttgtctctagtcacttactttaaggttacagcaatgtgtaagtgtgggaatacattttaaaatgagcttttcaaagttattagctggtagtggcatgagagttaagtctcttaatacagttaaacagttgggcacttcatccttgcgtaaatattgttacccttttattgctgcttggaaactcctctgcaactttttggcccctatccatcttttcagaagtagtaaataaccaatttactgggagtgtggtaccaggcagaaattccgagaggggctttcaatccttgcccatcaagtgtatctttcagaaataagtatattaaaataattggataatttcagtggcttgttattagacttccgttgtccagcatggcatgtttaagaagatgacagattttcatacattattggaaagaagcaagaacaaaaaaacataacttactgtagtaaccacggtaaagaactgcttaaaatgcaggataaacatgtcatccctaagggattcccattcttagagcatgaaattatcaagagagtaagagactacaaaaaatgagaagaatgctgattgcaaattccaaatagaaaaaatcaaaacaaaactgcgcaccatcattctggaagcaatgagaagcagaaattgtcatttaatgaaatgtaagattaaagttaatagaagtaattttcatgaaataatattttgcaaggacgatgttccagccatattgatcttcgtgttttcttttcacatcccttcttactgttccctagaatgcttgtttctacctttaaatttgcttttctctctaccagagggctctaccctatctccagtttctcaccatgtcccaatctactccctctcagaatttttgtacacttccctttatatatatttgtgctctaattttatattcacagatatgccttttgtaactcccccatcttaaagaaagcacacacgtacgcacacatgcacacacacaaaattgaactctttctgggagatctgcttaactttcttcataactctgtcacttgctgaaactgtagtatgtgttttcatgtttattatcttttccattagaatgaacatattttgggtacttggtctttctcgatcaccaatatacctcggtacgtagaaaaattgattcatatattgaaaatgtaatattcagtagaacgaataaatacataaataaatttaaaaatgatacttttattgtattacctgagacaaatgatccccaagtttgtccttgcttttcatagccaaaacattctctcttacattgagcttccttcacctcttctgtgtacagagcacttaaaattttcacattgcctgatactttaacaatatgatggccctgttctcttacccattggagcatatgttaaataccagaacccatgtaacaaacatatattgtgatcctactgtgtgcaaagcagatactgcttgctgctaggaatacagagctgactaagagctccttttctctttatgagctcacagtctcatgagttcaacgtcttaaggcacaacgtctaaagcaaagggcagtaagtaaacactccagaaagtactggatctggcctaggacaaatggtgggttgtttttccagctgttatttttcctgccccctaattgacagtcctccattacacctctgggatacctagtctgacttgggaaaacctgactttgggaatcagaggcagtctctcttgcttatatatgaggaactctaatggatacttactgtcattagagaaactctgcttctagcctggctccttttgtaaagaaggttgagtccccttggagagcctgcagaacataaccatttgcatgtaatgaacagtttgtaatactttgagattgatgtgcaatttctatttgacaagggaaaaacaattaggattaaccgtggtcgtatatcccagaataccaacgttgtttccacactctaagtgttgttgggtcattatatgagattcataattttgtcctgttgtacccacgtttgcattaccattcagtcttaatttattataccctattaaaagtttttttggtaatttgttcttattgctactcaggcattaaaatgtctgcaggctgtgaaaatgaataaatttaatgtggcagcatagttctcaaaatcctggctttacaactcatagtacaggcttgtattgtaaatcctagttaacatggatttatttgaaaatccaattttactgctaatcttaaataacacatttttcaaacattttatccttgaatttctatttttttataatttatggctgttgtatgtatttacaaaaggacaatgtgtgtacttttaaatactagtaatggattgctgaaacaactgtaactttaaaacaatgcaattgttaaaaaaataaactgtgcagcctggcttaatggaggcttatgaacatatgattaagatatatgctataataagcaaattcactcaactgatagttcataggaactttcaaatttaatctcataaccagtgctatccttcaaagaatggtcagggcaatttaacgagtacatgaccacgcaagataatttcattgaagagtggctgaactgttgaaatattttctagtctccttgggatatcattaagagcagaaattttgaaatggaattgtaatgatgttcagaaaagataagtaggtaactctcttaatacgttttgtgctgctgtaacaaagtacctaagactaggtaataatttgtaatgaacaaaaatgtattggctcacagttctggagactaggaagtctaacattaaggtgtcagcctctggcgagggcctacttgatatgtcatcacatgatggacgattagagggcaagaaagatcaaaagggggctgaactcccacttttataagggaaccaaacccactcgtgagggtggagccctcaatccttaatcacctcctaaagctcccaccccttaatactgtcacaatggcaattaaatttcaacatcagttttggagggaaaaacattgaaaccatagtagtgatactgactactaccacacagggcttgggaggctaccctagctgttgcacccaagagatgaatcttctaatgtgattacctttatcattttttttactttattaaaatacttttattttacatgtatacttttgtctacccaccatttccatgtctgaccactgctactactatgtcctagcataacattccatacatccttaaaaccaagcaaagggtggagttccatctttaaaaactaaacaggcattttggacaacacattcttggcaatggaatctggacaacatttatcaaacatggtagggaaggttctcactctgcattatcaaaacgacagccagatatcaactgttacagaaacgaaatcagatggaaaatttttaacaaattgtttaaactattttcttagagagacttcctccactgccagagatcttgaatagcctctggtcagtcatctggaagcaattcttcacataattcatgaacttggcttccactttaggaagagaaccacctttttctatacttgcttgcatttttgctttaatgtcttctacagaactaggtcctttgggtgttttaggagtttttccttgttttgaaggattcttgtccttttgatcttggtgttgacggttttgagtcttttccattccgatttgacttttgtgcatttttggctggagtatctcatatagatttcttcactggcgctttttcttcagtttcctcatcatcaaaatcatcatcatcatcaaaatcatcatcttcatcagcagcaagttttacttttttctgtggaaccttgctaccacctccaggagcagatcgctttccagatatacttatgagtttcacatcctcctcctgttcgtcttctgactctgtatcttcctccccagctactaaatgctgtccactcacatgcactggccctgaaccacacttcaaccgtaagaccactgatggtgttatttcaaagccctcaagggaaaccatgggctgtacagacattttcaaagctgccagtgttactttaattggactgcctttgtaactcattgcctctgcttcaacaatgtgcaatttatcctttgccccagcccctaaactgaccgttcttaaagataactgttgctcaatttcattattatccaccttaaagtgatcatctttgtcggcctttagttcacaaccaaaaagatagttttggggcctcagaggactcatgtccatcatcgtccatcaggtggcaggacgcacttaggtgggagagaaggcagatgatgataaaggaccactgctcaagagaacagctgtgcaggacagaatcacaccagggagattacctttatcttagaaaacctgaacatcttgtgtactttgacacttctctacatttcacctaacctttaacatcaacacatttattcagaaaacttttacttttggagctgctctgtgtcaggctctatgctaggtgctcaggatattgaaattgatacaatcctaacctattcacatataatccaaggtttgctgaaattgatggacatttaaacaattgaaacatttaagtggtataattagcaaatggacatttaagccataaaaatagcatctaatagatataatagaggtcggtacaccattgatgagtcagagcagaggcaacccaaagagtaactagccagaagaattgggaaagcttcatagagagagcgatatgaaaataagggagagaattgtaaatccatgaaaatgagaaaaagttgaaaagtgatggtgtcagaaaaacttgtggtatgataatgacaagatgagaggaactcttggtaagcgtgttggatgcatggaaagaaatggcacaaaataatgctgaggacattttttattttattgttggttttgttttggttaatttcattttttaaatctagtatgctagtgttcattgtccaaactgtgaatcataaactcagtttgtggatcaacaccggcctttgatttttagtgaaacaaaatagaaaatatcagcattcatcacaaatagatgtttcacagattttttgttttaattgcgactgtgtgtgtgtgggtgtgtgtgtgtgtgtgtgtgtgtgtgtgtgtatgtgagagagagagagagagagagagagagagatggcttggatgtttatcacctccgaatcttatattgaaatgtgatttccaatgttggaggcagggcctggtaggtgtgattggatcatgtgggtggatccttcatgaatgatccctttggtgacaagttagttcatgctatatgtggttgtttaaaagagtatgagacctcaacccccacctgtttcctgctctcccctttgccttccaccatggttggttgtaaacttcctgaggctctcaccagaagtagatgccagtgacatgcttcctgtacagcctgcagaaccgtaagtcaaaagaaaaccccttttctttttaaagcacccagtttcaggtatttctttatagcaatgcaagaagggactaacacagttgtatgtgtatgtgtgtgttgggtgatttctggttgagtgtcacaaggttgtaatatggtgagtgtaaggaagtataagttttagaaaattaagaagccagttcagaaaactaatacttttggaaaatagtacaaaatcaactttacaagaatatacacagaaagatgtaatacaagatttatttcattgcagtaatttataaagttggtttagtgccttgcttttgcatgctgttttaaaaattaccaagaatatgacttcatgtgattttgaaatactcccagcaagataggtagaaaaggtattcttataactcttagacaaaaatttcggaaagtttaaacgctttatcccaaatcataaagctaataaatgaagaatctgggattcaaacaccatattttttttactgttcatcagctagaagttagaaatgttaagccaaaaacattaagtcactgctctgcctaataaatcttgaggaaactaataaaaagaataataccactgactacaggacaaggtcttcctaagagaccttaaatatattaagtgatgaagatgaaacttcttttattcataaaaatgttatttagttatgagtagagctctaattaaacttattttatattgtcatcagtaaagttgagacataacatatttattaatataattataatttgacccatagtgtattaaaagaaggatgttaaaaggagttgttattagagatgatgttagggttgttgatgataataacagtagtcataacataacaaagcacttcataatttaagaagtgccttcaattacattgttactctcatggtaatctctgtttgatatatagatttggcggattctatatcactctaagacataggttactgaggtgacggaggaatttagcaagcggctgtcaaatggaggacatgagcattggattgtgtatggcaagggctgatggtctctaagaaagcctcttggtttccacagggcagaagccctttgaagatcatagccaaggatttagtaattgcctccctttcagaataccctcaagagaaaagcccaccataagacatggttccctacaggcaaaactgcttttccttaaaatttactgttccctgaatatcagccttctttggctcattcaacatagttttcttaagtttcaggacagtgctgcagaccaaaagtttcaacattgaggaaaacaatactacttgtgcagtgaccctacctcagtcagggaggcagatgcctgcctttatgtgagggaataaggaatcaatcatatttccagcactcaagaaagccagtctagtgcagggagagatagatacataaacctcaaagttatgatatagcataatagttttaaatttccataataactgtattttaaaagttttatagaaacagaagagatgacctcagtctggaaaagccagcttggagaatggcaaccaatattaagtggcaaaagctttgggatcccaggcctccagatggagggtgatagcatgggccagacaggtaggttaggaaaactttgcaaaggacattacacggtacacagacaagtctgtgttttagcctataaaccacagttgcagaatgtgtttgagcaaaggcttttggggatgagatttgcacttttcaagatttaagtttgtttaggatacttacggtttgctgtatacttcctgggtttttacattataattacggtttgaactttaaaggaaaactgcagtttagcatacttgaaagagtgcaacttcaagtcatgattggagacagatatttaacagattttgtgatcctgtgatgcttattttcttctcagacataccacatgacaatcatttttaaacagtttatttctactttagcatccatctgaaggtgttgtgtatgttttctgcttgaaaataaagcagtgggctgggtgcggtggctcacgcctgtaatcccagcactttgggaggccgaggcaggcagatcactaggtcaagaaatcgagaccatcctggccaacatggcgaaaccccatctctactaaaaatatgaaaattagccaggcgtggtggtgcatgcctagagtcccagctacttgggaggctgaggcaggagtatcgcttgaacccgagaggcggaggtcgcagtgagccaagatcgtgccactgcactccagcctggcgacagagtgagactctgtctcaaaagaaataaaaaagaaaataaagcagtgaatgcgattaagatggatttattatgatcataaagtactcaggagtcttattttaaaagacagcattactgtaattaaaaatatagggaagaaactaatgctgttttgcgtatcattctcagctctctcaaaatcagatattaagctcttgctgccaaaggagactatactgcacggtgctcacctgcataaactttgagagggttgaattgtgccaagcaattctctcaatacataaattaaccaaatatttgttgacctactgtgtgacaagtattattccaggaaataagagatccagcaatgaaacaagtatggcttcttatagagttcccaaaaaggaaataaaaggatatacgtatagtgatatccctgaattaaatttctcttttgaaaataaaaattctatcataagctgtaactgccaacacttcaatactcattcagcagttttcagggatttgtaccttttgacttatgagaatttggaagtctaattgtatcattgcactggagtcttaaagaaacagataagcgaatgactttgcctgtatcattgttgactgtacttacaatcagaaaggggcacaggacagatgccagggagtaagtggacagcccataaatggaatggtaagaaagaagaactatagtggatttggaaagttcccttcagcattttccctagacaatctttggctgtgtttgcatgatcagtatttcattcacaggatattgagctcttgatatagttctcaaaacccaaaatgaaataagaagtctactctttatttaaattcaaattccagagagttaagtaactttccaggaggtaatctaaatatggcctccttgttggggggggggggggtgtttgaatttgcatataaatagtctcacccttaaaggaaaaccacagatggtggtaatgatgtagtcataatgtacatctccacagtggtggaacaaaatatccacagttttgctttccccagtttcagtgacccatggtcaactgctgtctgaaaataggtgactacaatacaataagatattttaagagagagaaagaaagatcacattcacatgattttcattacaatgtattgttataattgttctatttttattcatgatttttaatctcttaactgcgccaaatttataaattaaaatttatcacaagtacatatagtttatatagggctcagtactatctgcagtttcagacatccactgggagtcttggaatgtatcccctacagataaggggtaaaccactgtatcctatttgtgtgaatgctacaggtgttgtgagctcataacaatatgacatcaacactgaactaatccaggatttggtagtgagagtgatgtatttgcaaggagtgagacgtggtgcctcatccaagcagagaaataattttgaaatttgcctgacaataaaaatcacaatgtgaggtctctctttagagctgcaaagtccaattcagtgccccctagccacataagatactgagctcttaaaatgcggctagtactaattgagatgggcactgagtataacacacatgccagggtttgaatacttagaaccaaaaaggaagtaaatgctcatttattgcatgttaaaattatggttttattatagttgattaaataaaatatataattaaattgacttcattttgcttttaaaaatgtggctatgaaaaatttcaaattatatatgtgtgtgattacatatgtgtgttttcacatatgtaactgatgttacatgtgaaattgattgttacatgtgacatgtaaaacacgttacctaacacgtgcatatgtatgcaacacatatgtaacgtgttacatatataacacgttacatatgtattgttacatgtgtgcttgcattacacacatgcataatatgaaattacatgtaatttcaaattacatgtgtatattttgaaaattacaaattacgtattttgttatttttgctttacaaagtcaaatttaccctatttaataaagcatcatgagttttttataactagtaaactttgagacttttgtaggagaataaataatgcttattataaaaactgattggaaaagtgagctggagcagggagcggaggaaaaaggactagagatcacctttcttcccagctccgctcctctcccaaccttttttctttccattctctcatcccaattcaaaagtgcagagttcacagttggtgtgctgatttagaaaacagatatataaacagccttaaattttctccaggcttttacaatgaaaagaagttcaatatcaaaagtaacaatataatctgtggaaaggtatagggggctatgtttttgaggtagaaactataggtgctcctggccaagcatggtggttcaagcctgtaatcccagcactttgggaagctggggcgagagtattgcttgagcccagaagtttgagtctagcctggcctacagggtgaaactccacctctactaaaaatacacacacacacacacacacacacacacacacacacacacacacacaaaagccttgcgtggtggcgcttgctgatagtcccagctactcaggaggctgaggcgggaagattgcttgaacctgggagacagaggttgcagtgagctgagatagcaccactgcactccgacctgggtgacagagtaagactgtctcaaaaaaaaaagaaaagaaagaaagtataggcactccttatatgcagctgctcacacccctcctccttcacacccctcccccttcacacccctcccccttccccaaaatttgcaaggggaaaaatgtgtgtaattggcagtatttagtggcgtgcaaccgtgagtcatcagactgcacatcctcacttctgctagtggctcagtacccaacagcactcagtgaaaactaactcatttcaaaggtgaaaacaagtgagtttggccaccagggagtgttcaaaactgtcagtgctgaagcaaatgtggagggtgttctgtagtttgttcaggttgatatttgtggtccaacccctagctgaactactaattattaatatctgtcttgatggtgcctcaggagaaagcttctcaaagggaatcaatgttcaaattatagtaggtatcttggccatggaagttattgaattttagccaatacttgctactctttcatttatagtgtgagaatgcagtgtaatgaacctgactctcactgtcctgacttgcctttctcatcgcattcacaataagcacgtcaatacgtatacacatttcatatttctaaagtttactttatttccttattgtacatcgctgtgctgctgatggaagagaaaaggaaaaacactattgattgcaaaactgttttatctttggtggcttagattttttttgtatgatatgtaacgtcttgcatacctaaggcaacacgaagctaaatagatttgcatatagcatgtattttttccaattaaatgtttaattttgttcagagtatactggggacattttgaataatggagaaaagtacaaagaaaattcataattctaccacctatcagcacagtgaaattttatgaagaaacataattttcatgtaaatcatagtgaactcacggtaggttttatttaatacagtaattggagagctggtaggaagacaaaactggttcaaaagagaatacaagaaacaaatgcttctataatgagtgaatttttaaaaaagtattctggaataagattagtgaataagatactaaactcgttgataccctacagcctttggggttatatcctctactgggtaaaaagtcatttacatcatatcagttttctaaaatttgcattgaacttcatagcgttgtaacatgtgtgggcccaaattaatagtaaacagtaagagttgctttactctgaaaatattgaagctcttgtgagggtgtgaggagtttgttagaaaacaacgctaccattattttgaaacacacacgatcatcttttgttttacttctaagttttggataatttttcttaaattatcttattatcttatccattttcttaatttccttaaccttttaaatgtttctcctaggcacttttattgatttttggaatatagttgatatgtgctgaatttttatcatccagttttaattctactgaaaaatctaaaagatgttcatcaactactatatttcaaatgcatacatcccctttcatgctaaagaaactgtatgggaaacacagtctgacattttcaggacctggtatcattaaaagtcttgacactgttaaaattaaacaacgccttttttaaaatcaaaggatacaaaagggctgtgttggtcagaggatacaaaatttcagttagataggagacataagttcatgagatcttttgtacgacatagtgactataattaataataatatgttttcgaaaattactaagagagtcgattttaagtgttctcaccgcaaaaaaatagtatgtgaggtaatgcatatgttaattagctcattttagctagtccacatttttcaatacaatgtgttgtataatacgtgatatatacaacttatattttccaattccaataagtaaaaataaatgtaaattatttgaaataaataaaatgtgaagaacatccacttttcatatgaaaccatgagatattttctgttaaaagattaaatgtccaataaatttttgatgttaacagaaacaaaaatgtttaatatttaaatacatatttgcatgctattgaccccctgaagttcactgctgggctaagtgaaccaactatatcttaagtcaaaaatgctgaaattcttccccaaatcccaaagctcatgaaaacataaacagaaaatttccaaataattctacagggaaaataagacacactatttgatctgatcaaacaacgggatgattatggttaataatgagttacttgtacatttaaaaataactaaaggagtgtgattggattgtttgtaacacaaaggagaaatgcttgaagggatggataccccgttctccatgatgtgattattacccattgcctgcctgtgtcaaaacatctcatgtaccctacaaatatatactcctacgatgtacccacaaaaattaaaataaaaaagagagggacccgaagataagctaatatttaagctcatcatacttattaagataagcaatacataccgaaagtaatagcatttaaaaccagatgttgggggagggttctaacttgttcattaaaattcaaagtcacctgtcttgttttttcttttgtttttgtttttttttttttttttttgagatggagtctcgctctgtcaccccaggctggagtacagtggcgcgatcttggctcactgcaagctctgcctcccgggtttacgccattctcctgcctcagcctcccgagtagctggtactacaggcgctggctaccacgccccgctaatttttttgtatttttagtagagacggggtttcaccgtgttagccaggatggtctcgatctcctgacctcgtgatctgcccaccttggcctcccaaagtgctgggattacaggcgtgagccaccgtgccaggccacctgtcttgttttatcatgatcccgagagtatatatgtatgtgtacagctcatctaaaccctttttctttcaacatgatcaatagattgaacattggagatattttataagaaataatgaagacaactcaatcagcacatatatatattaaatgtggaatctataatgattgcgaagcctgaagcaaactaaatattcagtaataggttctttttttccatggtatatccatttgaatatataacataaatgccttacatttgttttaactatttaaggtttatgttgttagtgtgatgaaatggctggcaaaagtcagaaactcaggaaagtttcaggcttatatctggagcctggttttctttcttcaaggtagaacctctgtgaagtgaaaaattttttttatatctggagcaataatgtagaagcttaaatgtattatccaagttgtcataagcctattatttctttacattactgaagtgaaagacagcattaatggctaaatgccatacttggctataatttatattgtttaggactggaaatgagcctgaaatgtacatttttttccaaaatagttcatgtaatatttgaaacctgacaagtaacctgatgatttcatggaataccatcaaatataaatgtgaagttttaaagacacagggaaatactcagaataaaccccctaaccacaggccagcagaagaactagacttgagaaaatgaatgggaagatagatagtaacaaatgacttctttggcagccttatatatgcttagtcttatagactgttttatggatgctctgcactctatttccagcaagtatggcatttggaacaggaccacacgagacaaactatgagttcacatttcccacaactgcacagatagaaagagggaacaacagaatactccctttcttcttgaaacaataacttctgttgaagctcactggcttcttttcagctgtttctgctagctcctcctccgcctcttgacctctaaggcaatgctcttcaaaatttcaagactgctttctaattgaaacaaaacttataagcacatttcttcccacaaaatgtacatttatttgtaaatcatatatgaatatgactaagcatgtaaacgtatgtgaaaatagaaatcaataaatataaatgcaaacacaaatagaagcattcacagttttcttttgtgtcccagtgagttgttccaaattcctcggaggtaggtatgtcacagtttgagactataccttcaatcctagggtttctggtttcgctctcctcctaggtgatagcatccatttctacggacttaactgccatctttagttgaataactcctctatctttccatcccatatttctcttgattccaaacctgcttgttcacctgagcatatgacacaattcattggctgccgcacatgcagctttgacattttatttaaaatctttccccttccccagccctcatctatttcacagtagtatcttcttcttatctacttgattggtaagcagagtccacatgattccatcatttatctcccattttatatctaatctataagcaagtaatgcaatgcaacttctgtctccaaaaatttattttgaatttgccttctcttcctctgcatctcccccatcttaggccaggtcacctctgccctcttgccagattaggtcacattctcttactactgttgttattctcttcctattcaatcctacaccgcagcaaaatggatcttctcaaaatgtcagctagataaaggcatttctgtgcttaaggccctcatggatttatcttattaggatgaacacccaactctttattatggcttagaatacaatgaattacaacacataatgaatatattatatttctatctttaccattttcttcttaagtcaacctttctcaatccatataggataatcatattagtgcttcctcactttctaaaacatctcagggcctttgcacgtgtttctctgttcttagacccagaatgctcttccttttctctttgtgtagctaggtgcttctttccatttacgtatcacatgaaatgcagtcattccctcctccttccctcactacctcacaaaaagttgatgcctctgttaaaccatgaatggaattttactcggcagtgaatagaggaaaaaccaatggtaaaagcaaccatatgaatgaatgaatgtcaaaaatattatgctgagccaaaagtcatagacacaaatatgggtatttacatgaagttaaagcacagcaaaactcaattacggtaatagaattaagaaagtggttacctctgggtgagggttggaattgagtggacagaggcattagtgactttttcggggtaatggaaatgttgtctattttgttcaggtggtgaatacatagatacattcaattgtcaaaacacatccatccaaacacttagacttttgcactttattatatgcaaattatgcctcaactgaaaaaagtttgttttcaaaattatatcaacagttgaaattcttttaaagatttgattcaaatgagattaattctgtatccatcattgatgtatgatagttttgtatgtagttaaggttattggagataattgaaagttatactcacaagaaggctgcataatatgaagtttatctgccttgatctttaatagctttcgcgatttcaacttcttcacagctctgtaagaaggcagtgtggcatgttgaagcaagcatgtgttttagagtaacacagagctggtatacaaccccatgtctaccaattatcaatgatgtgggtatgttgctggatctcaataatcttccactgtgaaatggaatgtaacacctgactcacaacgcaaaggtatttaccttatgtaatataattcctgcgatcctgggacctcccttaatcccatccacagatgccaggttaaagaccccatcacagactagaacaagttgggatgtcaaaatgaataaatattaatcgaagggcctattgtgattgaacaccacgcagtaggcactctctaatacctaccgtctccctcctttttgggggaaacattctaaatgtgcaaaaaataaagggttatttgctttctggcacttgggatcgatttattgaggatatgttagcagaacagcaaaggtgaaacactaaaagcaccatcaatacacaggcagaggtgaagccataaagcctttattttttaaattaatgcacaatatataagaggtatgttagaatgaacgtccaatccctgaaaggatatacgaaagacattcataaaattacatgggcatgttttcttaatgttcaaaatattgttttaattagtgtattatgagtttattcatgtgtctgtgtgttgtgttatattaatcttttcttgcattgctataaagaaatacctgagactgggtaatggatgagaaaagacacttacttggctcacagttctgcaggctgtaccggaagcatagcagcatctccttctgtggaggcttcgggaagcttccagtcgtggcagaaggcagaacgggagcaggcacttcacctggctagagcaggagcaagagagacagaatgaagtaccacacacgtgtaaacagccagatctcagagaactcactcatcatcatgaggatggcaccaagaggatggtgttaaaccattcatgagaaatccacacacatgatccagtcacctcccaccaggccccacctccaacactgggaattacatttcaagatgagatttgggcggggacacatatccaaatgatatccatgtttaatcagaaaaataaaagttaacagtaacagtgattttactttgtagacctttgctaatggctgaaatctagctccattccgagaacagcctgcggtacacattttgaaagatagttgattaatatgaaagaagccttatctgtagtccttaaggccattatggtttacatatatgagtaaatattccaaagtagccatgccagttaacatatatccagagtctaaaggccactgggcgacaaaagtaaaagatacatagcaattgttactttatatcacagtaattcttgtatattttaaatggatatttgcatttgaggatatccacttaagagttaggtacatggctcttacatttaagtaacatttacttaaatttctggctgcagcaattccacataggtagaaatgaagtctgaattgagttgggggtctttgcagtgctctctctgttcattggctattttgacaatgctgagagatgtggttagccattctttttcatttcatattggcaacctagagagcaattaagccttctccccttaactagatgtatgttttactcatttctggatctttatggctgactttgaatcctagcctgtggtagaaagcatggtgtcagaaggaactatgagttaagactatgcatacttggctttgagtcttgggtatcatacctccctcatagagtgaaggaaccagggattcttcttgaggcccagacccggcatccatgttaagaatacctgtgcaattttgcttcctgatatttaaggtgaaaatgcatgtttgggtcattgtgaggattatgtgagatgttacttttaaatataggcccccttattatatgctctcatagtttcaggcaacacttgtcgtatttgtaacctcagttttaactgtaatgtttccatcaatgtccctcttacctggtacaggggctcttcatattcttggattacaaatctgtgaatgcaaccatgcatcaaaaatattcagaaaaacaatgaatgcctacctctgtactgatgatttataggtgtttttcttgtcattattccctaaacagtacaatgtaataagtatttatatagcatttacattgtattaagtattataagtaatctagagatgttttaaagtatataggaggatgtgtgtaggttgtatggaaatagtatgtcattttatatgtcacttgaacatttgtggatttgctatccgtggggatcctggaaccaatcccccatggatactgagggacaattgtattataagcagcaagagggaaaggaatctgtctattttgcccaaaatcgtgttcccgggacctagcatagctcctggcaaagagtatacaacaaatatgcattgaggagagaacagagggaaccattatccccttattctcgctgttccttcatgtaatgaataaacagtcaaatcttacaagagattttaaaccagtcagagaaaagttggaagttagttagttgttcatacattgagaagcctcgacgctgtgtcatctaggtaatgaaagatctagggaagtttagcagggagaagaagagagatgatagttgtcttcaaatgtttgaaggactgttacggacacaaaaatttaaacttgtgctgaataattccaagaggtacacagtctctcgatagaagctaaagtggggggtgacatttgactcaacaaaaagccatctaaatatcagaactttcaaaagcaggaactggtgcctcaattaatagtgtgttttctagcacttatgatacctgatcataggcaagataatgaaaaattgggacctgggagttatacatgggaatttgtttatcagttgggtgattaggagaggtggccttaaagtcctgttgtgttctaagagtctgtgattctgagtcttatttcccaacaagagaggtacagagcagaagatgggattgggagaaataggataaagataccaggaaatcctaaaggtaagaaaaggaaggcagacctgaagctaactctatacttcaggtgcttgcctagagccagccctacctacttagagaatgttgaagagccagttaaaacatctttaacacggatgtaaaacaaaactatcaaaacctgaagatttcgaatgttctaacctactcgtcagttgggcttttttcacaaatacttcagtaaataggcataaatttattttttaatgatagaaaatatctcttaaagaacttataactgtggataaaagcaccaccataaaaatcttgtggtgaaatatatatatatatatatatatatatatatatataaaattttaaatatggttagctagaatatgacgacaatgtttatgaaacacagagactcttgacaagtcccatgtatacactataaaactttaagttatccactattcactcactaagcttatacttaatgagtgtctgctgtgtcacttattgcggaaggcacaggcggtatagcattgcacaaaacatatgtggtctctgatggagtttttcagtctagtggtgaaagcagtgaatgggtgtacagatgttaaataattgtacaattagttgcatgtgtaaacgtcaaagttcagaagatgacaattgatctacggcaatgtttctcaatctctgacgttttgagccaaatacatctttgttgtggtggactgccctgtccactataggatgtttggcatcacaactgacctctgcccattagatgccaatagtactctcttctttaatcacaaatttgtcccagacatttccaaatgtcccttggggagcaaaatcatccctagttgaaaatcactggtctagggggaggtctttatgaggaagtaacatctaagaaagctggtatgtttacatatagctacagtctattacacatgtatacatatgtaacaagcctgcatgttgtgcacatgtaccctagaacttaaagtataataaaaaaaatgtaacaaaacaatacagtatgataagtgctatgggaccaaagatgaaagggttctactgcacagttatgaactcatagttaggcttttggggtcaaaattttgctgaagatatttgccacccacgtgacctttggcaggtgacttagcttattcatgcctcagttttatccaatgtgaaatggggctggaaagtcccatgtacttcctaataactttgcggaaataatatgtggttatataggaaaaaaaaaaaaatcctagaagtatgcctgctgcgtagtaaaaggaaggagaaggataaagagaaatctgcattttttcttctgtaatggggcagatagtaaatattttaagttttgtggcccaaatagtctctgtcacatttacttgattctgcagttgtggcattggaagcagctatggacaatacttaaattagtaggtgtgcctgtgctttcaataaaattttataaatacaaagtttgcaaaacaaagttgttttttttttttttgtagtttgctgacaccctagtaaagaagcaccattgtcaacgttaaaaattatcaaatttttatttttcaaagttttcaaatttgctttgcttggtctagctcatgaaataagtcaaaagtagcaagacctccacctctaaaataataatagtaatgataacctcaaaaggaaagaagaaatatttttaaagaagaaaaattattgttaaataggattattgtgcagagaaaacctaggagactcaattttaaaatctgtgaaataattttaaaaatactttatgaatagatacataatagcttttattcatattaatgactataaatgcaaatggaaatatttcattcacactgatgacaatgtataaattaaggaggaataaaaattgtagaccctataggtgaaaagcataaaaatatacataagaaaaagcaaaaattgactacgtaggattgttttaggatttaagatttattgtcattaaacttgcaataccagccaagttaacatttgaatttaatacagttataatcagaatgcttttgatgtgtttgggggcaatataatttcaaaggaaataggcaatgatgtaatttaaagtttatatagaaggaaattgtgtgcgtgtatgtgtgtgtataaattggaaacaattttattaataagcatattatggcagcaacatacacttccagatttctactatactttgaagtaattgtgatcaaaaccacagtgtgctggcataaggctagagaaatgggttagtggtttacaagtgagagtccaggaaaacatccaaataagattggatattttagttctgtgtggatagcctatttcacttaataaatagtgtctcgtaattgactattcatgtacctataagtttaactatagaccaaaaaaacgccctactagattaaggagctaactagaaatataaattcatataaacaataaaggaaagtgtaggactttataagcttcatgggagacagatttttggtaagtcaggaagcctggaagacttaaaacataaaattggcagactgaattaactgatagtttaaagcttccatagagcaaaataaatcataaaccaagttttaaaatatataatggatttagagaaggtatttacaaaaatatatgactaatggaggttaataataacaatatgtaagaaggatatgaaatggcattttactataaaggtcaaacaaatgacctataagcataataaatcatattaatctccactagtaataactacacacatctacataatatagatgttacgcctgcatttgatttactttatctgtcttttggcagaactatttgtcaccagataaaaaattctatatcattaccagaaaggtatattattataatgtttattatgttgcagttgtaaaagaaataacagcttttcaattgtttacaaatcctatagaacatttactgaaatacatttacattttgtggcaaacttggatttaaataccgtgttcgtgctttgttttatgccgttttcccatcttttctccaggaatttgattgtgcttcattgaaagctaaaaagaaaaaaaaaataattctggttttggtttaaaaaattaggttaggggttaaaaagttgtacgttgtcttctgtaaaaataaaaaacaagttttctttgtttcttggaggctttatattaaatggatttttaattcatagacagcatattgtgatgaaatttccccatgagcttcacattttgtttcaatagcagaaactaacttggttgcagttactgcccttctgagaacagtgttctggaataattttgacatacatatgtatctctttttaaaacatgtgttaatcttttcataaagaaagttttcccagctgtgtcacctgtgactccaactttctggggggacagggatatgagatgttggaagggaatggcttgaagaaataaagtgcaaaagacgtaatgctttcctgtggtagaaatgtattcagtgaccctgaatgaccttcctactcttgtcccttcatttttcccacaagtatggtctgggcaattataaaaattgacatttgcagtgggctcttctgtaaaagatgctcaatcagaaatgatttattttagaaaaagagatgatataaacatatatatcccctgtctcggaagtgtgaaggttgaaaagcaaggagatgatcttcaaagtgtctaaaatattgatttgtaacatcgttttatgaaagtgcttcagattattttttttcttggatggccccttatgctttggtcagttgatgctaaaatctgaacttctttattttaaaaaaaacttttaattttgaaaaaggaagttcacggtgctgtctaattctttttagatagtcattaatgtaaatgtaagagtcattctgagaaccacatctgctgatatgttccgttaaattacaagttctatgtgtatttgctttgctttcatacaatgaatcttctttactctcttccccacctgccagaaattgccccactcaacgttcataaaaggtccattttcaatcgctatatttatttcagaagcagagatatcatatattcaaattttagttactttccaatatcaagctaataactcacacaaataaatcaaactacagcaaaacagcaatctagcattcaacaaaacctccccaatgcacatatttcaagctgtagatatgtatcatccaccatgctgaaataatgtacatgttcaaatcaaatggaaaactagaatcaaaattgttgattacttcttatcagggcattttattatatttaagaaaaatacaaattaaatcattttcaggaagcaatccttctggctaagatttttttagcataatgcttaaagttaattgttgatctttatctataaattcaaaggtggactaaaaatgcagaatcaatcaggtagtccattttgcatcaggtgaaatatataaagcataaaacagcgagttacatttcctaacaaaattgaattacagtgagtaaaagtgacaggacaaatgcattaagaaaagatggactgaaatggatagagtagaatatatgcatctataaaacacagtcatatataatacactcattttttttcttacgagtgtgagattaatggaagaaaacaacaataataacaaaaccagtgtgatgtgtcagatttcaccttttaattaaaaaattattcacttcagaggggaattttctttcttgggttagctcaatcatgtcagatcttgttcatttaaaaggtcagtttacttgccttctgaggtttttgtttgggaaaaagaaaagaaaatagattttcattggtatcctgggtagaattaattgtttatcattcatttttaagatctccgagaggcagaaaaaggggaactgtgcaacccttttgtccttctggatctcaaaatgaagggatacattctgctacatgaaatgtggaattaagaccatgatgcaacatgataaacaacacaaatttgggggtgtctctgtgctatacattattgaatttttccatgctatacactttttggatgtgtctgtgctatttattcagtttttttaaataaaagtttttgtagactaaattgccctctctactttgcatcgtttttgaacaaaggattttcaagactgataagctcaaatgtatcatttattgtattcaagtagcattcaatttttctttagaagtataatttgtagatattttaacacagaaaacttgcaacactgctcatgataggcacttattatatattttttgaaagactatatggataatgattctaactttgacttttcctgttttgccttcactttagaattaagcagagaatcaaatccatattcctgggggcgatgcttggacaacagtatctctttaaagatctttgtgtgagtcgaaggtgcagccagactgggagttattgtgaagaaacagattcaggaaggttgagaaacttgcctaaggctaatcagatagttactggcaatgttgtttctaaatcactgtttggctccctcattcaatgaatctacactatgtgggactgcctcttgctcctgacatcttttgctgctgaaataaatgaactcaaagcctagaaggtagaaaagagggagttcagaattatattcaggcacaaataccaataaggctattgcccccagaactgcaacttctcttggtttaacagataactatttagctgtgaggtacaactgaggaagtggacacacaagttatcaggagattctgatgtgccagtttatatttcttgtcacaggtaatgattcgaaatttcttaaaacagctgtcctcacagtggagtaacctgggagtacatgaaggcattccaaggagtaggcacagatagttttaagggaatttatttctagatcttctactttattttgtactcttcctgaaaactgaattgcctgaaaaaaaaaaaaaaaaaaaaaagacatctgtagtcaagacctcaggctgtttctcctttctaaccacttgccttttctaaccacttctcccaatttaagaaaaaaagccttatatttcatccaactctgatcttactaaggcttcaaacaaaagaagcatgaatgactttcatgacagggcaacatagctttttgcaagaagagtggttgctaactctttgctttcaactgaacccgaagagaagacctgataagttgtcagccgatagatcattaaaaatacgttttggtaagcaatcatcatgtacttttagcatatgccatagcaggagcacaaatgattaagcaatgctactataatacaattccttccgtttctttctactcacctatttgaataagatttttcatcatttacatctatacagacaaaaattagggatagaattgatgctgaagcctttccaattgtagaattaatttatattcttctgaaggtgtataaattgttaaatacccatccatcttattaagagatgtattttcaataaaattttatttttatgtttatcaaattttataatatacatatattgttttggtcaattgcacgttaataattgtaacaatacctcaattgaaaaggtttgttttttacatttaggacttacagtaacagaaaaaaaacactcattgtgtatacatactgtttaagaaaagtatactaggtgatcaataagattttttcaggcataaacatatatcttagttttaagatatcgatatttacaatgtccctcaaattatattattttcagtcatttaagaatgaaaagtacatttcgaatgcggattttaaatctgcaagggttgactcatttttcaagagtctttttaggggatacagaagcaagaatgtttggagttccctgatcagtatctttaagagaaggtatttgttggtagttcctagcaaattccaacagcctgatgctacttaaaagataatagtaattattttaaataatgcttctgataaaaaacattcatgcacactcagtttaaaaagatatttaaacatttgtagttgtagtttgggaactcatgatacaagtacagtctgtaaatgaagctcttagtttgcaaatatcagagataagctattaaaatgcagaaattgaaattgccctgatatatgcataaattagtgtcatctccatcttgtcagttagagtattttttagattctctctatgtatacatacatatatatatatatatatttatatatatatatatatttgtgtagctgtgcatgtgtgtatttggactaatgggtcaaaggacagtactaacccaattcaataattaaagaaaacataattttgagaattagctttatggtaattgtttgacttaaatgagtagatcagagaagaataagggctttcccttatttaaacaagcttcatttttttatccaaacatttacttagctgattaagcttcacttgtttattttcttcaaagcattcattcaggtgggtactgagtaaactgaaatatcacaccagggaacttcaacaccatccaagtcttaaaggcttcacttgttcacagttggcatttagtgaatgtctaggctactgataatattgtgagtaagttggcagggatcataagaaatgataaaatacagttcttgaaaatgttatggtttgaggaaaagatctatgtttggaattagactgacttggattcaaactctggctgtacctttgggacaaggtgttcagaaactctagcctatgttttttttctgcaaaatgatcctcttttccaggattcctgtagagattcaaagatatgtgaatgtttagaaaaagaatagacttttgatcattgttaattcccttactttccccaattagacttgtaagactgggaagaaagctacacaaaagattgaacaaattatagctgacagaccatagcaaaagatacagggcaaaacttaaaggggaaaactacacattaaattattttaaaccattaaatagcactaacttttgtcagatattacaaccaaacaccactcaaattaaagtaaactgaataaaatgcctgtttttttctgtttactgatgttttcatttgcttcattcatttattggaagatataaaatgtgttagacactgttaggtgctgagtgtataaaaaaatcttattaatacaatttaaacacgcacacacatatatatggttataacaattgatgccatgtatgtactgtttatatgcctatacattattccacagacctggggggagggggatgtagagtcttaccagaaccataggaatcttctcacatcaacatttccttttgaagtttgttcatgaggcaccatccagataatactaccatctgcaatgtggcttgagaagatgttagatttttttattacacataataaggctgtaaagtatttctgtatttaggtagaggtatgtaatacaatatgtatataaaattacatatccaataaaatctggtgttaaataaggactagcttctatgataatatagtctaaaggcttttcatttggtgttatagaaattatgtgaaatatgtttcctggagtagaattattcgcatttcagctctctgacagtggaagaaaagctagagggagaggtgaacaagagagggagcataatggacaaagctttgctggaagccaaaccaccacttcatatgtcaaatctgacaggcctcccattttaggtgtgctgtcattgaagctttcagctgcaccttgcctgtggctaggctattttcaaagattaaaatgcgaaactggaaattaaatgcaacttaattcccaatttaaatttccattatttttgaaaagtaaaagattaaaagaaatgtataattgcaattctggtggaagaggtaattataggaaaggtgggatgtatttcaagtgggggatatagcttactgcagcagagaggaatctaagctatcattcttttgaaattggtctggaaatatgttttcacatggaaaatatactatatttttaggaatttccttgtcatattactgtatccttttctgttagaatataaattctgaattccctattccactgtagatctgcctccgattatattagctcttctgaagttatcaaaaaataatgagatatacaatattccatatatgtcaaagcaattatttttaggttaagtaataaaccaatgacctttaacccggtaatattctgggttgttcataaaaaaactatattcaggtaataatgtctttccacttaagcaactgaaaaaatacacaatacttaacatttggttaattaaatacctactccagacaaaaggattttctgttttcaagttatcttagcaagctgagcaggaagcaatgatatatccaatcagaatatccatggaagctctgctacagtttcaaaaagttctcatcaggcagcttttaaaatgcctactctgaaaatggtccaggttaaagaacaacagcttcctcgtcagatagcagtattgcttggccatgtttcttcctagcacaaaaaagtacctgctcttctctgagtacctacattctaaggactatggcttacataaaacagcatgggttggggcaatttccagcacactgctcactctcgaaaacgtatgatgcaggtgagagtaatgtttttgtttgaatctgctttcactcgtggaagatgaaactacttgcaaagatctgtactttagctattatgagtaacaaaagactcctaaaatattgcacacattgtggggatggagaaccatcatcctgggatttgatggatcctatggtttggctttgtgtccccacccaaatctcattttgaattgtaatccccacaatccccacatgtcaagggagagagaccaggtggaggtaactgaatcatgggagcaatttctcccatgctgttctcctgatagtgagtgagttctcacaagatctgattgttttataaggggctcttcctgcttcactgggcacttcttcctgccacctgtgaagaaggtggcttgctccttctcaccttatgccacgatggtaagtttcctgaggcctccccagccatgctgaactgtgtgtcaattaaacctctttcttttataaattacccagtctcaggcagttctttatagcagtatgaaaatggactaatagagacgtgtctctcagaagtcacagtgatgcttgaacggatccagagctccttcttcaggaaggtcccaactcattctgaagggtctctccaagcccacctctctctgtaaatgggaaaggttttactttgagcactaaaacctgccagaattctcaattttcctaacagtgtgttaataaacacctactcatttagtatccaaaccaggtctgtatttctcaattagagctcaccaggctttcatcataaagtagagcttcaaattgtctgcaatcccactcctatcaaaaacctagaaggaggtaatatttcagagtaatactataaccagatgaccacatctaagaaactgctgaccctacgatgtaaccttctgtccatttttccctttggaaagtctaggatcttttcttataccagcaagttacaagcctggactacactaacttgctttccgcagaagaaaacaccatgagttctgttttcatattaagcacttagtctccatcagacatcaatcgagaaaaaatcattaaaaatcacattttatatttgatgtatatttctcaataatcctatgtattagttcattttcctactgctatgaagaaatacccaagactgggtaatttataagtaaaaagaggcttaatggactcacagtctcacatgactagggaggcctcacaatcatggtggaaggtgaaggggtagcaaaggcatggcttacatggtggcaggcaagagcgtgtgcaggaaaattgccctttataaaaccatcagatctcctgagacttattcactgccataaggacagcacaagtatttagctccctcagcacagaaccatccccgtgattcaattacctcccaccaggtcactcccatgacacatggggattatgggagctacaattcaagatgagatttggatggggacacagccaaaccatatcatcctatttggatgatcaatattatcaaggtatgctcccctgagggggcgtcctttttaccatttaactccaggacaaaagtttatttctttgtaaggacagtgtttatttcttatggtcctattttctcctaagatccagacaccaaaatggccatctatcattgacttaactcctgaattttgcttagagtaacagatttagtgaatctaaatattttctggctgtggaatgttaatttatacatgttcaagttacctttgattcatgtgacagtttgtgccaaaacacactcattatcagaactcagatcattatgttggctcttgttttcgttactaaaggaagaaaaacagtttctcaaaaagaaaattctgatacctaggaagaccattatacctcactcttttctttatctcatcaccacatccaatattataaaagaacttacaaagtaaaaagaaaggtgttctgtagatgtagcgcctggcttgtatggtagcttaaatgaacacagctaaaaatattttatggctagtgtccaaaacagtctggcaccagacaaaataagaatatttaaaattatattttagagttactttaagaggaagggagagagagatgtaggcaggaggaggaggagcaggaggagagggagagagagagagagagagagagagagagagagagagagagaatctggggtttctatggaagggctaagaatatgtagaaaacagtttacaaagaaatatggtccaagaatcgtgtgtacacacacacacacacacacacacacacacacaccccctggaatatttttcagccttaaaaagaagaagatctgtcatttgtcccaacatggatggacctggaggaccttatgctaaatgaaataagccagaccaagaaagaaaaatattgtatgatctcacttatatatggaatctttttttaaaaaaggtcaaatatatacagatagtgaattaaacagtggttaccagggtcagggtagttgtgaggaaatggggcaatgtaggtcataggatacaaatgattaaaatatattaatatattaaaagatataatatacatcatgaggactacagttaataatagtgtgtattcaagatttttgataaatgaatagattatagctgttcttgccacagagtgaaaaatgggtaactgtgaaatgatagatatgataatgttctccacaatggtaactattttacactatatatataaatatctatgcatcttacaccattatgtggtatcccttaaatatatacaataaaatttattttacaaacacatattaggaatgcatattctgatttttaacaatagttaacctcattaatatatttcacactatcatttctagtgtacatgaaaagtagtttattgacattagttgtaaaaaaaaaaaaaatggtcttgagacttttgggtcagagaatgttctggccataaggtaggtttctgcttgcctactagatatcttaacttcgatttcctgaacatcccatcacttcagaatctctcaatcctttctaacatccgcaacattgtttttctttctgcatttcttatattgactgatggatttataattcactttctctgaaaaaccctgcagttatcatatatccctatccattctggctctttattgcccaaatctctaccaaaatcctgtcagcacagcctctgaaatatttctcaaagcatttataatctggctctcatcaacattttcaacactctgttttatcattccactattttacatcatttcattttcatttttaccacaatcactcatccaacaaataagtatttagctccctcagtaattagtattattattattaattataactagatgctgagcatacagaagtgaacatgacagacataatcccagcagggatgtcagactttatgcaagtaatcaaccatgatgaatctcatgagattctgagagagagagagagagattgagagagagagagaaaggggaaccactggtgtccgagttagaaatttgaattagtatctgggtcaccaaaagcttctgtgaagaagtgatatagacttggccacacaaaactaccgtgaaggtggtggaaatttttctatgcagagtaccacatttaaagagctaagcctgagagtgtcagagataaaggaacagaaagaatgtgacagcagattatgtttggaagaaagatgttcaagagaccaagctaaagaggagatggggctagaacctggagggtccttcgggtcctgttgggagttttttctctgcccagaagggctttgtcacgtggttgtcaggaaagagtcatgattagagctttgattcagagacttctttcgctgaagtgtggagaatggttcagagagaagcaaatctgaatggacaaaagaggttattattgtaatcttggcaagaagcgatggtggtcttgactaaaatagttctagtgagaatgtgacaacaaacctgagaaaaatacaggagacgtaattgacgggggttagtgttaagttgaacgattgcagagttgaatttgaggaaagtgtcatatatcattcccagtttctgatgtcatacacctctggagataacactgccatttcttttgaaatgggaaaataataagtgatcagtaagtacgtattggataaaataatgaatggttaaatgcataaggggagaggaaaagagttgcagagaaagagagtaaacgtattttggatgtgttaattttgagatacctttgaaaaatccaagtgaggggttgggtagtcagagaaatgaatgtggatgtcaggacgaaaggtgaccgtgatgaactgtatgtcttcctctaagcacgttatacagcttcatgtcacaagtgactcacttcatgtcacaagtgactcacaaggtcacttgtgacaagcatttgcctggtgcttcatccctaacctccctttctatactcagctaaaatgtcacctacaatacttcttccttgactccaccgtccccactttactgatatgaatacattttaataaaatgatataataatgcttagtttgtaaacctaatgttcctcaagtggtataattatctgatttgtatgtgatcatcaacccaaccatattaggagcaccttgaaggtagaagatttaggttcatgcttaacaccacatctggaccactgtggatttaactttctacaatgattgtattcattaatatattgggtgcccactatattccaagtaatatcctgcacactacgtacaaggaagcataggtcccgtgtgctcatgaaactgtaattttagtaagcagggataggatacaaactgagaaaggaaaacaatttagaaagtgggaaatattatgcacagaattaataaaaaagagaaaaatcttgaaaaagtcttcaatacctcacttggaaggtgattttgaagaagaactgatggacaaactagagtcagccatgtaatgatgtaggggcaaagcattccgggcacaagggacagcttatgcaaagaccttaaaaatgaactagctttgtatgttggagaaggataaagagaactaaggtatctataaggtaattaggaagaggatgagttatttagtcccttagtctttgaagcacattatctcatacttcaattgagtttattcttagtgtcattcttctggatgcaatatttgagataaatgtcttaatgaacgttcacctccctccgtagtaatgcctgagtgtcacaaaaactttttttgtttacatacgtagccatctaatggaaacataaaataggaatcaaaagttgagtttcatgtacaaaaggtaaggactgtacatgtggtcataacaacttcaaaagcacctgaaggtaacctttaaggaagatacaaaggctaggaaatatctaggatccatgaagacagacttacttaaggtcatagtgtgtccagagttggttcccgccggtgggttcgtggtctcgctgacttcaagaacgaagccacggacctctgcggtgactgttacagctcttaaaggtggcacgaacccaaacagcgagcagcagcaagatttattgtgaagagcaaaagaacaaagcttccacaacgtggaaggggacccaagcaggttgccgctgctggcttgggtggccagcttttattcccttactgtcccctcccatgttccatttctgtcctatcagagtgcccttttttcaatcctccccacgattggctacttttagaatcctactgattggtgcattttacagagcgctgattggtgcgttttacaatcctcttgtaagacgggaaggttcctgattggtgcgttttacaatcctcttgtaagacagaaaagttccccaagtccccactcgacccagaaagtccagctggcctcacctctcaatagcattaagaatatagtttcacgagcatatatgaatcaaaacttacatttgccaattttatttgcttgtttatgtgtttccaacatgtcttgtcttagggccaaatgtttccctagagaataactattccaactatcttagttgctgtatttttatgcaaccttcaactctccatactaaaatgtctccagaatagaaaataaatcttttcaaagtttcaaaagaggctctctatatattccccttaaaagtaccaggcagacatatttctaggtttctaacattgcgtgttgccaggaagtatatccaaaccatcacaagttattcatgtaaccaagcacacttattggagtgcttctgcttctgttcttgcttgaaattggaagctccttccaggaaaaaaaaaaaatatctatagaaggggaaaaaagtaattttactttgaaaataaaatatacgtgagcaatagttttattctgtttttaatttaccatagcttccaaagacaacattgttttatagtaggggttagcaagtgttttctgtaatgtaaacgtaaagggccagagagtaaatattttaggctttgttttctatactctgttgcaactattcaactctgctgttagaatgttgaagcagtcatagacaatagagaaatgaagatgtgtcattgtgatccaataaaactttatttacaaaaatggcaatgggctagttacggcttgagggctgcagtttgcagactctcacttcagagctaacagttgttgtcaggagtcacttgtttttggaaacctacaatgaggtactataacaccaaaaagagttatcccttcctttttctctctcactttttgaattatgagaagaattagaaatgtagttaatgataatgtccaaccagtgtaattatacttgttagaaacacagctggaagcctgttgtccagtcttatttctcctctgtgatcctcattttcagaggttgaagtcataagtttgccatgtctactttctgacaggggaattataataatgtggagtcaccttttgtttgtgactttgacaatgcttcattgacttactcaccaattttctaatttttatgaagactttttgccgaaatgtagactcagtcttctctcttgtctactctttctataacaattaacaatgaacttatttacctttttaacatctttttaaaaattttctatacaccttgaaaatgtgaatacaaagtaatgctgcatcatgtatattgccttattcacacatagcctcttatggtatatcatataaaaatggaacaatacagcaacaggttgaatgaacagtaatcaggtaacaggaaaatgagatgtctttaatatttcacttaaaaactcaatttcctaaagcatacatataaatatttggaagtatagttagaagaaaaatatctttaaaatattttaattgattagtcttatttataagataatttttaggaggctggttgcggtggctcacacctgtaatcccagcactttgggaggccgaggtgggcagatcatgaggtcaggaaatcgagaccatcctggctaacacggtgaaactccgtctctactaaaaatacaaaaattagccgtgcatggcagcgcatgcctgtaatcccagctactcgggaggctgaggcaggagaatcacttgaacctgggaggcggaggttgcagtgagccgagatcgcgccactgcactccagcctggtgacagagctagactccgtctcaataataatcataatcataataataatttttaggaagcatcagaaatatataagaaaaagattattttcttaattgctttactaaaaacacctctatgatttttcagtaaaacttgattcttatgtcatgtgtgagtgtgatctgcctctcttgggatactactgtactcatgaggagtgatttttttctccaacgacctctttgtcacgtcaacaggtcacaggaatagtgtaccctaaaaagccacctgccacatgctgctgaaaatgtaaaagtacacacatacacacacacacacacacacacacacacacacacacacaccaaaatcaggtatcacaagctgaaaataaaattgagtccaatttttttttaattgagcagttaatgtccttaaaacaaaatcctatactgcaacaaatacttagccagatcattctgatacctccaaactgtggtgtattccaagatacctctatgatctttgatttgatccacagcttttcagttatcatgcaaataccttcaagttttatctcatttctcagtgcaaactcattaaaaattttcagctgaattcaattttataaacatgttgtgaatgtcctctttatataagcaaggttgtaaggaactggccacataaacagaaaattgaataacatatggtttctggccttagtgatctcatgtgtgagttaggcatatgggcaaaatcagaacactatagagtataagtctaaaatggtagtattttataatagaggatgaagagggtgctgtgggatcataggtgacagatataactcccgttgtgggacttgagaaaggcttcacagtctggaaacatttagttgctattgaacacaaaataagactcactgttgagagaagggagagggagggcatttcaatcaaattaagattctgtggcatattcggaaactgatgtttttaaaaagagtaatgtttattacattcctctacataaattatatttctatgtaatatgaatgacaaatatttaacacaaaatgccttataacatttgaatgaaatccatcatatgacctgttatctatttccatttcctttttgctcatatcattatgaacaatgacctgataaattttttataagactttgctgaattagtaaaggattattaagtttagaatgaacaaagctgaccaatcattcaggcaaatttgaccgttttgttgtcgcttttcttatttctgaaaccatacaattccctgaaatgaataagtacatatttgataacttcctaaattaaggctcaaaacactggtaatctactgggctttcatttgttccttctatttgtctaatcctatctatatttctttatatgagctatgaaaatattagatttattaagttgtcctttatcttaatagagaagaatgtttttctatgacattaagaggaatttgatttttttctttaatgatctacttttaattttggtagagtagcattgataagatcaatattacacattgttaagtatgcattacatgttgataagataaatattacacttaaaatatgtttatcaaatgtatgaatgataaaaacgaattctgaaatgtatgggaaagatcttgaataaaggtctatgtacatttcaaggatgtctacatatgcaaattatcataatataataactattgaatatgattatcttcacatactttctttatttttcatctcttagatgaaattgggtattgttttcttatagctggaacaaagcattacagagaattcttagtgtgatttcattgaaactcactgttatatgagttcaacaaagtttaaattagtccatgacttaatcatcctttataaatcctatcactagtattcggtaaggacaaagtcaattaaaaaattagcaacagaagcattaaaagaaggattaataaatacaaaataagggatgtgatatctttacgtattgctgagatgttagtgctaaggaaaaacttccctgttcataatgtgaggtgggaaaaagaagaactattattgtatatttctcctctctaaaactgcctatctgactgtgtttttctgtgtcagccgtattaacagatgtttaattttactcactttagtatataaggcatcataatgtatgaactatttcaaaggccctatgatggctaattaaataaaaatatattaaatattagctggacaaaataaaatatgtattaattttggaaaaagtagatcaaggttttgcagatcttttcatatcaatatattcatttgctgaataagcttttattgtttaccaatattactagttttatagagatgtagatatcaccacagtatgactaattttatagggacacagatagatagatgttattttattccaatcttatttttacatataacaggtataaatatgcgcttgaaaggagtatatcacttaggagtcagtcagaaaagtaaagatcttctagtctaatacagtggttctcagccaggggtgattctgctgcacgctgagggataaattggcaatttctggagacatttttggttgtgacaattgcaggagtgttactggtattcatttggtagagacagagatattggtagacactgtacaggacacaggaaagtctcttacaacaaagaattattctgtccaaaatgtcagttgtggtgaggttgggaaacactggtctggaagaaggaatttactatgaggaactagttacgaaagtatagagacatttaacaagctgaacaaaggatagtgagatggctcagagattagcaactgtggcatgaagccactactacgtttaggtaaaaataagctaccatttattcttatagtaataataataataattattattattattatttgagatggagtttcgctctgttgcccgggttggagtacaatggtacaatctcgactcacttcaacctctgcctcccagattcaagcgattctcctgcctcagcctcctgaatagctgggattacaggtgtgcaccacccctcccagttaattttttgtatttttggtagaaacggggtttcaccatgttggtcaggctggtctcgaactcctgacctcagatgatccatccacctcagcctcccaaagtgctgggattacaggcatgagccaccacacctggcccactctttcttttttaattattgagaaatataaaaatatgtcaaaagtaacaggtgtggtggagttacagcatgcacataatgggatacagcccattatctaatctcagatggaaactagaaaaaaaagagaagatctttgctaaagcacagattatgtggaaaatcatttagaaaaatagcttatcacaacattaaaattaaatcctttagctgatcatttttccttgctattttttcttttaaaattgagaagacagtgagttttttttctttattgtcattatcttgatgtcaaaaaataatatgcacattataagtgggaaaaaagataagtcgaaatgaaatgaaacaatgcgaggaaaaaaatgtcacaacactcttcaattagaaaaaatgacccccatctttcctccaaatagaaatgacgtaactgaagtagtggaactttctcttccatggcaactctagagaaggggtagatggcatgggattgtggacagatggacacagaaagaggcctcatttattgttattgttaaaacttttacttctagtaatagtgacacctccttcagcatttctttatcaattgtcaatattttttggatcaccagcatcaccttctatatgtatgtctagaaacctcctgttatgaatttacacttctcagagtcaagacagaaatgctgtgaattgggcgataaataaaataccccccttttattgccttgctttgtctcttaaagaaagatgcctgttgggggactatgagaatgctttgtgcttctggacctcaagggacaaatctataataaaaattatgcatagtgatgagaaatatatataatgcaagtttgtagagatcagttaacttatcttgtctaggcaattatttctaaacaatgatttcaaatcattaactataatatagcccattcataccctccatttttgtcaaatccctgtcaccttcaaggacttggccatcccataggctgctctgcttttaatagaggaagatgctgtaactcttggtaccattgccagttatgaatttatccattaatgaacattgcatttaaggcataggtttatctccttctccaggtatgaacctgcaggattcctacctgaagcttaagggagaataaatccacctgggacaatcaaggacagatcaaccaatcagctcaaagcaggtgtgaattacacagtttatttgagtgacaaggtagctaaagcagggataataaaagaagggagtgggttgatgtggacagacgaactatggctttaggaaatttggtagggactgaaacatattttgtgtaatttatgtgggtctaatagcttttgaaacttgtttacaagacctgtgtaagtggtactggcatattcatgcatgagaaaacatcaagggaaaacttaatagttcaaggaggtgacaaagaagagaggaaccaattattttcactagccgtcaaaagcaagaaaataatcagcttgagcccttcggggaaaagataggttaaatattaagtaacagtttgttattattccaagtgttttcttaaagttgctcccatactttcctgttttctctgagggaatttagtttttttgttggtttttttttttttttttttataactgtcattggtcagagcttgatttgatgccagtcaaatttttttaaagagattatgaaaactgcttaaactcttccaaagggaagatgggtcattcttaacatgtgtttcaagaggaagagcataagagcattatatggtaaggctgaaagcagatatcagcgtttaggggccatgaagaggtagagctcacattggtaggatcattgactagaattccagagatcaaaattgtatgttagtctagcattggggaggacttgtagctagtatcttcattctagcttgggagcctaggaatcaggttaggcatcttgcacaggaatgggccgatgggctaaaatctccttgagagagatgattaatccaggacaaaccaagcagtcatgccaatgaattactttaacagggtacttcatatcctcatcctttgggcagcacggtcttcagagatggggcaggccccaggctgcagttgagattctataaactaaggtcaaaaagatgcagcagtgaagaagtcatgcttatcttgtataaatcatgttttcttttctttttaatgaaaatgtacatttaacacattttaaaactaaatattgaccctaaaattccaaccaaaaaatgctacataagtggtatttatttttgaatttccctcatgctcctcccactgtggggacaaggagtggtggtggaagagagatcttttagcaaacctgtgagtagagaattagaaggtaatgggaggaaggtaaaaggaaaacatcatagatggataggctcacaaacattaaaggccttcgtgcctgtccttcatgcctattcatccctctccagtatgtgaatcaatgtacttgttaaatattcattcacctcacatatttagcattaaccgtgtatcagggacgttgttagaccgttggtttacgatgatgtgtaaaatatcatttgtaactcagactaactggaagtgctcaatataataagatgtaatgttatggaacactaagtctgtgctgaagacttatctcctttaatcctaaaacaatcctggtgggtagtctcaatgatcatctccaagtcacagttgaggaaattaaggcttcaagaagttaagaaactggaccaacatcacaaaggtagcatcagagtgacagtttgatttcaaagtgtacttgacttcaaggcccacatttccttgcacgtttaatattgcctttctcaggtaaatataccattaaatgtgatacaactctaagcatttgaattacttacaacgtgcagagttaaaaccagcattatttacactatacttcagctcgtttataagtgaactattattttgtggactaacctatgaaatgtaaccacattgaattcctctgttaggtacaggtttggtgattccagggaatagagtatgactgaatgcacaggtaggggtgaagtgaacccggtcagaaaatttagagagcatcgagcagatcattaagcagctgtctttcaaatgtgcagaacacaactcatttgtaatctagggactatctgtattgattcttcccagggaagttacttatttttatacatatgtggtgtgttctgtccataataccattctacatggtaatgctcaactttattatttaaaaaaactgctaataatgaggtttttctttgtatcacagaagcagcaggagcaagttttctttttccttcccagtttttttaagtactgccaaggaatgtgattttgtcagacttgtatttcctattaagccaatctgcatgactgttccttctactagctttacctgttcactcatttattaattcatcaaatatttgtagagtgactattgtgtgccacatactaatataggcacaaggataaccaaaaacagacaaacgctgtcctttcaaggagctcatatagtaatgggaagttaggaaaggagaaaataaatatgtggtatttcaaatggaagtattaaagtgttaagaagaaaagagaaactaacaagatagggaaaaagtgacaggaacatgatgttttattttttatttatatatattttttgagacagggtctcattctgttgcctaagctggtgtgcagtgacgtgatcatggctcactgcagccttgacctccctgggctcagatgatcctcccacatcagcctcccaagtagccaggtctacaggcatgtaccacgatacccagctaacacgttttcttttcttatagagacagagtctcactgtgttgcccaggctgttcttgaactccggggctcaagcagtccacccacatctacctcctaaggtgctggaattacaggcatgaaccaccatgcccagccgaaattgatgttttatatatggcagtctgggcagacctctttgatgtgatatttgaacagaaatctcaagagagggagtgtattagcccgttttcataccgctagaaagaactgcccgagattgggtaatttataaaggaaagaggtttaattgactcacagttcaatatggctggggaggcctcaggaaacttaaaatcatggcagaaaatgaaggggaagcgaggcaccttcttcacaaggtggcaggaaggagaagtactgaggaaagggggaagagacccttataaaaccatcagattttgggagaattcactcactatcatgagaacagcatgggggaagccaaccccatgattcaattacctccacatagcctctcctttgacacctggggattatggggattataaggattacaattcaagatgagatttgggtggggacacaaagcccaaacatatcattttgctcctggcccctcccaaatctcatgtccctttcacatttcaaaaccaatcatgccttgacaacagtactccaaagtattaattcatttcagcattaacccaaaagtccaagtccaaagtctcatctgagacaaggcaagtctgttctgcctgtgagcctgtaaaatcaaaagcaagttagttacttcctagataaaatggaagcacaggcactgggtaaatatacccattacaaatgggagaaattagccaaaatgaaggggctacaggccccaagccagtccaaaatctatcagggcagtcaaatcttacagctctgaagttgtctcctttgactccatttctcacatccaggtaacactgatgcaagaggtgggttcccatggtcttggtaagctccacccctgtgggtttgcagggtagagcccctctcctggctgcttttacaggctggcattgagtgtctgcagcttttccaggcacgtggtgcaagctgttgatcgctctaccattgtggggtctggtggacagtggccctcttctcatagctccgctaggcagtgccccagtggggactctgtgttggggctccaaccccacatttcccttccacactgtcctagccgaggttctccatgaggtcttcattcctgcagcagacttctgcctggacatccaggagtttccatacatcctctgaaatctaggcagaggttcccaaacttcaattcttgaattctgtgtatccacagactcaacaccacgtggcagttgccaaagcttgggacttgctccctctgaagcaatggtccgaactgtaccttggccccttttatccatggctggagtggctgggacacaaggcaccaagtcctgatgccgcacacagtggtggggttgggggggggacctggtccacgaaaccatttttgcctcctagacctctgggtctgtgatgggaggagccgcaatgaaggtctctgacttgccctggagacattttccccattgtcttgcctattaacattgggctccttgttaaatatgcaaatttctacagccagcctctccagaaaatgggtttttcttttctactgcattgtcaggttgcaaatttttcaaacttttatgctctgtgacctcttgaatgctttgctgcttagaaatttcttctgtcagataccttaaatcatctctcaagttcaaagttccacagatctctaggtcagggtcaaaatgatgccagtctctttgttagtcatagcaagaatgacctttactccagttaccaataagttcttcatctccatctgagaccacctctgcctggacttcagtgttcgtatcactatcagcattttggtcaaaaccattcaacaagtctctaggaagttccaaacttttccacattttcctgtcttcttctgagcctcctaactgttccaacccctgcctattacccagttctaaagttgcttccacattttcaagtatctttatagcagtacctcactacctcagtaccactggtcttaactcctgcgctcaagcgatctgcttgcctccacccctaaagtgctgaaattacagacatggtccattgtgccgagccaaaattgatattttatgtatgacactctgggcagacctctatgaggtgacatttgaacagaaatctcaaggaaggggagaaattatccatttacatatttggggaaagagcattccaggtagaagaaacagaaaatccgtagtcttgaggaatgccgtgtatatgcagtatttttcaaacttgttattttgaaatacatatacacttacaggaagttgcaaaagtattaagaaagatcatgagtacccttcactcatcttcagctaatggttacatcttacataattatatgtaatatcaaagccaggaaaccaggaaattgatgttgatacaatctatgctttattcagatctcacatcttacatagctatgcacaatataaaaaccaggaaattgatattaacacaatctatgccttattcagatctcaccagcttttacatgcacttatctgtgtctgtcattctatgcaattttataccatgtttagagtcatataacaactacccctattttgatacatggtactgaatagttccagcgtcacaaaggaactatctcaagccaccctttaattgtcacacccatccaatctcccattctacttcctgaatcactagcaacccctaatctgttctccatctctatgattttgtcttttcaagggagttttctaagtaaactcatttggggaaagaaaggagatgaattgttctagccacggagtggagaacagagagtaagagtacctattgaagcagagggagtcattgcaataattcaaatgagaaataatggtgattctaaaccaggaagctttcagtgaaaacaatgagaggtacatggattctgggtatttttggaaggtagcactaccaggtttgctgatgaatggggtatggggtgggaaagaaagagaagagcccaggatgagtccaaggtggataaggtgaatagaattgagaaaatggtagaaggatcaagttagatggtagaggggtaaaggtggaagcaataattttgttttggaattgttaggtttgaaatcttgttagacatcccagtaaagtcacaaagagtgcagttggatgaaagtatgggattcagggaagaagtatgtgctagagatgcagatttgagagtcatctgtgtggaggtattattcaaattcaagtccccttggaatgaatggctattcaggcagggtcttcataaaaatgcttgttgcatgcctgtaatcccagcactttgggagtctgaggtgggtggaacacttgaggtcaggagtttgagaccagcctgatcaacttggtgaacccccatctctactaaaaatacaaaaaaaaaaaaagttagctgggcgttgtggcacatgcctgtaatcccaggtacttgggaggctgaggcaggagaattgagccaagattgtgccattgcattccagcctgggcaacaagagcaaaactccgcctcaaaaaaaaaaaaaaaaaaaaaaaaaagcttgttgcttcaaattcatgtcagtctgtaaaattatctgggaaggcagtacaaaaactgtcactttgactacgatgtttctggtgacccatcttcattgatcagtatggaaaaggcatgtctctgaaaatctctgagagtctttgatacagcaagaacataaggataaatcattcttctatgttcatggttgtagaggatcttgaatgtttaatggcagaatagccagatcacactctggcacttctgtatgagaggctgagggatgttactgattcaccccgagaaatatttactactaaggggacagaggcaaaggggatacaagacttcaccctgagctgtagcgctccctccttccctatcctgctttcattcttcacattgttttccttctttcttttttattattatactttaagttctgggatacacgtgcagaatgtacaggtttgttacataggtatacatttgccacggtggtttgctgcacccatcaacccgtcatctaggttttaagccccacatgcattaggtatttgtcctaatgctctccctcaccttttccctgtgtccacattgttttctttctttttgaagcctctcattcactaggtttcaatcctgccttgctagtgttctaactctaaggcctaggcaagttatttcaccgaacttagcctcagtgtcctcatctgcaaaatggatagttttatgatatcttcagcccttaaagtcaatggttctgacagctagggtgtactatcttcttggatatcagtcatctcaagcaagccctccttttttggaccttcttttcacacacttcacataccttagagaacataatacacatcctctttactcagggcttattctttataacaggcttcctaattcaattaactcaacttttcaaaaatattagtgactactgtgatgtaaataaatttgcattttataggggtcttagtaacccagaagggagtggggaaaattaatatatattgagagtttattaagtgctaggtactgtaaatattttcttgtatttaatcctccgagtaattctacaacaaagatattatcattgctattatgtaaataaaagaacaaagtagaaagaaacccacggtcttgtataagctcccctagttggtgggtattgaagggagtatttcaatctttggtagcttctgagtttttgttctctcagggaatctgccagatgtccagggcacctgccaaaccctatgaggctataagaaaaccattaagggtcttagattacccagctttttgggagttagaattctgaatgaaatttagtgttcctgcagctacaaaggaattgagttagggaagtgatgactttatctttagctacattggttattttccttataataatcctggcttggtagattagaggcagcccgagtaacccagaatcgctaaaatagaagtgcgagctcattgcccgctgtccttcactatgtttgcatataggaagcaagaataaaacaagcataaaataggctaactagcttgtcagagctcttcacaccaagtctttgtgagttccaataagacactgactattattaaaaagacagagactccacataagtaggaatttattgttttccttttcagtcaccaaaggacaatcctctgcataggttagcaaaaaatggtactgatcctataatctctaatattaaagtttagatttggcaagctgtacatcttatgttgttcattaacaaaaaacaatattgattggtatcttgtactataacttgtactgtgggtcaaattccaatacagcaaataccattgcaataacaattctacaaaactacatcaaaaaaacctttcatgtttgagccaacagcctgatagtgctaaggactttgagtacagtatgctagaagattcttaacagttatttgtcctggacaacaaaggttgactccattaaaaacatagccatcagtgtgggattatttccaaatcaagcttttggaaaagtcaaatgaaagtttgcaagcaggtggggcatggtggttcatgcctgtaatctcagcactttgggatgctgaggcaggcggatcacctgaggtcaggagttcgagaccagcctggccaacgtggtaaaacccccatctctactaaaaatacaaaaattagctggcttttgtggtgcatgcttgtaatcccagctactcaggagcctgaggcacgagaatcacttgaactcgggaggcagaggttgcagtgagccgggatcatgccactgcactccagcccacatgacagagtgagaccctgtcttcaaaaaagcaaaaaacaaacacgcaaacaaaaaaaaaaaaaaccaaagttggaatgcaataaatgttcattgaatgaatactgaatagggagtttcagctaatccactcaaaatagtgctgaatttccagctctaaggtcaatgcttggcatatatatcctgaaggaatgaatggacacagagtaattttttttctaaaatgcaaattcaattatgtcacttcccttcttaaaatccttcagtagcttcccgtagcctccagcatattattttgaatagtgcttctcaaactttgatgtgcatcagaatcacctggggattttcttaattaactgatgctgattcagtaggtctggggtattgtctgagattctgcatttctagcaagtgctcagggttatagcaatgattttggcctgcagaccatactttgggtagcaaagacataagccacttaacttgacataaaagactgtttagacccttagtttctctctcgctctttccccattttgagcttttgctccggttcatgtttttccctgaaaataccgtgatcttacattgtctgtctggatgctgaattttccctaattctgggcctccatgtagttttaggtttgacatcacaaccaccaaaagatttccccttctcccttaatcttggttaatgtcactctcatgtattatactgttaatgaagcattgaggacataaaacttatcaaatattttatcacaatcaatgatggcaccagtgataacatccaaatgcctgggtgagtaaataagaggagaataggggacttgttgttaaactaagtttgcagagaaaaaatgtactgattataattaaattggatgtttatttgttatgacaaaaaaggagctagagtcttttaatccaccccttggcaccactgcttatctccttgtaacatacgtttgattcccatgtctatttcttccatatgggaaatttcagctccctaaacatcaccaatacaacctgttgataagacaaagttaaatttattgcttactatggtaagaaagaccacagcctggacaaagctttggtagtatttcataaggagaaaggtgaggttggatttcattgggagtatgaagcttggtttaagattggtctttcactgtgggggcacaattaggattgggtaaggatcatggtattacaacttagtttggtggaaacagcacagtgaagatttctagccaagaggctcagagactattaaggtgtgaactctattgatgttttttgttgaagagttgatgggagtttggggaagttactttagtgaacagtcaaattatttgcctggccaagagttatctgtaataggaaagttatgctaatgaagacaatggaaaggtaaaccatgttaatgtcgacagccagctatgtgagcataaggggtaggtagctttggtcctccatgtccaaactgtttgtagtggtaagtgatcttcattctcacatagattgaaagcttcctgaggacagggcaatgtctttgtaaactttaaaatatctatgtcctgcacatcacctgccgtagacaagcatctagtaattgacggttgggtagatactgagggaaaacatgcaccaaataaaaatggcaataggacacaaattcactatcatttggaagaataacagtgttttccactgatatttgctacacacagtggggtccacagagcagcagtaccacttgggagcttattggaaatggagactctcaggcaccaccgcaggtccaatgaattaaactctgctttttttaaggtcatttgtattcaattattatttttttcttttttctttactttcgatgcatttttctttatttgtttttgagatggggtcttgctattttgccgagtctggtcacaaactcctgagctcaaatgatcctcccacctcagcctcctaagtagctgggatcacagatgtgagccaccacacctggcttgtatcacattaaattttgaggagcagtgctttaatatctattccattctcatcacttgatgaggtattattaattccacttatggatgtggaagttgaagccagaaagtttaaatgacttgtacaaggtcaaacagcttacaggtagttgagccaagaggctctcaagtcttctgcctccacaaacccctgttcagctgctgccctacaatggaataaaatatactaatcccagagggacaaatatgctaaaaatctcaatattatacactttggaaggtgcaggtgcattatctttcaattctaatttctctttcaagttttctgatgcataaaaatatgaacagcaggtctgagcaatgtttagatgccgtgctttgatccttttgccattcaagatgtttgatttgcattctgccaaggaatgtctggtaacctccatgatgcagaccacaccattagtcaagagagagctgacgtaccttcatctgagagctggctggctgtgagctgctcagagggaaaggatttctatttacaaattgtatcgattatttataaataaaagttccccttgctttcttcagttgtaaaatctgcagttagagagtcgggaagaagatcaaaactgcatacatttgcatctgccaagcctgataactagttccagaattacagaaatggtgctgaaatagcacctcaagtaccaggctctatcaaatttaatctatccataaggcaactgccaattatattttagagaaaaaatgtagactgaaaagatagacaatccaagtagcaactcctgtaaaattatatgcccataggagcaatcttgaagatataaatattggtatgtttctccttcatttatcatttatctgatcatttgacaagtatttattgaatgcctgttaagggtgtagatatatgtggtgaggctgcaggtgtaagtaggtctttctgaggatatgcatgaagttgatgttcataacttggagatgtgtgtatacagactgaggattccttcagtggatattaagaagtggagtaataggcagtaaagaatacactagtcagttgtggtacataaacacgtcagcaccacttaggtattaacttcctgttttgttttgtgtgtgcttaattacgctgtttattaaacaagcacatcataatctgcagatattgtcataaacagcacaataaagcctgccacatcagaatgtcatctatcaaattaggtgtgttcctcagctgtcccgataggcacacacctgtgcctgtaaataggcgcttggcggagattgcttccaggtgtggatctgttgggcgaccttgggatgtagggcactttggaaccttttcctctagcttcaggaattaacctctgggcttggttccatgccagcttgcattttgctttgggacagtaacatgtaaagaatatgcctgtgaatttagggttactgagaagtcctcatagaagaagtaaaatttccttgaggaatgggagtcttttattcaatccaggtttaatgcaaggcttggtgaacagctccagaaggttaataattgcgtgcgtgtgtgtgtgtgtgtgtgtgtgtgtgtgtgtgtgtatccttttgtcattcaaaagtatacgtatacacacacacctgtacagctgatgataaatatacattgtatcaatgagttcaaatgaagtgtgctattcattcactgaggaatgggctattataatgaactattatgatattagaaattgtcagggcaataagcaaataatacatacggttttcaacaaactttctaagtattgttatcagtgggtttgcttaaatctttttttacaaatttatttatttttttgagacgaagtctcgctctgtcgccaggctggagtgcagtggtgcaatctcggctcactgcaaccactgcctcccgggttcaaaagattctcctacctcagcctcccgagtagctgagattacaggtgtgcgtcaccatgcccatctaatttttgtatttttagtagagacgggttttcaccatgttggccaggacagtctcgatctcttgaccttgtgatccatctgcctcagcctcccaaagtgctgggtttacaggcgtgagccaccgtgcccaggcaatagccccattgctcagtgaatgaatagcacactttattttaactcattgatataatgtatatttatcatcagctatacaggtgtgtgtgtgtgtgtgtgtgtgtgtgtgtgtgtgtgtgtgtgttgaatgacaaaaggatacacacacacactcttattaaccctctggagctgttcagcaaaccttgcattttttactttcattacagtgtgtaaataatttagcaaattctaatttgaacctgatatcaattgagcatttaatatttagccaaatatttatcaagtgctgactgtgttctagatgctggggctgcaatttcgaaacagaccattgaggccctcatggagctcacaataaatgatcttccttaaagtatcaggtctctggtttgttaccgtattttttaaattgttaaggaaagaaaaaggccctatctttttgtagacaaacatgccctaagtgcttccagaaataatctccatcaggtaatgcagactgtgtgtggagtgaaattgagtccaatccatgatccagcagagtttcagcccaggatttctttagagcctttgctacacacaaagttggctgatgtgccattcagcatcccagcagctctttctcttcacactagcaatggcaaagctttgtgcggaggcattgctggctgctctgaactaaaagcatccgtggggaccgaaagaggtttttgcacaccttattaaggtaggcaagtgtgtctgagtgtgtgtgtgcctaaaagctggaagacatctgttgagaggaaagtgctcttctgtgggtctggcagcttttctgtaagtcttctattctgatgcaggagcgtgtgagcagtgggtgggaggagatgctttggtacttggaatgctgaggtccggattaagtggtattgtaatagctagttagaggcagaataaaaagctgggaatcaaagcatttaaaaatgcatccttccattatttgctctcaagttaaaccatattcattctaggggaaattaaaaaaaaaaaaaaaacacagcaagggcaagtagcccaaatctgtaaggtctttgagcttctctgttcgtccagcttttgaagtcttcctacagccaatttgtttggctcctctggagggggcaattcatatccacttccctctcctggagcatttctttcttctatactccatcagggaacaatagagtttaacagtaacaggcaattttttttttttttcaaagcttgtgccctcttctgcgtttaaaggtgttttttaagagactcctgctaggggaatcttggcgcctgtgtgttaagacggcaattaacttttagtatcagtgcttacattaaattttctctctttctgctttactaaagcagtcattaaaattcagtgtgagtaccatgaaactttatcataaaaccctgctttgcttagagaaccttgattgttttctgaaagcagccttctcagtttatatatacatagctgccttccttggaatatcaaattgctttgtgtcacattaagaaacactaggttgaacctctatactgtgttttatctgagaaaaatactactgcaaaaagtttgatttgttcaagttttaggatgaaaatttctttgtaacaagttatttgagttgcatactatgtcatcgtatatctctttagttcaagtaattttgcaattaacatacggttatgtaaagaagataatgatttattttttatttatatttttaaaagttattaagtgaggttttcctttcagtaagagtttagaaaaaatagccagaacaagtaactggacttggaagataaagatacctttgcacttctaaattttacctttgtacacttcggttgtgatttaatcattgaaatgcctctgctttgaagtaaatgcatcacttatggtgtatgctgtgttttaataaagggaaaacagttatgggttctctgttgcacatttgaatgttgttattttttgctgtatttaataacctcttttttctcttgtgaggtttactttggaaatgaggcatgttcaaaaataggctgacattcagcttctatgttttaaatttaaatgctgtctgtgttttatcacatctggaatgtgtggggagaaaagataccaagttttattatttagatttaattgtagaattgcagattgatatttttcaatgcattttcattatagtttctgccatggaggcagcgtgagggctttcaggaagatggagtggtgtaattaccaggtgcgcacgttcattaatccttcctggctagagaaagcttcaagttcttctccagtggcccattcgtaaagctataaatatctaaattgtgtcagccaagaagtcacacagaatggtggctctttttgagttcaatttcatgcactgttgctttggtcttgtgaggaaagctctgaattccttaggatagtcttggttgtgaagttccaaaaacaaaatatcaaatcattaaggatttaatttaaaatacatactcttctttcacaaactagatgattgcagtaatgtggattataaatttttttttttgctttatttctttagagctcctctttttattttgtatgatcaagattatagctgagattttggtgatttttttaaaaagatttatggcttatggtccatcagtctctccactacttcaaacctgtgtacccctgtatattatctgcagtactggaatgtttgcattgtatgtggaagctatatacgatttggtaaaaaataacacttaaaggtcttcgctaagagtgcttatttaatcattaaatatcccttaataaaaataattccagagatattgtctgtgtacaaacttaaaaaaagagaaatataaaatactgtgatgtgaataaaatgtatagcaatacactccaataataccattcttatgttttcccttgttctcaactgaaataactaagctaatagagacgtcagtaaggaatgtgttgtttcttcataatacaactacaaactcatctgataagaacaacctgagagtgaacgttaactttcctcattagaaagattcaatttaacacatatatacaaatacatttttaagataatgatatttgcagagtttttgtattctatggagtaaaggagaattatcacatattcaaagtaaaggtataaaatacatcttaatgttttacttaaattttaaagggtccaaaatatactaaaattgtttttctaattctttcctatgtttaaacgtgccagagtcattggaaataggacattctttttcttaagaagattttgcccaaaatatttaaaactattttcttttcccttgattttacaatttcaatattcatggatttttctactttaaaaataacagtagtttttatgatcttaaaacaaatgtttaagggcactttcgctctctggagactataccatccacatatttattatcagcaaaagaaagggcagggcatacttttatttgaagttgagtataaaaatgtgtctgtgtgtgagtgttattaaaaagataagtgaagagacaaatatagaatccaggaacattttcagcctggcttttactctctctaaaaatctaatgaaacccttgagcatctcttatctcaaggtacattaggaactgtccaacactatgatccgatgggagatcagtatattcatataaagaagaaaatttgttgttagtgaaagtcaagtcttttaaaaaaataatagttacagcatttgcaatatacaagcataatagatttactcaacgcccaccccccatctttaaaaaatcaatttccgacagttgtctactttaaaattgaacatatttgctacctggagggaacattgtaatgtagcccatatgtggtatgcatcctgaagaaaacctgaaattatagaggaagttatcctgccttctttcttctgttgaatgagttaaaatatattaacaatttgcctttcactttgtatttatcattttgtatctttgcatatttacatatacattcatgtgtacaagggcatatatactcacaggtcagggctatttaaacagctatttatttgaatatgccagggaaaatctccaagatataaagaagcagttattagatactatgtcagtatagaattaacagccatcttttttaagatggaagagaaaattaattaattacatacaatttctaacctcaagacattttctttctggagacaaggaatactgaggtgctcacgatagtgaagactcaacaagaccctaataaaatagatgaggataagtaaaactacaatagccaataaaaaacaaaaaacaataaaccatgtttcgctggcatgttggtgagtatctctgtaatatctgtcaataagggtctctgtagatttggagtaatgttcaggaactacctgtactagagaagacagtggagaggactccagtggctaaattctgctgcctttgcttccagaaatgtaaataataaggaggtattgtggcatttcctggaagcagtagtcttgtttcatggtctgactgtataagaatgcctagagaaacataacctcagctgactaaactcccttgatgattgtcactttgtcactgaactctgaccataccttttgcctccagaggcaaaagacgggtgaggaagtgatctcctcatctggtttttaaacaagtatataactagagaactggattatctcctaaacccactcttgtccctggaaaaaggggagtcatcctatccgtttcttagccaatttatgtatactcttagtttgagagcatgagaaggaaaactattttcttttcttaccttggctgggtttttaagaatttatttttagtttaatcaaaataatattttaaaaggtagtaagcctctcataagcagtttgatctgttctaaaataacttcaatttttctttttttaaactttcttttatcttacacacaaagtataatagtaatatgtactcactagaacaaatgaaacaggatggagtcacatagagaaatatatcatattctccctatcccctcccttaatattaacatttaggtgtcatgtgcttctccattaattttcattgcaaaggcctaaattttcttccaagagtgaggagtagcagcacggtagtttggacctgatatagctctctttccctagccttttgcttaagtgctttcctaggggctgactttacttacctaaagatgtttcaagcaagggctcacatttttggtagcagaagacacttactgattgctctcactaataattttgaaaggaatgtcaaaatctgggaggatcatgaaagaaatatcagaaatttcctttcagctgccattctccttaatactgttatcaataaattcagcatctcatatgtgatagcaaaaaaggtgctgccttttgttcttgcatcctgaggttcttacctaataccatggtagcaataaagatggtgagaaaattgcttcttctatggtgttcaggtcctgaacgagcaccctcacctccacagacggtggcaggtattcaagcattttacagactttggagttaaatatagcagtgttattctaatttaggtatgccaccaccagcggcaccggcaactgcaataggaaaaatgattggcaatgccagctatctgatgttttcatgtgccaggtgctgtcagttcttcacagtattacattccatcctcacaacaagagagtgccagtgagtgttgctgtgtgccagtgcccaggctaagggctttgaacacattaccctgttttatcctcataactttccacgttatttttattcctgaatgaagaaacaagttctctgtagagatgctgtcattgatccactcatatcctttcacatccgtttaacattttccctgctgtgcttttactcccaacaactagctccctaatcgctctgttggagggtggccttgaggctgccagagcctatttggtctgtgtaaagagagagatggatctatcctggaatttatgtccctgtgtgtgggaagcccttaatcaatgactgctggttgcagacacataaatacgtgagctttcttgttcccaactgagaaattcagaagtgtgaatggcactgccaccctgggcttttatgccatatatgtgtttggtctgtttcccttcccaatctcacttcattttcccttaccagtgtttcttgaaaacacatcccattagatcatttttgcatgaagcttcatctcagaacctccatttagggaacccaaactaagatattctctaaaatagaaactttattgataaagtttccaaactgtcttagtagatggccaatataagaccaagccaaatctttctgggtccaaattccctgtctttaattaatagactccattacaacacattcttcaatctttagtcagcaaacacttaccacgtgcctattttatggcatattatatttataccatagttaggatattatggttcatgaatattttatatctgtacacctgaaattctattgacctctctgggccacagttttgcatctgtaaaatcagcacaataatgctacttatctcatagagtagacttaaaaacgaatgaaatgatatatgccaagtgttgagaatcacaattggcaattactcatgctcattaaatattagctgtttttatgagtattgtttcattttcggtgcataatatcctatgcaaagaacaaaaggtattggtataggcattgaaacttgaagcatagaagaaaaagttaattaaccggtgccccactagatgcctctaactgctggctccgtgtatccctttagccttggctcgtcacgagaaaaccttggagacatttctgctggactcagcagatcaatttaagaaagatgaatgacatttttcttgaaatgtattcagtcatagctgcctttttctactttcatattttggagttcttagaaaaaattaaggactcctttttttaaagaaaatggtataaaagaaaatgcatatcactttgtcactttattattgtaacctcatcaaagtattcagtgtaaagacagtagccaagtgaactcttcttgtaatgctcggaaaccattttagcaatggtaaaattgctgcaatttatattcgtcaaattgcatgatttgacttattttagaaaagttattaacttctgaagagaatgcttcagaagcatttaaatgagtacaagttatcaccagtgatatacataaatttcatttcaaaatatacttctagaaactgtacttagttagctatagtatttgtacaaggattaattcctatttcattttgtaggaatttatttatgaatgtctatggcctgccagtgtaaagcagacttagagcatcatcttttacaataatctttttttttttaatcaaaggggagatattctggtaaaacaaaacaaaacaaaaacaatagtttattctgcatttttattaagtccctctgtaagtcatccctgaaatgggatatgtagagtcttatatttatttatttctcagaagcttattggaggtgatatgaaggattttaagaccctactaactaacaaaacaacaatttaaaattaattttcaaaataccttaacaaatcttattctccttattttcaaattctttaacaatgtttttcttattactaacataatatcttctgatgtagtcataataatatctaaaatgacaggtctaagtaacttacatggattaattgagtcttctaaatagtaaggtagatggcactattacttctatatgagaaatgaggaagtagaggtataaataagaaattttttggccgggtgcggtggctcacgcctgtaatcccagcactttgggaggccgaggcgggctgatcacgaggtcaggagatcgagaccatcctggcgaacacggtgaaaccccgtctctactaaaaatataaaaaattagcctggcgtggtagtgggtgcctgtagtcccagctactcgggaggctgaggcaggagaatggcgtgaacccgggaggtggaggttgcagtgagccgagatcgcgccactgcactccagcctgggtgacagagcgagactccatctcaaaaaaaaaaaaaaaaaagaagaaatttttttgagtgtatacagttagaaaatggcaaaatgggaattcagacccaaacagtaagactcaaggatacctttcttatcagtatgctaatatgaaaacctaagcatactagaaaatctaagtgccagttggaaaccagaattaacattttggtgtgtaactttctggctgctttttctatgctaacaaacatatatgacatacaaaaatacacacatacacaaattcctgttcactacttcttttatgttaacatcacaatgtaccgtacacagctgtattattttatatttgatttcatattttttctaaagtcagtgtatttgtcaaatatcaacttatctatttaataggaatatgggatgatctttgcttatacatacatacatatgtatataaaaacaaaatcaagtattttaagcgttcaccagaagtcatatgtcaatcagtaaagtatataattttttgctgccaatgacatatatcataaaaacgctacctatcatagaatgaaaatgaaacacagcaatattgggacacctattctcaagcaacagctttgtgatttattagctatctcacatgaaataactcattaacttggtattccaagcagcaaaagaaggatcacttaggtcacttgcaaaataatacaaagctaggtttaggggtgggttgcgcttggtgggatgtagatgaaaccatatgggcccttgagtttataattgctgggatctgcatggtgggtatatggatgtttattacagtatgctagtgagttaagaaagaagaggaattattattgacttacatcatagagtttatgcaaaaattaaacgataatttatttttaaactctagaggtataggtaccatcatgaagggacccacagaactgatgtagccagtaattattggagctggaacagatactctgctgtcagttgttctggttttgtggtcattgttcttgcctttgcaagttaccaactctaagaccttgggcaatactttaagtcttggttgtctcatctgtaaaatggggagagcagtaagtgtcttaaaggtttattctcatgttatatgacttacggtatgtaaaacatctgcgtttagacacatagagggtgcttaatggatgattgctctcattattaggctacatctaatctatgaatttaaaaactgtatagaaatatgtgacagattctttaagagccaaataccaactacagtgaaaaatacttaacacttgctgagctcttagtatgtgtcaggcttaactaccttaatgctcatagcaatcctataagataggtactcttgttatcctattttatatcttctaaaattgaagcaagggaagttaaataataggacaaagatcatacgctatctatccatatatacccatctggctgtctacctgtctccttccatccatccatccacttattcatctacccatccatccactcagttacttctctctctcccaccatccctttccctttccctctccctctccctgtctctgtcactctcctttacttatctatctatcgatggatcggtttatctatcatctatctatctctatcatctatgtatagttgttaataacactaacattttataaattacaagactgaaaaatgttttcattaacttatggtaacaaaagaccacattgtgaataaaaaaagcagtaaacacaggtctctgcacatatgaaagagatgtcctaaacaggaagagatgtcctaaacagtagggatacatagtatcatacaatcaaaacatggcagccctataaaacttacaaagcaatttcatgtaagttatttcatttgactcttaccacaatctatgaggttactatttttatttttctcattttacaggttaaatttaatatggcttccaataaaaaattagtatggttaataaatatcttgacgtcttgctcctataatcctaccgatagtttacagtaattagtaaaataaaataataggaaaaatacctttgatactagtattaaattataatcatatcattaggtaatttcaatttgtgattttcaagaatctgtaatatggtagcttcttcctactgacatgtttgaattcattttaaggcttataattcacaagtaatctatatattatctaaaatgtaaatgcacattcacatggagataataaattagcgtgaaatggctgtattttgctctctataatttttaacatacaggaaatcactgttgtctcaaaaatcaaggaaatatagtatttgaggtgaacttattctttctactattaacacattttaatatagttctctcacagtgcaacagagcaagaagctttcagacacatttgctgctgcaaggagcatgctgtgctgaacttaaaacaccttccctttcaaactccttgggactgtttttttccaagagacttcaaatgcactaaatttagcatccgttggaggcacacccaggcatattatagtgaaagccccaataactgaatgtgttaccactattcacaatgtttatgtgtgtatatgccttatctatgatgtattgcaaattacaaaaattgtgttattattcacagtaacaaaaacacttccagcaaatttctaacagtgatctcttttgaaataacttacatacatgtgtcatgggtcttaaactttgtcacttttatgtttccatcatgttgttttagccagtgagggttttgtttggttttcatttatgattatatactttcaaaaaatagatttcaaagtgtgaatttgattgattgattgactgattcattgagacggtgtttcactcttgttgcccaggctggggtgcaatggtgcgatctcggctcaccacaacctctaccacccaggttcaagcgattctcctgcctcagcctccctagtagctgggattacagatgtgcaccaccacgcctggctaattttttgtatttttagtagagacaggggttcaccatgttggccaggctggtctcgaactcctgacctcaggtgatccaccctcctcagcttcccaaagcactggaattccagacgtgagccaccgcgcccagcccgtgaattttatttttgaaagacaagaatgtccttgcctaattgcataatagtttaacatcatgaagactaaatatgctttttagccatgacaattttatttattattgttttcatttttaattttctcaaagatcctcatcagtgtactctttttggtcttccttataagcgtattttaacaggacataataataagataaatcccaactttttaaagttgtatccgtatgtattactttaaagtgctattaatataaacgaattagaggcaacttttattcaatcagattttaagtaattttaccaaaaatatggccttgataatgtctctgtaacaggttctctgtaatatacatgctgaggattggtttgtctttgcttttgatactattttaattagaaaagtaatggggaatccagacccttctcatttaataatccagagaaaaatcagtccatgttctaatagtttaaatttttctactaaaacccatgtgagaatccatatgagtggaatggagaggagttcagcttcaaagttggcagatttgagatgattctatggcaacagaaatgtgcttgagggaaatcagttgcggcatcttctataattgtgtcacctagattttgccttaggaatttctagatttccatagaacattgtgacctcaaatgctttatcttaataaagaaataaaagcagattagaagaattatttgcctacagtttgtgggagatgggcaagtcttaagagtttattaggtacccagaacgaaacatattttcttgggcctcataatcacattgaaatacaaggatttagttatacacagtgaccagttagtgaatgacagtcttcagtatctagtagacagtaaacatataaagatgtatttgtggccgggcacggtggctcacgcctgtaatcccagcactttgggaggccgaggcgggcggatcacgaggtcaggagaccgagaccatcctggctaacacggtgaaacctcgtctctactaaaaaatacaaaaaaaaaaaaattagccatgcgtggtggcgggcgcctgtggtcccagctactcgggaggttaaggcaggagaatggcgtgaacccgggaggcggagcttgcagtgagcagaggtcaggccactgcactccagcctgggcgacagagggagactccatctcaaaaagaaaaaaaaaaaaaatgtatttttacttttaactacagcgagagaccctggcagcctacagcatacaattagtgttcattatttagattgcatggatttaatgtgaggggtcaattacttgtctaaccagtgagcctagcctcttgctcaatactgcctgcttcatgagggtgaactgtgctggagaaatatattacaggattatctgcagattttttttaaatgagtggttaagtcaaaagttcttgtgaaaattcagagtaataaattattatgaagttgtgtaactaggtaaaggatagtttcttttacacgggtaaagattaacatgaggaggaaaactttagcaatggcatttaattccattcaatatatttatattgagctcctttaaaaatacagggccttgtggtgggtgctgaggacagaacaaaaaccaagtaatacatgaacataacccttgatttcatgatctagtagacctataaaagttgtcgatatctgatgaaaagaaaatggtaaagatattccaaacagtgtatgcaaatccagagataggatggaggggctctacctgaaggatgatgataagaaaaccgtgttgagtgaagggtgatttgtggaattcagataaaatatcagtcttgaatgctgagtgaatactcaatgattgactagatcccatggacagtaatttcttcaattatgacgatgctagtgtttatgactataactatcattctccatgccaggcactttgccatttggtaaatgtatagtgtgctattctaacaagcatgcacagagcttttactttaatgtatccatgagtttattggggttcagaatttaggtaagctttgcaaggtcgtagcatggagtaaaatatctgaaattcagacccatatctaactaagttcaaagactgtacagatatttctcctcctttgtgcagagaaggataggaatggttccatattatcatggacttagtcagatgttttaaaattataatgtcctgtgttaatgaagaagggatgatattcagtgcatattcttaaccgttactttgcttaatgctctcgacttttctgtgagatggatagtgtagataaaatccccaaggggactcagcaagtgcaagtaaaacaatgaaactttaaagccctttgtcaaaacctctctttttctcagaggatggaagggccgtaaaggttggtgaggaaggatggaccatttcctatgtagtcttctgacaatattcaaacaaaaggagagtcagcaaatcccccttgatgtgggaagttttaatacaatttgcagagtgtctctctggagtagacatcctcctctgcaatcgtgtcttctatatagcctcagggctttgggtaggtaatcctctccaaggagagtcctggagagggctgtctaccccccttgcaccatcctctaacattattctatagctcagctccttgtttctgtttcctgccttgtttttgtctgagtctgcaattatgatgtaagcaccatgaaggaaggtatgttgccagtgtttgcatcagcatatcccccgtgtgtagcagcgcaagggatatagtgagccctcaatgtctatttgtagaaaaaagaatgaacgtatcaacgaaatctgatacatattcattgtgtctgttatctccatctctcttgtcctgccttgttatcttgccattttcacaaaaggccccaaggcccatcatttcttgtgtaacttccagagtgttaatttttaaattaaaattaaggctttctacatgagtgtctattatttgagaaaccatgcaagatcgtgtgtgtgtgtgtgtgtgtgtgtgtgtgtgtgtgtgtgtgtgtgttgcactctatattatattgaattctggattttttcttataaataaaattttaaaaatagttctttaaaaataggaataagatgttttaggaggcacagagagcaaaggagaataaaaattgcaggtttggggttgtgcatactaattgccattgagtaaagagagcacactgaggccatttagaagagaattaacgtgttttgtttttgtttttgtttttgtttttgtttttgtttttgttttgagacggagtctcgctctgtcacccaggctgaagtgcagtggtatgatctcggctcactgcaacctccacctcccgggttcaagtgattcttgtgcctcggcctcccaagcagctgggattagaggcgcccacaaccacgccaggctatttgttttttttttttgtatttttagtagagacggggtttcaccatgttggccaggctggtctcgaactcctagcctcaagtcatccacccgactcagcctcccaaagtgttgggattataggtgtgatccactgcacctgaccttatttttattcatttaaaaatattaaatgttactgcatagggagtaatgggcttaacaatgaggtgaccaaaactcctatgtaccatgcagagcaatgtatcaaatgtttttaactataaacttctcaaaaacataaacctaattgttctgcagctgcaggttatatctgccttgtttgagcaaaatttggtggtgaaaatgccttgcttccatttttccttcaataactgatatggtttggctgtgtccccacccaaatctcatcttgaattctactcccataattcctacttgttgtgggagggatccagtgggaggtcatttgaatcatgggggcggtttcccccatactgttctcatggtactgaataagtctcacgagatctgttggttttatcaggggtttctgctcttgcgtctccacattttctcttctgcttccatgtaagaagtgcctttcacctcccaccatgattctgaggcctccccagtcatgtggaactataagttcaattaaactactttttcttcccagtctcaagtatgtctttatcacagcatgaaaacggactaatacaataacctatataattttgaaaagtacttgtctaatagactttcacaatagaaactatatccttatcaactttgaaaagtcattgcttaatgcctttggataactgaattttctaagattattttaattttgaaagttaaattttatcccagtgttgacgatttttgtatgctacttttaaaatattttgtcagtgatttatatctatggtgcaatcttgtaaaaaattaacaatgcaaatgtggctagaccatttaaaaatcaatatgttataattcagcccatttaatcactttagttaaacatcttaggaacaactcagttccatttgagagaagacacagttttctagatgtgtgttgtggcatcatattgctttacaatatcttacataaggtgaattcaaatcatatcattgaatctgttttaaattctgtcatagcttaagattagtgactaaatattggcaggtttatggaagtaggatgtaaacaagacaaaaacaagggtggaacaagtaattttagtatattattcacttgcacagagaaaagtcattcacaccttcttcagctttgtgaagaaaatagactaaaatcctgttgatatagcaactatgttttccgtttcttgtataaaaataaagaaaacttcctattaggaattagccagacattttaattttctctcttctttctctattttcccttacagtctctttgaaggcaggcaaaatttctataaagttttaagaatgttttaagatttttttattgtgaaatattcatagactcacaaggagttgcaaaaacagtacagagatttcctgtgtatacataacccaactttccccagttacatattaaccaaatacagtatattaccaaacccaataaactgacattggcacagtgcaatcaactagactgtagaccttacttggatttcacctgtttttgcacatgctcttttactgtgagtcattatctgttattctatgacattaaccatgtctatagatttatatagttactaccactatcaagataaagaagtgtttcatcaccacaaagtaacttaaaggattatttttataaagtaatgacaaatgtgtcaaaagccattcctgtgttatatagcaagtatgttttgagttattaaaactcactgatcatgtctttcagtgtcataactttgggtttccctccctaactataataatcctgatgaattacagttgatgaatatgagaatatccaactcttcctgactctataaatatattgactgagattgtaatatttatggtgtcttaaggggcgcttgttttattatgatgatgtgaacatgttgagaatagtaagaacagcccagtttagcaaacaggatatgagtcttctatatccagctcaatcgttgccccaacaggggacatctgcctttgctacttaattttccattctggaaaatgtgaagtgtatgagaatgaataatcgtctccgattttccagcacataataatctgaggagagcaggtacagcaatttaggagctgttttcttttggtttccaaaaaaagttccgtccagtggtctaagttagtcgtttactaagtgatagagcaattggctatgctttttgaacggactgataattatgtggatgcagcaaataggatatagacaatgcatctactccattacagtaaaaaagactctgatagcagttaatccacataccaggcacttagcttaggcacagttggaggaaatggaatggtaatagactgtagtatggcatgacaggagctgtagcttgagattcagaattccaactctgcctctcaatatttgagtcctcatggccaagatatgtaaagtgctctgtgcaggtcttggcaaccatccaccacacacttagtatgcaatatctatctttattagtcaaggatctggaaagctagttgatgagacaaatgatagaaacaagagttcattagatgaaataaagtaataaatgatgcaagaatttaaaaaagatttagagaaggaaagggaacagaactcacatgcaagtagagcaactgtgtatcagataatgtgctagctgagttagaaaccatgtctcatattaccctgaaaataattctgcaaagctgtaggtgttatttttttcatttgacaggtgaattcatgaaggcttgaatatagggttaagtgagttgtttcaatgtagttattgattcaaatcaagatctgaatgactctaaatatggtgctatagagatttgaagtaggataaataggatttgaaaaaaagaaaaaatatatagggaaaggaattggtacactgtagcagtgtcataaatgaagcttcagttgtgtgattccagatgatgtatgtgaggcctaatcaaacagctttgtggaatcaaaatttctgctcttgtctccaactggggacgagttggctcgggattaaggtgggcgaccttgggaagactagagtctaagcaggactttagtccctcataagaattatatgaggatgtatatttgcatacaaattcctgggcccaccgagatctgccaaattggaatgtgtggtgatatcacccagggaaacatagagagctgttataattagtcatgaaatatttagtactgaaattatagattatgttaaataatcacttataggggacatagcagggttggcaggttaaccatacagcaaacagggttgtaagtcagggcctagagaattttcaagaggcaggaattctgcagaatgaaggcctggtctcatgcagcaccatggacagctccgaggcactcttgtttctccaaaaacctgaaatcaaaaactttgcttttcatcatgcaacatacccatgtaacaatcctgcataggtactccctagtccaaaattaaagttgaaaaaaaaaactatactttcatttgaatacagttctcttcggctttaccagctctactctggaaggaatatcttttactcaatgaaaggccatcccctgttaatgcctggccaggttctccttatcagtcattcactatctttgtgtgtgagtgactaaacatataatgctatgtttagtggatggagtaagattacctttgcagaggttgtactggcttacccctttggttcttgtagttttcttctattagagttttttccatccctaggtttctatactgttcaaatgggtttaagattcttgaaggtattcctctgaccttgtaatttatgcttgtctcctagcacaacttttttttgtaaaggaggcaccaactatgtggtttgctggcgatggcatacacaaatcaggtgggaggaattaatgagagcagcaattccaatatctggttcttcaagattaacttgtatagtttaattcagcattctaaataagcctcatagatttaaaaatctagaataaacccacatttttaaaaaaagttttatgttatctgtgctgataatgcacgctgtacataataaaatattattttcttttttttaaatttattattatactttaagttttagggcacatgtgcacaatgtgcaggttagttacatatgtatacatgtgccatgctggtgcgctgcacccactaactcgtcatctagcttaaggtaaatctcccaatgctatccctcccccttccccccaccccacagcagtccccagagtgtgatattccccttcctgtgtccatgtgttctcattgttcaattcccaatattattttctaagtggcagtggaagaaacatggaaagttctacttcatccatcggtggattagaatttgtataccatgagatgattaattttcaaaaccagtttgaatctcacaaaataatgaccctgttttttgaaggacaaggcagaacaaggaactaggctgtgccacgttcaagtcacaatctctaacatttgttttgttttgttttgttttgttttgttttgttttgttttgtttaatctctgttgcttgttcactttctcttgtaatctgcattgatttgctacctggctatttgtagattgacttcggctgccaggaatggaatgtttttcataaaggaacatatgccttaatgaaagtaccataagaagggagtagagtgtgaccaattgcctaggtaataagtagtgacaacaatgatattattctagtataaatggaatcagtttttctttgcccagggggcatgataaagaaggcctggctggtatatactaggtgggacacaccaacagtgcctagaatgtcaatggatcaaacctgagggaaccagaagttgaaaagacatatcccaaaagaaagcatttgatgtttaagggttggcttacttagaacacaatgaaaaatattactaaaattaaaactatgattttagctatttttaaatatgacaaattaaatagcagaacattttaataaaacattacttaaggtccacaattttctgtaagtctaatacatgggtcattaaaataaaaaattccccatgatttatggaatcagatttttttaatacaacgaattctaaatggttttataatgccaattccaattaatatcctaattataacatgtcatccagaagggttaatgactaaattttattaatatttgttttctatttattttgatttgtgcagtttatgtgtatagtaacgatagctgcaaattagataccattagcattaaataaggtatatattttaatagaaaattaaagttaagtatttgagctagcctaaaatattcaacaacttaaatttgttttttgtggatcacatttttttgagacaaagtcttgctctgctgcccaggcttgagtgcagtggtgcattcatggctcactgcctcaaccatccaggctcaggtgatcctcccacctcagcctcccgggtagctgaggctactggcgcacgccaccatgcccagctaattttttgtatttttttttagagatggtgtttcaccatctggtctcaaactcctgagctcaagcaatctgcccaccttggcctcccaaaatgccgagattacaggcgtgatccagtgcactcacccctgtgaaccaccattaaatagctaataaaagatgcatgtcaataaaaataaacaacttactagaatgattatgtgaaaatcatttattcttccaaagcatgaattttcaaacacaccttttgttactgttttaagaagggaatcatttccatatatttgcatgtaaatcacttttagtctcagagaactttccataaaagtttttttattactgctgtaaccgatagagctagtggactattaatttaaaaagctgtacataaaaacacatctatagctcaaataatctaggataccttttagtttggggaaatgtagatgaaaatgaagtaattacagaatccttgttaattttcagatttagacagtctaggcaatatctttcaggaatgaagagatatgtgttttttggcatcttggtagagtatattcccattgtaattcttttgtgaagtctagaccagatgtggccataaaaatagacccctactacaataatatatttcatagataatccaataaagtcaaatcttattgcagtaggcttagaactctgtttgcacccatggaatttatatcagtttttggcaaatcctttcatctctgaggatactttttcatctcacatataccctattttctgaacattttgccttcaaagtatacctcatttatcaagaatttctctttattcatctgacttatacaagtggcaataacaacgtctggttcccatgaagtaaccagtgaccctttgaaataatatagcgctggaagaaagaaaaggaaagggagactgatcattcagcaactctttaaaaccatgtcaccgttaaacacatagtttattttatcttttttttagaattgtgaaaacctatattagcatcttcacggatgtctcctttgtttacatccccgcttctgtgccttgcctgcagtagaaaaaaaaaggacatgtgtatccctattccccattgtcttctcattctacatgagaatgagaattcttttaatttcttctctatctacatgaacccacttccattatctgtttgttcagttctttaaatgccctgaagctagctctgtgactgggcagttgaaagttctggacttagcatcaggttaatttgaaaaatacttattgagccaccaccatatgtcagccactactgtagatgttttgaatgtgtcagtgaacaaagcagaaaagatgtatgccctctggattcttgggggtctcaaatagtgaaagacagatacgataagtatattgtatagtatgttcaaaagtgataagtgctgtgaaaaaaaagaagaagggtaaaataagagatggctcatgctggagtacattccaattttaaatagggtatcatggtattcttcattgagaaggtgacatttgagcaaagatctcaaagaatgaggcatggggttgaatcatgtagatatcagcagtaaactcattttgggttcagtaaacagtcaatgcagaattcctaagccatcggtttatctgctgtttggggctggttatctgcagtgtggctagagtgaagtaagtgagagaggtttaggagagaatgttagtgaggtgagggtggacctttgaagccattgtaaggacgtttttctctttctaagtgtgagaagatgatgctgactgagaccagggtgataagaaatagtcatattctgaacgtgtttggaagtggggccaacaaggatttctggatgaattggataaggggcatgggagaaaaatggagtcatgaatggctccaacgtttttgctctgattaactggaagggataaagttgccctaaactgaaataataaagactatagatagaatggggcgattagggaggcattaaatttggatatctgttagacatatcaccagatatattgaataggcaattgaataaatacctttagagttcagcaaaaaaggtccaggttggacgtttaaatttcggaggtgtttgtataagataacatttaaagctgtgatatcagattgtatcactaaggaagaatatagatagaaatgacaacgtgactaaggactctaacattaagaggtggattgacaaaggagaaaacagcacaggataatgaaaaggaatgatcagccaggcatggtggctcacacctgtaatcctagtactttgggaggccgaggcgggcagatcacgaggtcaggagttggagaccagcctggccaacatggtgaaaccccatctctactaaaaatacaaaattagctgggtgtggtggcacacacctgtagtcccagctgctctggaggctgaggcagaagaattgcttgtacctaggagacagaggttgcagtgagccaaaagattgtgccactgcgctccaacctgggcgatggagcgagacttcatctaaaaaaaaaaaaaaaaaaaaaaaaaaaaaaaagaaaagaaaaggagtgatcaatgagatgggaagaaaaacaaaagtgtgtggtgtcctcaaaaactgacgttctattttcaaaacctacattttgggtctccttttactatatcctgactttctagctatataaccaaaaggagaaagcagtaatttttttagatataacatgttaataactctaagggtattcaatgaatctgaataattcagtggtataatgtgaaaaaatatagtattcataggaaaaggaacagaagttagctcaggaaatgacttgaatgaacaccgaagccaaatctccagcgcaggtccacgtattatttgtctcagtggttgaattagcagcaagattccttagtaggatgaaaaaagatgttgtgagcatctgtatctacatgactgaattaaattcctccaacaatgaaatgtagttaacgtagtatctcgaaaagaaccctaagtggaattcagggaacctaaattccaaccatggttttgctgctgactgattgcattcacttcaaatctatcattaacctccttgtgcctcattatcctcatttcaccaaataagaaaaatgaaatattcctccttccctacctcactaggatgttgtggatttaaatgtgtgagaagtgcttgagatgcataaaatttgatggagtgttttattcatgaattcaaggcatctgaagtaatttgaccatgatggacagttgcttccttgcacattttttagagtgacatttccgttactgacccacccatttatgcaacatgttgcctaatctaaatttaggtcaaaacaaattgaccttataggtaagcattatatctattaatattgtatttttgtattattttataatattcatcattcacctattttctcatgcaatatatgttactgaacacatatagattaaaaagccttcatccctaaataacaatgatgggaccttccatttttatatccctctggcatttaaaatgtgcttttatagccatcatctccattgatctctcagtcccttgaggttgatatgacagatatgctttttccattttaaaattacggaactgacagtctcagatgactttaccctccaactactgtgtgaagaagcagggtctggcactgaggtcttctgacatccagtgtagagcactatacttcacaatatggccattggcttactttattacaagcactaaatattttccactgaatacgtaatacctagaggagaatgtcgtgtaaaacagcagcagtagaacagaggattaaatgacccattttcttgaagttatcttagttttaaagggttttttcttcatcactaatgaccatccctgactaagaaattattctcataatacatgataatatctgcgttttccaatgcgacaagaatgttaggatgtctatacatgatcttgacaatccctagctccatcacaatgtgtccaaattcattttatttggctagacaggcatgtagtcttactttcaatggttggctctgctggatgctatgtgatctagaacctgtcacttaccccttctaaacttcaggaattttttatccttaagataacaagaaaactcgtacctgtttcaaagagctgtttgttcaatcacctatccattgattatcttctatatgccaaatgtttttctaggtgctgaattacaggaatgaatcagaagcaaaaagttcttactctcaaggatcttatatgctaatgaaatagatgttaaaaaataacaatttttgtttcattttattttattttattttgttgagacagagtctcactctgtcacccaggctggagtgcagtggcacagtctctgctcactgcaacctctgcctcccgggttcaaatgattctcctgcctcagcctaccgagtagctgggattacaggcatgcgccaccatgcctggctaatttttgtatttttagtagagatggggtttcaccatattggccaggctgttctcgagctcctgacctcaggtgatctgccctccacggcctcccaaagtgctgggattacgggcatgagccagcgcacctggcattaaaaagtaataacaatttttaaatatcaatatgtcttatacagaaaagtgagcagtgtggtagagtgtaactggaatgtgagttgagacataacaccagacagagaagccagagaaggacttttgtttgaggaaatgacatttgaaaaggaacctgaatagtgacagaggcagatacctaaagaatatgttccagacaaaggaaacaaaaagcgtgcaattgcatagtcaacttagcctacttgaggaaaagtgtgagtggattttggtgatggagaggtaagtgccaggagatgaagggagagatctggcatgcatcagatgatgtgcagtcttccgggacgttgtaaagagttgggctttttttgtttataaattaaatgttaagccattggggtttttaaccagaggagttatgtgatatgatctatagttaaattatgtttgttcttggatggagtgtgcattatgggaatttatacagaaacaagatttcacatatatatatatataaaactcagtgtcaatagaaaataataaaaacaaattttatccattgataattctggcattgatagtagtgggtatggtggtaataattgtgtgtaacactcaaactttctgaaaacctacacttgatctgtaaatccaaaagtatatgtagcaaaagccataatctgctcttatttctgcaccacttgcaccagtgtggagtgataaggcaaattattcaggcacctgtgtaagccttcagtgtcctcacccccttgttataactctccactaatattacattggtaaagacgtccctgacctatatgtcactgagacctcaaagaaaagagcaaagctaaagcgtaagggggaaaaaagccagcttaaaaagacttaaaggtttctgggaccaaaaaaaaaaaaaaaaagtctttgaaaaatgagaaaggaaggatagaagaaaagattctcctttggtcaatctggccaacctttggaaataaaaagtattgtgttgcagctaataactatttgtcactgcaggcacttgctgatgtctgccctttaaaatgacccaaactcgttggcctcgaaatcagaagccaaggaaaaaatcttggacataatgttttctgtagaattaccaattttctctctctctctctctctctctctctccctccctctctctctctctctccatatctatatatatatagatgtatatatattttttctgtaggaactaccaattcctatctatagggactgattgagaagtcccttatagcagtttttctttggcttttaggatgcaatgattattggtgagaataactctttcatttcacatttgtcattggcttatttgaatgtaatcctgattcaatcgttatgatctcctttaagtaggaagagaagctggtattacattgtaggattttaattttgtactcatgaaacttttgaaaaacattactcatactcttctgactgtcaaattggcctctaagaggtccacatctcaagaggtatcaagcattggtaactattttttggtgttgttttctcatcataaaatgtacttttattaggtgactttggaaattttattgaatcaatgcatgacactgcctcattctagtaatctgatgaagcaaagctgaaaaacaaaatttgaggattgtcagtatatatacttttatttgcagtcaagagttatgctgcaaaaatggtttattgaagtaacaaaattttagctgatatattaatctgaaagatacagtatacatttttagtatggaaaagatgaggaaaaggaggttctctttcctctaggtatctagagcaaactgtaactgtccttggtatttaatttttggctaaggtactgagattagaggtggggccttagatatgattaattgtcagactgataagctagatatttcattgagtttctgttgtgctctttctttcagatcctctgttcgatgctttgttataaagatttgggcatttcaaaatcttctccatatctggtgtctttccaaacagcaggtcatagactttacacaaagaggaacgacacaggttataagtagaagtgttttaaaccctgagttcctatttcagttttgctttcttaaacatattttccttatgtgataaatgcgagtgttgaatggtgataaataccacccataggctttaaagcctaaatgttgaatttgacactgagagtttaaaggcatcatgaaaatttctccagaactaatgttcaagcaatttaggttttacaggcaactcaatagttttgaatgatgtagttattttgaaaaagtcaccataaaacgctatgtttagggaattggtactttgcatttatcagaagattgtaaatgtcaatcgattggcttgctatttggaatataattttttaaattatagttcaaatcattaggatttaattcatgattttgtactacaaactaaatctatgaaaaatatcagatatttattttaaattagaggcatgtaaaggaaaatataaattttgaaatgccattttactggatttttctcttcagcccaccctaggcatttgttacataaaatatttctgaggaagtcttccactgattttgtaaacaaacatgttttattgaacagttctttgttgactagattaacattgaccattgtatgcaatgcattctcaaaatcttagaagctggttttctttttaatcatataattttacttgttttacagtgaaattaatgcatgtaaaaagtatacctatatagaaagttaaaagaatattgctaactagttactatacttccaaattgcctattttctgtgtcttgcattggacagtagtgattacctctaaaagaaaatggatggtctttgtttcattgaagggatggataatggacataactggcattcttgagcaatgcaattgcaaatacatgtctttgcatttatggtccaatcatcttcttactatgatagcatataattgaaggttcaaataaatgcctcgtcccttcctgtggcatattaaagagaaagaaaaattagaaatactttcaaagctacctcacatactaatggtagagttgtttgagtatttaggtgatttaacaaagctgatgtattttattatgcttgatcattgaggaaaatttatttatcggaatgcttttgagagcatatatattgtcagagataaacacagctggatattaaagaggtaaaaacagattttattcaatacctcgtgaaattaggggagagctgagatccattctaatttgtgcagaggcgacttggttgttttaaggcaagaaggagggagaaggagtgggggttcattcgagttagagaagtaaaaaagtacaaagggctggacagtgtaaatgtgattaggccagctgtgttagctggaagttattgaagttaggattctatcttcccacagagaacaggagacagaggacttatccttcttgatgatgtcatttgaaaagaatggctttcaggtccttgagtgagagacacttctgatttccaagagctacatgttcacaattgtaagcccttttgagtaaatgttctaagaaacggaggtaagagtcctatcaacagatgtgtgttggctagaacaaacattaaattttcctggcagcactgagctttctcaagcaggcacttaagggaaggctagggtcatcctagggacatggccttctggggctagaaaccatactagagtttagtcaagtcttagtgcaagggtttggacagagttgttaagtgctgagagttctgtatttctcactgtcacaaaggaagatcagaagctcctgatacttttttcatcagtacaattgaatatataaatcctatacacaaaaataaactaagcttatacaagcatattggtcaaggaatgttgctggccttattaattagatagcccagttaaaagaagaattttttaatataattaatgttaaagtaggatgatagtatataaaacgtgtctactgtcctgaatacaaactaaactgtttggtttagcatttacctcaagatctcttaatatcccccaaagggtccctaaaaccacaacttatctttgtgctcatgaagtagagaagagacagttaatagacatttctagctgatagactgttgtagagcagagaacgctctgtgtttttgaaaattaaacatatgaatttgcccctcttcccctattaaggaagaagagtttcttaattgtgcgaacacatcaagtgaactattcaattagatttttgtgacccagggtataaacatctggttaaggttacatatttcaaaggaacaaaacactagaaactcttggttttaaatctcatggctggaggataatttgcagcagagatttatctggcaagcatacagaattgctgagactgttctaaagatgtaagtgtgggtgtttgtgtcgtgaaaatagctgtttacatctattaagtggataccgatggttgaaagtgccgtctatgtcaagtttttaccaaatcaacttttgcctcactgtgtcagaccattttacctaatcaacttggactgctaatgtcctttcccctggcaccactatctgtctcttttgcaaagcacagaaacggcatgcatgattgtagtttataaaacacatgtaccaatgtggtctacagcttctgttgagttcgagagggtcagtttctgtaatctcttctggcacagagtcaagaacagcttcactttcctcctgctacctctctacccgtaagtgtgaacccatcactttgctaacactcaggaaggggattacacaaaatagagcaggagccctctgacctgaatatgcatctgagccctagccatagagcttctgattcagtagatctgggatggggcctaaatatttgcatttttaagtgtataagtgatgctgatgctgctggttccaggaccacattttaagaaatatcgataaaggtggagaattaaactgcagctcagaagacctgagttcttgccccagcttgacttttacaatctagcaaatggataaaactcgcaggacttcagttctcttcatctacacagtgagtggttagattggctttgtaatttaaaattaaacagggtttgattctgattcactacacaaggttccaaagaaggaatgatatctcctttcatttcttcactttgtcttctgtccctaggtaatcttatctatgttcctgatttaacctaactaatgtttctgcaaagcttctaatatttacatctccagccctgaaactctcatttgaatgctagtcttatatacatacccccctgcctaattgacatctccacttaaatgtatcagaggcaactcagactcaacaaggaccaaactgaatgttcgaccttgtccttcaaacccgatacacatccaggttcctccatcccagtgaatgacactatccagttaagcaagccaaaagtctggattttttttcctcactcttcctcactgtccgtcaactaccattattaaatctgtcacctggtcctactgatttaaccttctcaatatctctacagtttttctttatgcccattagtatcctagtgcaagctaccatcgtctctcattggaattaacacagtaacccccctacccaccagactgttctgcctacagatagtgtgatatttaataaatataaatctagccttggctagatttctccttcaaaaggttcacattaattttagccttaaaatggtgtgcaaagctttgcatagtctgtcctttgctatgttggcagtattttttactatccctctcatctgctcattctctgtactccaactacactaactttgtttttttttttttttagatttctctaactacagtgctgtaatctctttttcctttgcacgtactattccgtttgtcagggaatctgctcactgtctccacccactccacacactcacgttttcctgcccgtcttaccggtcttgatcggttgtcacttgctcaggaaggtttccctggtcaccccctccacaaattgaattaagtcctcttgctgcatgctgtcctagtgctctttattttcctctcctcatccttaattcagtttgtaattacatgttatttgtgtgaggatttgattattatctgtgtcacccactagatattgggcattctttacttactcaccactgaattcatagaaccacagtaattgtacacaacaaatattcaagagaaatttattgaattgatgaatgaaaagttgtaccttaacatgttcctgacatgtatccaaaaaagagctcccctttggggtctattaggactttggacctaggtaaacgtaaccctagtttcgctcaggtttaaacagtagaaagtaattgggtctcttttgcatgtggctttcctaagggctaaccctgtcttcggaatgagtcaatacagcagagctgttgaaagcagactctagcttcggacaacgttggtccgaatcatggttccgtcatttcttagctgtgtgatttagaataaattaatgttttaaagctttgatttcctcttccttaatctggagatgctaataaagccaacttcgtagaggtattgcgatgagtaaataagcataatttgctgtaaacaccttgcagattgcctgttgtatgctaactaatcaataaattgaagctcttaacatcattatattagatatttccagcattgagtatactatcaggcatgtggtagaagctcaatataaagttttgttaaattgaatagattccatatatggtatttctacagcattatgctccttatttaagtgtctctaagtattttttaagtatcacctcacaaaagacagatgtttaattcattacacatgtgaattgttttagatagaaaataaaataaaaaattcaaacattgaaatcaatagtgtaccttaccttaggattacaccataaaatttctaccaatcgagaataaagtgtacagtctatttcctttctaatacttttaacgcaacaaatgtttattgaacacttactacttctaatctatgacagacataaagatgaataaagcatgccacaatgtttaaaggagctcactatatcataagaaagcggattcacacagacaactctataagataaagtggtaaatttaggctggcctgtgaaacaaaggattataggtatagttaagaggtggaatttattttacttcgaggatttcagttacctttatattctttgtctaacctttcatgtttctctttcttcagaaacagagcacctttttcctgacacattcatttccccctatggagtagagcagttgttttcaaagtgtgggtcccagatcagcatcacggggatggttagaaatgcccattcttgagcctcacaacagacctactgaaacagaaattcttggagagtggagcccgcagatctgtgatcaagccctgtaggcaattctaacgcacactcaagttaaagaaccacgggaagaaaggtccatcctgtaacaagacagatttttttcattagcatcaattttgatcatttatatatatatatatatatatatatatatatatatatatatgcatgctcacaaaaccattcaccttactaggttttagtattccccttcctgtattcatgtggtatgtatgtatacaagatgaacacacatttacctgagacaaggtaagactacacatgtctcatttggggaccagaggctgtaatcttactcaaggtcaaagcgtcttcactgctttctttcactgcttttcaaaagtaaaatttccatgtaggtgtcatttgttttctttttgtgttttagaaaaccgattaaggggtgaagtctggctaaacttagtgtcaggacatttacttagataaaattattttaatttatcttgtaatgttcaatgtgagaagaaaagtccttatgagtagtgtattccttaaataacaacaatttaaaaactaccactgaagtctgtcagagtagttttgcctcatttgtctagataagagaaaaaaggttcacattagggattgcaatttgtctgccaaagtgcagtttatttattcagaaacatttagagaggaatgtgtcagttctgttgcaggcactgtgctgtgacggggagctcaagatgatctcaaaaaatttcacagatggggtgggcagggggcacagagagatgtatttagtggttcagatactatttagactgtggccagcatttctctaaatgcaatccagataacaccttacagaatcatctgggcagcttgataaaagctgtagactcctacccttcatcccaaacctattgaatcagtgtctgtgtgtgaagacctagattgtgactggtaattataccaaagtcttagaagcaactctaggccagtaatactcacatcagaatcagctggagggtttgctataccacagattgctaggttagccttcagagttgctggtccagtaactttggtgcaggtccagattttgcatttccagcaagttaccaggtgatactgatgctgctggccttgatcgtgctttgaaaaccactgctttagctacgctataggaaaaaccatataaggcttttatactggccaatgacttcacaggcctgaattttagaaagcccccttctgcagcttggcctatagattcgaaggaaacagaactaacacaagaaagctagttaggagctagttaaaaatcatcctgacttgccaaggaaaggtgctgaagacctgggtcacagagcaaatgcaaaacactaggactttgtccctagttcaccattaaatcaacttattttctcttaccccctcatattcacgtttactccttactttgtagtggttggacaaaaatcaaataaatctgagaattctaaaatgcacacccttgtttattttctaactcaaatatgccactgttgtctgtgctctgtcaagatttcaacacatctttttctcctgtttgcttttccttttggcatatagtgagtgtgtgtatacacacacacacacacacattttttttgactccttccaatgcccttctgctctccgcagatacacttctgcattctgaataaaaccgaatacatatatatatatatatatatatatatatatatatatatatatatgcacacatattttgaaaaccttatttgaaaagaaagctttcggaggaaacgttatttagccacttaatcgagtcttttactgagggactttttgtcgtcccctaacttcctgtcagcagtccacaggcagcaggaataatgtgggagaagatcaacaggcttatttcaggaggtcaggggccagtgccaccacctgcaggtggagacatcagaagcaggaagcagcccaccagctgcagggagaactccccacagagcctaaccaagatgaagggacttgtaaatttcaaccctcccttttggcttttgtgctaaaaatgtgaatattgaggtctgccctgattaagaactagatacattcctctttgtgactgccacacttccttagcgtattcattttttgtctttcgatctcaagttattattttcaaatgcattgcacgtatctaccatggataccattgcaattggaaggagcaaacgttttgtatgtttacttgacaaagagaagtgactgcccaagccacacagagttctgcacaaatcagtaacttctaacgaacgtttgcacttccgggcttgttctctacctatttcagtcgatgcatttgtattatttacttcaaactccaatactaataatgcctcaatcaggttgcaattgggatttgagcagccagaatttcagaaatttggtttggtccatatctgtgacaggtcagtaaatcagagaagcaagggtttggttgctattataatacattgcttacctatcaatttagttatcagccaaggtggttgttatcatccaaagtggctcattaaccaccttggagactcagtatacaattgcaagtaaccctggaagttgtaaataatcccaactgaatttgtatgagtttggtaaggttaagtggaaaccagctgcttagggccttgattataaatgaagttaggagtggaagaagtaacaaaaccccaggcaaattcattaaacattttttcccttcaactttatgctcacgaatgtgttgagactcttctgaatccataaaacacctttcagcatcatctgggcagcttgataaaggctgtagactgcctgcccttcatcccaaacctactgaatcagtgtctgtgtgtgaagacctagattctgactggtagttataccaaagtcttagaagcaactctaggccagtagtactcacgtcagaatcagctggagggtttgctataccacagattgctaggctagccttcaaagttgctggtccagtaactttggtgcaggtccagaatttgcatttctagcaagttaccaggtgatgctgatgctgctggccttgatcatgctgtgaaaaccactgctttagctaggctataagaaaccatataacatggacaaggcaaatgaaaaggttggaattcttctgaatcccaacacatttgtgagcataaagtcgaagggaaaatgattcttctgaatccagacacatttgtttaaggataaactgttttttccttctgaaaatttaatgtctgattctcgttcattcattcatcaaaagttatcaactatcaactataggtaggaactgtgcaatatgctggtgataaagagatgaaagacacagcccctcccttcaaccagctcctagttgaggtggcaagtcagctgtataatcaagtaattgcaagactgtgcactgaaaagggtgaccacagggtgtgatggccacccagggctgtggaatcagtcccaaaatgaagaatgaaagcagggaagggtaattcagaaagaagaaacagttcgcataaagacccatagataaacatcaatcagatgtggttaagacaaaagtaagtttctggaggctgaggaccttctcagctatatgtttgcagtgcttggtatagggctttatgcatctacatggaagacagaaagggccacatcacagtggacaaggcaaatgagaaggaggcagtatcagaagatgagggtacaccggagatcctagttatatatgggcattgtgttcatctcaggagttactgagtaatgggaccttgactcaaatgaatctcaagtctgtttttgcctaatcttggttttaggactaggattagcatacaaccgcactaggagcctagttatacgaaaggctgcattgcggacctgatacagttcaatatacatactgtcaccttgcaaatagggttacgttagttctcaagactgccaatcctctgtgctctaatccttttggcttttttttttttttttttaactgtctcactctgtcatccaggtgaagtgccctgggatgatctaagctcactgaaacctccgcgtcccaggttcaggtgattctcatgccacagcctcccaagtagctgggattacaggtgctctggcgccaccaggccctgctaagttttgcatttttagtagagacagggtttcaccatgttgcccagactgatctcaaacgcctgacctcaagtgatctgcccgctttcctttggcttttaacactatagagcaagggtccccagccctggggccacagaccagtacaggtcagtgacctgttaggaaccggggccccacatcaggaggtgagctgcagggccgccagcattaccacttgagctccaccttctatcagctcagcagcggtattagattctcataggatcacgaaccctattgtgaactgtccacacgagggatctaggttgtgtgctccttatgagaatctaatgcctgaagatctgaggtgcaacagttttatccccaaaccatcgcctcccacgcacctctccccacaaccccacccgcccctgatccatggaaaaattgtcttcctctaaaccagtctctggtgccgaaaaggttggggattgctgctatagggcgatggttttcacatttgatcctgcatcaaaatttccaggtgactcattaaaatactgattgctgtgccccactcgtaggagttctgataaggtagctgtggggtgagacctgagaatttacttttctaataagttcccaggtcatgctgatattgctttgataaccaaagcaatatcagctttggttatcaatatataaccaaagccacatagagggggagaagttccttgggtttagcccagtgtttactgcgaccaccaaaattgctggagcttaaccatggctcagagagttatgttctgttcactctgtaggctgctattccctgtcaccttttgaactatgatggaggggaagagctgccagctcaggagatttcacttttttctctgcataattgaaaatccagaaacacagggttttgggaaagctatagaacagatcatcagtgatcagtgtttaataaagtaaagcaataaactttactgtgtaaaataggatactttattatataaattttgtccccttcccccacctcacaggccaataaaataatatacttcttgtccctgggtgtaatgttattggaaacctttgaatgtaggagaggcatgggcttgtaagttgcagaaaactgctagcctaggattgagaatttcatggataatccaaaaatagatgattttacagttataagccttacgtgaacttgaggtaagaaaacacaatgcctttatagtcttctcagttgctccacatgccctctgagattctgttctgcccagcctctctggttgtcacatctctgggcattaacagaaagttcacatactctttgtctctgatgataatccttctaggtccatatagaagatccctatccaaaccatcccccaaacaaacctattggttaaatattttctccaccgaaggcactttcttagattctaagtgccctgtaggcaggcttcctctctgatttgggagagtacaaattgcgacaaggttaaatcatagcctgggaatttgacctaaaattcactcttctcccatatgcattcatgaaccttctgctggtttttaaaagaagctacttaatgtcagctcgaagaggttggaaggggttaaaaacatgagcatggcagtaagaagatttatgaaggatctgagaagattatgacttgatcagatggtattttgtcagctagccacatttgtgaagacttgaaaactagggaggcttgtccttctaagagggggcactgctgggacctggattctgtggaaccgtattagtagaataaacaataacctttgcttgtatcaaatgaacttctattctcatgtgtcttttgacatatttttattaatcatatcactgggacctccttgctgaaagatatctccgttccccattctgatgactcccaactaggagtgagatcaaatgaagatggcatggaccatttctccatgtgacagctctctgtggttgccttttaacacttctaatgccctttctcttaagaattcccatttgtcgtctggcactggtgctgtgatcaataaaaatgtaatggagtgaggcttagaaacatgaggaaatttactcaagctatccatttattgatgtgtccatttgtgttgtcagggaagaaaaactttttcactcccctcttaggttcattacttggggggctgcaaattaaactgacgacagatagattggcaatagaaaagacaaagtttattcagagaagtatgtgggagctcacagaaaacatagctcaatgaagttagaatttggggcttatgtactattttaacaagggttttgaaaagaagagtgttagaatttcaagccacaaagttggtgggaaatatgaaagaaactaatgaaaggtaatgtttgttttagtaaagtctgtttatgtaattttcttttcccagcgacaacttctcatctctggtgacaggagtcactctttacccctggtgcaagaaactttccttaaaggaggatttaaaacagttgaattatttcagaaatctttgcttttaggcagatagggggagtacagaaaaagccccttcccgtatctgttgatcctcaaatggctttagctcaaaacaatttttacatcacgatggcataatgtagatctcttcaatgtgttcatttattccacagatatttgtgaagtacatgatatatgccaggtacttgggatacaagaatacataagtatgtccctagtctcgtagaacttacactctagtagtgagctagagaataaatgatattatttattatatgcatacacatatgatttcagatagtgatccatattggaaataaagctggttaagggaatagaaaatgatattgaaggtggacttgtttagattgggtggattggcatggcttctctagggggcagtatttgagcagatatgagagcagatattctccaatttgggcaaaaacattccaggcagaggaaacaagggcaagggcactgagttcaaaagagacttgacctagccaacaaatagcaaggattccagtgtaagagaaggtggggaaggaaggaggtgcaagtataggcaagggcaagatcacacgggatcttgcaggccgtgataaaagaatttaactctttcataattttgacaggacatcattgaagaatttagaaaaatagagtggagatacctgatctgctttcttcaaagagttcattcatcattgctgagtagaggttagactgaaatggaagcaatagtgaatacagggagatagcacaggaagccacgttactagtccacatcagaggtggttcagactagggtggagtggtggggtcagttagagagctggtatttaggatacattttaaagacaaagctgacaggatttgctgtgatgaattagatgtaaagtatgagaataattgagaattatttctaagttctttgctggggaaaagtggaggaggaaaaagttagggtacaaggtgtgatgaaatcaagagtctctcttattatcagagtctcattagatatccaagtggaaatgctggaaagaaagttgggtagatcagtctgaagctgaagacagatactgtgactggaataataacgtaagagttggccggacacagtggctcactcctataatcccagcactttgggaggccaggataggagaattacttgagcccaggagtccaagaccagcctgggtaacacagcgagacctcgcctctacacacacacacgcgcgcaaaaattaatcgggtgtggtggcacatgcctgtagtcccagatactcaggaggccgaggctgaaggatcacttgagcctgggaagtcaaggctgcagtgagccgtgatcacaccgctgcactccagcctgggcaacagagtgagaccctgtctcaaaataaataaataaataatgtggcagtcataggcccttagatggtttttaaagacatgggactggatgaagtcttctaggaggagagtttgggaaaagagcccgagaattgactgcacctttcaaaacaggaggaagaaaaaaaatactcaaaggagacaaaagcaacttctgtgatttatagagaaaaccaggcaagtgggatgaagaaagtccttcatgatagaatcaaaaacagtgtcaaatgttgaaaatacaattagacaaacacaaaagaatagaccattgggttttgcaatatggagctcatacttgaccttgataaaagacattttcactggaagcatgcatcaaaaaactatttgtggtaggttaaaatgtagtaggaggtgaggatatacagacagtggctttcactgtgcagatactgctgctcatgcactaattaaaagacatttgttgagtatctactatgttgtatccattgctaaatagtaacagctgggtttagtcaggtagaacagcatcaaaatcattatagtatcccaagataggtacagtaaaatctgtgaaggaatcagagtagtctcttctccaacagagcgtaagacccagcttcacggagaaggtggtagattagctcatctgggaggctgagtagaagcttgtcattatagagggagaacatcagaagtgtggacaacagcttgaataaccttgaaaggacaaaagaggacggtctgccctggaaatattaagaagtctcacatgattagacacaagatattaggggaaaggcataaggtgaattgagtcaatgaggtcaaagagaagctagctggaggaacaggcgatcataaaatgagtaaaagtatatattcaaagattctttttagaagggctacacaggatggataaggggagagagagagttgaggcacagagacaaattggaaaggtgcaatcataaccagagacatgaaaaacccatagaaatctgatgtagattatgtggtccccaaggttgaacaattaagtacgctttcagttgttatgcccatgatattaacatattttataactgcaataagtgctgaagctaaagataaatacaaacaatgtaattcttattctgtgagaaaatgttgtagctggaagttaaacatgtttcttagctaaagaaaaatattgtgtgatctggattacttaatgttataatttagcaacaaaatgttgacattgagccttgcataatcaaaaaagtagtctattcaataaccacattctcagaaaaaaaacaagaaaatattagaaacaatgataaattatcgtagtaatttaattcagtattctattgttttatttggatttaggaaaggcagaaatgttgaaatattaatatatatccctgtaataatataatttgtgtctgagaggtaggaatgagggcatgaggtcaaagtttgataatgaacttcaaagctataactatgatcaggaaattaaaattggacaataaattcctagaatcgtcaggagttgcttgtgaaatcgagaaaggaaaggatatacacaaaaataaagaacagccaatgctctcaaaggagtctaacttttataatagtcttctgtgttagagctgaactcttctggtttagaaggacactctgttgcctggaaatagggcatggaaaaagtcatcagagtcatgtcatctttcattcttcccatgaacgaaatcgaggccctgaaaagtcacctgtgtttgctgtattttattgcaactaagatgtgcatttttaaattgatacataataattgtacatatttgtgggatacatgtgatattttgatgcatgcataccatgtgtaattatcaaataaggatatttctgtatccgtcacctcaaacatttaccattgctttgtgttgggaacatttcacgtattttattatagctattttgaaatacaaaatagattgtcattaactatagtcaccctactggatgcaccttgtttttaatatttctgaaaacagatacgtctcataggtgatggtgtcacagctgtgcattagttattattgcctgtgcaggtgcaaacgtaactattcatattgttgtcaattaattaaatagttacatttatttatatgcgtttattatactaataaacacaatattgagatagttgagctctagttttgactctgctgttaactagctgcgttactttaatttacttaactaatttggctttcaaattcctgataagtaaaattacaacatgagtttctcctgctataatagcctgagaaatcggtgaaacacatgaattcagatgttgatgctatttaatagcgggattccagatatctacttgccattatgggagggagagaggaggtggactggaggctgtgatttccctaggaggttgttaaaattggccaggtgaggaaagctgagacagaccataaatatgaagcatgatacctagccctcagtgttgaaagaaaatcaaatctcatctttgtggtctaaatatcagtatgatacaatcctctgtgtagacatatcctctgccctattgttttctttctaaaagctaaagcccaggtgtgatcacatccctccgttatttacaaatttctgatgatgatgattcttctaatatctacattccttaccattaccatgatgtccaaaacctattataatctattcgtctccaagtgccatgttgtggtcaccctatgcaccctctaaacccaccatatgaccttcccgctgctacttgaatacagttggccctctacctcgttgtgtctttgcattgcctatttaattgcctttccattctctaaatcactctttcgctggaccagcaacatcagcaccatctgggaattcattagaaatatagatcctcaggcctcatctcagacctgcttgatcagaaacattggagagtggagatgagcagcctgtatttttatcagccctctaggtaatttgatgcacactaaagtttgagaaccactggtctagagcattcttctttaactctcttctaaaaattattagaatgaattcgagggacgggatctccttgaaagccaagaacatttctttgtcatctttctgacttcagggcgtagtacactttttggcccataattaaagctcgataaatgcattctatgccaataaatcagctaatcaaatatattattcatgcccttgaggtatctgaaatttgtttgcagaatgtaatatataactatagagtaacaagagaataatttattgccatagataataaaacaatatcctctgtataataaatcctagcctctgctcaatgggcaaaaacgggactggggtttcagattttaaaaagattattggtaattaaatcacctggagaagcacttgctgcagagatgggacttgaagcatcataataaactgttgtttattatgattcggtcagagctgatggaatcacagggattgtgtgaggtatggaaagtggttgacattgaattccaggctgcacagttgggacttgatatgataaccaaaaagaaagaatgtctggggtggtagcaagctctaaatttagacaatctaggcttatcctaaggagaatatagatacagataactgaagtttgattaaagggaacctggtgtatcacaaatagtaaaaagctgtagttagtctatgcagctatcagctagccacataatacttttgggcaaatacattataaaccaaaagaatgacatggcttatctctgtaacaaagtggctcattgttctttattctactgttatccttaagaaaaaaattttagtaaatttgttatgctatactcaacttcaagaagggatagcgcttataaaaaaattgtttaaagaaacaggcctatttctctttgggagaagccacggagaaacgaaaagaatggaacgtgtgtttctgcccagatggcaataaaatgtagggtaaatttctgtcttttaaaactgtattttttccatccctctgtatatacacatatcctaggactgttataaaatgctgcatgcgtatgtgaaaatggaaccttattgggctgtttgatggacctttaaaatatatttgttggtttggggtacatactagctatgcaatataatccgcattatttcttatgtaaacaatggataaactgtttcacagtccagacatttatttggtcactgtttgtagaatgtctattttatttacttctgaatttgtattccagagatctgccttcaatgttggatacttccactgtaatattctaggagatgctcactttctttttcagcatctgacacagtaccatctgcctcctcttttcttgccacaagtaataacaattttataaaggaggatcacattacagaattataggtggtaaactttctaccaccagatttacccaagaacctgaaacacattttttcaaaaggaaatagaatgtccttcttgtgactacatcggaattttgcttgcagcattatgctttttttttccccctagtgtagctagccatgtggaactgaagccattagccagctcctcatcctataaatgctattacctgggaaaagaggcagaaaatatactctcttctccagttagagtctaaaggaagagaacaatatgggtagttgtgtttaccacaaattgatagaactcctttattttaaatgctaaaaccaaataacttgtttatatgacttcaacattgactatcacacactgttgcatgataacagagtgaaaactacctctattggatttaagtggggaatctatgtctcattctcattctttttttactgtggaaactagttgattccaggatcagccttagctccaacttgccacactttgagttttggtttttcacttgcattgtcacaggaaacttctataggataaatcgaggaagattttactctgcaacgtgttgcagaattaaacatttaaagtggcaaaaccttcgtgtgtaggttgtctccccagagaatgtaaaaatgaattgaaggcagcacctaataggtaaacgacagccaatcaaacaagaacaaatgaaatttgactggcaaaatcaaattgaaaatgtataacgctgaatctcagaatataggaggatgcatagaaactaagctgtactattataaaagtcatagccattgaaaaataatgactggttaatttggttttctttacctcatggatgtgaatggttagattttgatgttggtgttatttgacgtgtgtttgtcaagaagttgccttagtcggctcgcatttaggataaaaaaaatattttaagaaatgtttaagagattatgttggagacattagaaacaaaataattatgcagagggcaggactatcaaaatataatagaaaaattacaccgctcttttatgatttcctcctttttggcatttaacacaaaactttatgattacacacaccacgcactccagaaatgcttaaaggaagatgagaggaaaattcaatagaagtagcaggcatttctgtgaggacagcagaatgatcacttcatctctgtattttttttttttcaaatttctgtatctgtacaatgtcttttccagctctaatattctgtgatttggtaatttccgcactcagattttctttaatgaattttgtatgatattacctatttttataccagatattacctggctctaatttctttttcaccctaggaaataaaagtatcgggtgaatttcccattttcttatgttattgatacaggtctctgttggatatccccacgattaactttcctgcagcatgttcgatggtggcttaaagaagaaaccatgtatcagagccccttgtctatatagacttttagataaagagaaatacatatcacagaattattctgggcgcatagagtctctaaatgcaaaaaaaaaattgtattgtagctgttgattcttctcagatagattgagtgtagagagagagcattccaaaaactgagcagaagaaacacagtctgaatcaaataacatgaaattttagctaacaagtaaataacacttttttcagaatatgcaaataatattggtttattatgaaaaatgtataggctgatagatgagcatagagaaaaaattataaatatcttctttaatatcactttccccagcaaaccacttttaacattttgatacattttcatgttcaaacatttcctaatagtcttttttcctgttatataaatatgaattttaaacattcgtatgtttatgaaaaggcaataagatactgctcttttataacaggctttctgaacttcacaacatgcagtgtattctaacatgctccttgtgttcttaactaataaaaaacctcacgttatttaaaaaaccatcttaaacataattatccattaagagaagaggttggggtagagagtttcagactatcaatatcaaagttatattttctgtaagtattttaatttttaagtgtagctataggtatatgattataaaaccaatagcagagaaaagataccacctttgaatatagttttccttggttccatgaaaatggcctcctttctttttgccagtccctcagtatcattaactcatttttctgtaaatgccatcattgtatcacatgtcctcaggaaaaggcacttttctcttttaagctagtgtttgttcttgttctaattttatggcaatttaacgagtaacaatcctgtttctataaatactgtttcctaattaatctattgcattctatccatgagaatttagatgactttctttgtaagagaaatctctgtagcatgagattcttctttgctcttaaatttcattctttcacatttttaaatgacctgatagtattttgttgtatttgtgctgattttttttaaccaatcttaccttgttgaacatgtaagttgtttctaatatttgcaatgatcaaaatgtggatccaacttcactaaagcgttaagaatctaaaacaaaacaaagaacaaaaagttggctgtcatcttgcttggaccaccccgtgagttactattttcttgtttccggtcacagttcatcctaaatcatttcagtacacaaaatgttttttaaagtttgggacagggggtagagaatgtcaattattcctccaaggcagtcatatgagcattgagtatcatgtggaatagttgttacttgtaaagttatggggcatcaaacccagtcaatatgtttctggaattgaaaaagtccctggacattctaatgatactgttgttcactttgcacctactgttaccactactttgatctgtcaacactgcccgtaatggttaattttgtgcatcaacttgactgggctacaaggtgcccagatatttggtcaaacattattctgggtgattctgtgcaagtgttatcagatgagattaacatttaaattggtagactgagtaaagtagattgcccttcctaatgtgagcagacttcatgtaattaattaaaggcctgaatagaagaaaaacactgaccctcccctgagcaaaagggaatcgttctgcccgactgccttcaaactgggacatgggctttttcctgccttcagactttaaccacaatattagctgttcttgtatctcaagtctgctctacttcgattggaactacactatcagctctctcgggtctccagcttgcttgttcaccctgtataccttgggagttgtcagtctccatagttgcctccataattgcatgagccaatttcttaccacatacaaacacacacagagacacacacacacacacacacacacacacacacacatataattatatatgtgtgtgtatacatattctcttattccttttgtttctctaaggaaccctaatatactccttattactctttctactgccttagagatcttcaaggccaagagcgtaatcctccatcctggctctttttcctaatcattaatgatcaactcatagccatttagctcaactaaaaataatttgttcatgaagctttacactcccacatactgaggaacgtggtacctaagatcaaacagtcactgcctcatcaaatgcattcctcttcaaccccatacaaatgtccccagatggaactcacaccataaaaatattagatcccattgacttttctgctttctcaaggatcattgcagagcttgaaaaagatggctcctccctttgcctaagcaggttaacttggtgtaaaagtacatgtaagatttggcacaaaggaaaataaatcagttttgcctgggtcctaagaaacatttccctctgcctcatggtaattgtacctgccagttgattgcattactcaagtggagaccatgaagtgaagtggtagaacaagaagaaatccctataattttattaagtatggtgaaaaatacagatatgtagagaaatgactgggattagatggagcaaaacataattcgagatcctgatacaaattgtacttcctggctcaagggagggagcagaacattccctgctacatgggaataataataaatgcctgataaaaatgcagatatatcatagactacagaagctgaagtggattcttatggtcccctactcagacagcctctccttcagatgaagaaactgaagcacagaaagctcatcctagtgtttcatattgaaaaacccattcaagtctattttaataacctgttaccaaaaatgagggaaataatttaactttaatgtttcactttgcattacccttttcctgactagacttctatccttttcttgagttgagctcattaactactatgaaattatggttatgggtagaggttaattttatacctgtccatcttctggcatcttatttacactaaaaatcatttttaaatggcttcattttaaaaaatattatttcagttgacattttaaaagacacatcatttatgtactacagaatatgcattttatactctcctttattaattttattattttccaggtagaccaatcaaatgaatcagaaattcttggttagatctattagacagcataagtatgtttttcatcattaaattaagatgaaaacacaattttactttaaagtgtttgacgtttccagcctttataaagtcaacacttaatcacatctgaaatttgcaggaaaaaattttgaaagccttcaattattaacattatttcgggagaaaaagccactttgccgcagaactttcacttttctctcgtgaattaagtctgatacaaattattcattatggtgaagtttaaacataatagagtctagctacttccacaaaaatactattcaatgagtttctacattgacatctaactgaccttgtaattaatgttgtacacgatccttttattatatgctggattatcaaatatgacttattagcagtataaagacacaaagttctgaaatgtaatttatagccatgaaaaggaactgagctttgtgtgacagttaaatttgaagagatcaggtgattattatgaagcatgaataataatgcatattaaactcacgtttttgtttaaatcattaatatgattgttttagaagaaagtctacctctatcatatgggcaataaaatgtgtataagagcaaacatttgtgtatgtgaaataactcaaattaaaaccagttttccacattaattcttacagtttttaaaatttaaatcatttaatgtatcacacatagctttattcattttaagctataaatgttacaatttctgtttaagctgttaatataagctttgtaagagcaattctgtataaatatagaattgtcattattcactaatagctaccatttatttagtgcttgttgagtgcaaaagtactgcactgagatctttgcatatgttctcttaatgttacaattcttacctgaggcatttctgtttctgctggaatatggtctctctgaattgaacaagggaggcatttttggttgttatgatgaaaggtggacactgctggcactaacgtgtgttggtaagcgactagactcttcatgatgcgtaaacagtgtttcctcatacccctgcacattcaaatagaggaaaaccttgtttatagttaatttcccctagaatgtaaatccatttaacatataaacacaaagcgtgttttgtgtggatgttttttactggagcagggagacaggagaggaaatgcagttttgatagttgctgaatttttcaagaatgcagcaattatagaacaatttctagaagtttcctaggagctcttttccatagcagaaaactaggacttaatagccttgcgactcatggtacttgagtgttccatacaactcacctatattcaggggacatttgaaaaattctacattaaaggggattcttaacataggcgcaagtgtctggcatcttcaataggtcttctggtgtggccatgaaaacattcacacgtttcaaagtattttaaaataaaataaaacatatattgttgtgttatgaattattttctttcttttttatatgatggttagatcactgtgcagacaagtttatgagatctattcatttcatttcagggtggtaaatgagggtgttactaaatgttggttctaaaaagggagacattgggtattacagaattcagaacagctctaagccctgtgcacatttagcattagaggacacaggcaaatctggcctccagtcctggcagcttcttcactatgtatatgatgttgggtgggttgctttacctctctagtttttacttttatttctaagctagggctattcatagttctttatcatgtggttactgtgaagtagcaaagcacctgacataattagagcagataaaatgctcaacaaatattgcttatcagaaggattatgtattacctcccgaaatacatcaaaaatatattttccaattcaaagaatatgtagtacaaaaatcatgcctaaattaacagagttgcagtagcccaaggagagaagataatcattattgatttcttcttcctttttgctaagcagttctctgtctctgcctcctcagttgttgtccatcccactcccccactcccaagccctgaactctgaggggtttgctgccgtggccggttctgtagtcattgctgtccaatgatgaaaacacaaaatactgcaacagaacactatgcctgtcagcttagctcccttctttctgctaaatgacactcaatcctattcttttgttctaaaggatatcctaaatgaatagccactggggggaaaaaaggttatataagattgtgcactgtgtgaaactgatgcaaccagatcaatgatgtgaatttctcttaactatttactgggatctagaaacaggtctctcaacttagcagtgtttacgaatataataggccttccttatacatacatctgaagccaatctgagtcaggaagagtcgtggtctgataaatattttgaaaacttgcatttgttctattaaagcaaactgtttattaatagtgtgccttattttttaaagcaaaacatttataaacagtagtcattacaggcacttcagtgtacggagtgatcaattgttagacctttaggaatcgattgtttcgtggagcttcggcttataattgaaatgtcatcagaaggagtgtaagacatagcttcaggagaggccatttatgcgcttttgttttcagctaagttatagagtcatcatgtgaagaaagattcttctcttagtaaaaatcctttaatggttggaataacacttgatatttaatatttctttctactttatatccacatttattcaagtgctaacgcgtgtggggcagcaatgaagcactttattccaacattatagttctcatatctgcgtatgattatttttcatttatcgttagcatatatataatgatgacttttaaagtacactgtattatattcactggaataatgattagctattaataatttgaacactatccaggaaattactgaacatgtcctacaagataaacctcgtatgatattgtctccaaataacagtgctaaccaagaagagtgctaccaagttcaaaagtaatcacagggagtaacctaaatgcagctccgttgggttaaaaatagtttctctaaattatatgttccctaagtttgagatcgatttctacaaggggataaaatgtttttataaattctcagtgataagtcatgtgattaagaacccccaactttttttccaaagacatttgcatctctgatcaaaataacaagatccagtcttagttataaattggggaattttcatcaaaataaggagctactcgttgcataagaagactagtacaacttaaagccaatttaatttcaatgaatgcatgatcagctccattgccaattgagtgtttttcttattcatcagaagatgggttcatcatcgtgtttcatatcaactgttctcaaaccatattgcccatttaaataaatatagatttgtctcgaaattctaaattcatgtcatatttcataaatagcctatggtcctatttattactttaaaatattatagatataatatttttattctaaagtaactgtgttatacaaccaaattattcatttaaatatgtgactttttaaataagtaaatgacttatttaagtaaagtcattaaaattttccagtctgtccttcatccacctgatctttgaatgagttaggaacaatacaggaaactaatacaaacttaattttgattacaaaagatgaaatcattctgttatttattcaacacactatgtgtcaataaaatcttatactgtgaaagaattcgtctaagtccatttgctgttgcttgtaacagaatacctgaaaatgggtaatttacaaagaaaaggagtttacttcttacagttacggaggctgagaagtccaaggttgaggggccacatctggtcagagccttctcccatccaagtactaaccaggtcgaacctcacttagcttccaagatcagataagagtgggcgcgtttaggctggtgtggctgtagacttgttagagcctttttgctcatggggacacagcagagccctgaggcagtgcaggacattacatggcaagaaggctgagtattctaatgtgttcatgtctctcttcctgttcttataaaatcatgaatcctactcccatgataacccattaacctattaatttatgaatggatgaatccattcataagggcagagccctcatgatgcaatcacctcttaaaggcacaatctcccggtgctgccacgttggggattaagtttccaacacatgaaatttgggggacacatttaaactatagcaaaattgtaataaaatgttatatagaagcaatgttcttactgattataattgttatattggtaaagtgttaagtcctctaaccaagggatatatttcagcttattataatagttttaaatttacaattcaatatgaataacatctggtaaaagttcttttcaagaaatgggaaaattagaaatgtttagaagaaaataattcaataaatattaagttcaaactggattcatagtttatgtgaaattctgggaaccaattgcaaggggagaaaatagttacaatagcaatggtgaggatgagaataagagcaggtatcaacgttaattgagggtgtgttatagttctaatcgtgctatgcccactacatgacttttccctgtgtgaggtttccgagcttcttcgtagtaatcctaaattgagctggagagaggctagggtaacttactcacgctcatagagccatagagtagtaaaacctgtatttgaactctggcctgtctgacatcattctgtggtcttttaaaccaccactgcttctccatattaaaactccaaatctaggtgaaaagaagaaaactcagaacatgttctgcaacaaaatataacaaaatataatgtatataaacacttatacataatatcactaatatctttactatgaaaagactctgatacgaacattttacataattcatgcagaagtgttaatcacattgtctgtgatgagctgtgtatgtatctgataaaattctggcaaccagacatcaactcgtaggcatagatctgtaacactaaatatttgcctcgagaaacttaaagaaataaagacaaatgaatgaataggaacatggaactgagtacaagataaaatcctcctaaagcaatcgatgtacttgctgctgcgttattgttctaagcaaaagaagcatggcgaagggagatgtgaagctaaaaacagaatgcttagaaggagatgatagcaggagggaagcaaagatgggaccaagctcccaaaaggcgggctttgaacaaacaaaacagaaagctaagcctttgacggatgcacgggatgcaagaaactttagtcaggaaagaggaggcgaagaaaaaccctccaaagaaaaggtgaacaatattttaataggcaaattgacagatagcaagagatatataccatgctatgttttctcattgcagctgaagacaaactggggttatttatgctttgaaaaagcgtaaatctaaaaaacaattgtggaggaagaagcgatgaaaacacgtgttaatacagaaaacatggctccaaggctttaaacttccttgtgagataaatgcatttacattttccgtagtagctaatatatatatatatacatatatatatatatatctgggaaaataatacacagtgattttctttctttttttcatctacttatgtgagaaaaaagtaggctatctgaaagcttttcagttaaatgaggaagaaagttaggtgatcttgtaaataatatatatgttcaagataatgtaaggcccttgtgtagttttcaaaacttatctttaatagcagtttcttctggggatggggtagttcaaagttgaaatgttagaaagatgttaactttttttcctttttacttctccctttcaggatggaattaacaaatttgattacaaatagatctcagagagaggcaaatgcattgaatccagaagtaacataaaattagatcatgtttagttatgcccgaggtcacatggtgataaaaatgaggataaactgaaattgtctgtgagccagattagtttattttatgccagtcctaggaaaaagacacatcatggtaggatacatcctttttttttttaattatactttaagttttagggtacatgtgcacagtgtgcaagttagttacatatgtatacctgtgccatgttggagtgctgcacccattaactcttcatttaacattaggtatatctcctaatgctgtccctcccccctccccccaccccacaacagttcccagggtgtgatgttccccttcctgtgtccatgtgttctcattgttccattcccacctaagagtgagaacatgcgctgtttggttttttgtccttgcgatagtttactgagaatgatgtattccagtttcatccatgtccctacaaaggacatgaactcatcattttttctggctgcatagtattccatggtgtatatgtgccacattttcttaatccagtctatcattgttggacatttgggttggttccaagtctttgctattgtgaatagagccgcaataaacatatgtgtgcacgtgtctttatagcagcatgatttatagtcctttgggtatatacccagtaatgggatggctgggtcaaatggtatttctagttctaggcccctgaggaatcgccacactgccttccacaatgaacagacacttctcaaaagaagacatttatgcagccaaaaaacacatgaaaaaatgctcaccatcactggccatcagagacatgcaaatcaaaaccacaatgagataccatctcacaccagttagaatggcaatcattaaaaagtcaggaaacaacaggtgctggagaggatggggagaaataggaacacttttacactgttggtgggattgtaaactagtacattcttaacatcaatttattcctaaaagcaatgttcatagggcacactgtaggccatagatttgcctcacaaatttaaaggcctaagccctcaacatgcacagcagtatactcagagactatttgtaaagatgacgattctggaactttttaatgaccccaatcattagcaatgattaaaattaatattcaacattctatatttaccaaggcaataaagtagactaatctattttaaaagggttttaaaatgaagagatgaaacaaaccaaatgattttgatttaaacttcatgaaaacataagttgcattaatcaggtgattttgttttatgagcattctgattgaagtgatcatatttagccccgggagaataagagaaggtaaagtatgggtatggcactgaatttactgagatgattatattgtttgagttaaagaacttgtattaagaaacaagtatgtgccaaacattgtgctaggagcaagcaatgctaaaattacatgggtagaaagagagaatgaaatatctagaatgagttagaaacatcagtgttttccaatgtggagccctgacttcacatgaaaattctcattttcaaacaaggtagtttatgaaaactggactattagcaagacagggtgggcatgccatcagtatagtacctggtgtaaaactagaaattttaatcatttgtgctttcattttataatcagtaaaatccaaggtaggacaaacttttactttttctgtataatggactgatatttgaattatacccaactttaattttttgccagaaattatgctttattgtttctctaaaatggtactatagatctttatttatttctatatatttatatgatttttacatatatgtgcatttacatgtatatacatccataaactatatacatatatacacataaattacaaatatgtgtacctacgtacatatatatgcatatatcacgcaaatacaggcacattttcaatacccctttttgatttttttccttgaagagcatagcatctgaatttattatggatttatttttaatttatggtcatgttctttgagtgcttttggtgtttatctggttgccccaaactcgctagcattgtaaagaagatgtgcaaagcctgaatctagactgactttcatattgactttattagtcaaaaaaagtagatgaaaatgtaacagtccgtgttaaaaatgggaataagacagatgttcaagccctagcttcagcagtttttagctgagatttactggaagaaaacattttctgaactgtaaaacatgcaaaatgcctacgtgacagacttcattaacattattaaatgctatgatatagtaaaagaatttgtaaactgtcaagtgctttgtcaacattaggaatttagttattataggtatttccatatacatgttgtatttagaattccctttaattttatacttagggttgatttgtattttaactaagtcactttatatatctggtcccattatacaagtatacttttccttaggataagaaagtgatctttatatatgtttatcaacccaaatgcccatcagtgatggactggataaagaaaaggtggcacatacacaccatggaatactatgaatccataaaaaagaacgagttcatgtcctttgaagggacatggataaagctggaagccatcatcctcagcaaactaacacaggaatggaaaaacagacaccgcattttctcactcataattgggagttgagcaatgagaacacatggacaccgggaggggaacatcacacaccgaggcctgtcgcgaggtggggggcaaggggagggagagcattaggacaaatacctaatgcatgcggggcttaaaacctaaatgacgggttcataggtgcagcaaaccactatggcacatgtgtacctatgtaacaaatctgcacgttctgcacatgtttcccagaacttaaaatttaaaaaactttaaaaaaagaactgtagatactgatccaaaaaaaatgttcattaatgggggttaaatgattatttctaagtagactactcttgaacccttgaatctttaagaattttctttgctattgaagccattcaaactctattttattaaagctgtcgttattctagtagattttaaacagtaatacctgaatacattagaaatatgcaaatctgcattacatatggcatctgcagagcagaggagtttggtcatctggactcatgctaaagtctccgaaaaatccgcttgtcttaatgatggttgactcgctaatgctatgcgtatatagtcttattttaagtgattgaatgatgtggctaataacccctctgttagatgcactcagaacctcacctacctgggtcctcagctctccagtgaaatctctactttaagtttattttctaacatggtaagagccttcagtttatgttatgctcaggcccgtcactgtgaataaaatattagaaatggactttttttttttgtatttttttaatggatcccttggaactttaaaaaaattatttatttgagctttctactgttatcacagtgtctcctaagcatggcctcccgttttttgttggtaatataattcttacgttattcaaattagtaaccattatttttctcatggctagaattctggaaactattaggaaatcactgagcataattgaatggctgtttatttgaagagctatgtcaaggcagcatagagttgtattttcttgcaggggctctggagtcaaagagcctgggttcaaaccttggctccaccactttctatctgtggggcattgggcgtgttacatttgtgaaacttttgtttctccatttgtaaagtgaggtttgggggatgattaaaccagataactcatgtgaaatatttaatggaaatgtatttggtaggggatttattatttttaaatttggattgcacatgacacatgtcagggatcatgctatgcattttggatagaaagatggctaagatatcatgcctgactcttaaaaacttacctaatggtaaatgacgagttaatgggtgcagcacaccaacatggcacatgtatacgtgtgtaactaacctgcatgttgtgcacatgaaccctaaaacttaaagtataataaaaaaaaaaacttataatcaactgtagtagaaagagatctgaatggcttgccatttagctaggcacatggtatatgtgcttaattcatactagcagccactacagttgtcatgattaataatgagcttccaactgcacagaatgcttttaatccatagaaaatcaaatcagaaacaagtttttgtaaaattaatgtgaaaggagcaacaattaaaatgcaagattgacatttattttctaaattggttctattttctttcacatttacaaaatttataagaaaattctttatttctatgtgatataaagaactagaatgtactttgatgtgaattattgttgccagtgctgttcaacttttatccataatttactaagcacctacatttagacaaaggcattatccatccctttggggaggatttcagatgattcatacacagacctggtctcgaggaatttaagattttctttggggagggaaataaggactttaaccaactcaagagtacttagagaattttctgaaaataattttatcaatgaaaacttgttatattaaaagaaactgtcattctgacttccacaaatctaggcttgaaactatggataacgagatattttctattactctcactcacgtcattttcacaaagtgaaaaggtacattttaactagtgaaagaatagaggaaatggaagtagctcgaggcagtggacgatgattcaaaaagacagggccctattatttgatcaagttatgcaacgactctgggcctgtttcttcacctctggaaggaggaataatctccaagccctttcagactcttttggtaattcacctccagcacatcttctaaatgccagcattaactgtcctctgatttgtctcatgtttttctagccccatgctctcctgttcgccatttaccctcatgcaaggtacaaattacacccatcatcacaagacacttgctcaagtcccattgcccccttgaagacctgccacacctactctctcaaaaaccatcatttcctgaaagtcctatacagctcatttggtatttacagtgtactgccacaagccactaagcatcgttttgtgaatacatgacttacagacttagcttgagtaaagatacttgaaaatgaacaccatttcttggctatcttcctattttgatgtacccttcaggcctatgaattttagtataatagataaccaataattatttcttggttctttcctgcacatctgaataaccctatgcaaagtgatagaatgtttttctataaggaggtcctacactggagattgtgtatttcttaatgctgttgaaggaagagatgtgtatctaaaataaatagactctaacaaacattaatttatatttctattatctgttttgtgtattgagatatctcacaaaaataactaaacattttggcattattgatattacatatttgccatgaatatttgtaaatgaagaaaaatatatatacatcagtaattatcttggcaaactcttcaattatgcaatattgttacatagattacatatctaagtgaacactggagttttaacaatattgtgtgttcataaatgttttatttattattgccactaattcttattgccatttcaagaactatgtataagttgttctaaaaactattaaagtataggtgaccatggtcactactgcctactttggtaaaggccaaatatgtgaagactttttaatgtgttaacaaacgttgaaggttttttaacctgttaacaatcagtaggactcttgaaattatttcctaagagagtaaattttacaacttgcaaagcatgattaacctcttgtaattataaaccatctcttgtagttatgtagcattttgttaatgagcaaagaaccattgtggttcctttttacatttcttaaaataattctccgtaacctcattgatatctccagtaaatttagataagcttttttttttaaaggagggttaaaatgacattttaaactaatttttcttgttagttatacagagttgaactatctgagggttttattgacagtcataaaaaatttgttattttctgtgaaatatagagaatttaattcattatcatattattaattctgtgggccattgtcttaattctagaggcacaagctgttttcatcccactgaaatagaggaatcaaagtatgttccttgctcaaagcacaaaagtgacatactacatagtatgcttcttgagtagtcgtaaatctcatgtgttaaattacatcccaaagatttcagtatgttttatgactttaataatttatggtaatttctaatctggcctttgttgacctgtcttgctttttaaatttttagtttttcgacaaaataattaacatattttaataatcttccaaaggtgtttaaaatggcattgtatagagatagctgaaggcttttgagcttctgtgttgtaaacactttcttaataaaacatgaattgctaccagatgatccagcaatcccactactgggcatttatccaaagaaaaggaaatcagtatctttgaagagatagctttgttcccatgtttactgcagcacttttcatactagccatgatatggaatcaacctaaacgtccatcagtggatgaattgaaaagaaaatgtggtatgaaacagaaattgctgctttaatttatattaaacacactcatattcttctcagctgttaagtattgagttatagatttaaagaattctattgtgaagactaaagtgactattaaagtaagaaattattttttccattatatttaacttatttcatactttaatgttagcgccaatgagcaagactattgaatacaaaaactaattaagtagtggtgatagtacagtatataagggagaacattcttttagaaaggaacaataacagggagcaatagaaacaatgaatgagtgtaaggtcacttagtgttaaaacagctaaaatatagtacaaataagttgcgttttaatagtgattttatataattacaccttgatgttttatttgttacaagaattgtccaggaagatttctctaaagaccaaaggcactcttcccctaaataactccaaagccagtcctgtgtttctataaaaaaaaaaaaaaaaaaaaaaaaaaaaaaaaagtgaaaataacgtgatgaacatttttgaggaagtataaaaccaaaatactccactgcatagctgtttctgcaggtattgtattgatatattacattattcagctttggagtctccacatccaatgttacatcatcactctaaattaaacatgtatagataaatgaaataaatgagatagcatatgaaaatctcatagcccagcccctgcactatttaaaatagaaataccaaagaattgtattcctcatctgaaagctatttagtggtggtgtttcaaataaaaattccatctactgctgttgcttccattgtatctttttctctgcggtactgaaagagaaagagacccagaaggggccttgtctgaagtgtccctcttttaagctgttgctgctttaagcacagggtggacaaatgtaataggagtttcataaaggtggaataaaccagcggattacggtgtgggtgaatactttcagatgttaaccaggagctctgcttgcatgctgggagttgcccatgcctcttctagattgaggcacattatcatgcacaacctaactccaagaaatcttttaaaccactggaaattgaacccagaacatgtctctaagccagccttttcatcctgacaccgaatcatagcatgagccagtctgtcagggatgctgctgctctctaggcaaattttaaatgttgaaataatgaatcatgttttcttgaaaaccatgtacaccaaagaaaagttagtcattttatagatgatgaatattaacattttcttagacaatctgataaattatcagatctcacttttggctctttttaagacagttatgcctcagaaatattaataaacccccaagcccttatactgatcagtatgttcactactagctatgagaaattcttgaagttcttgtaattattgtattatttccttactttcattttattagtatgtgaataatatttttaaaaattctagtgtatgtcttgtatatattttaacaacatgacttttaattaatgtcttgataacatttcttctagtgtatgttttcagtaacatgattattaactgtaactttaaaaacctgtggattagatgggaccattttaaaatgttttaaacctggaaaatctgatggctttaggtttagttcaagctatagatcacctgtggagaatggaactgccaaaaaaaaaaatagctgtagcagccctttgagtattctaaaatagggatgttatccagagcattggtttctaaagcttccattatttattgatgttgagctttcaggatttagctacaatatttactcaacatctaagccatgcttttttatcagtcatgttttatatcttttataatcaaactgcttatcactgaaaaaaatatataagtttctatgtatctggaagaattctctggtgtttcttagatatggattttgatgtgtggaataagaattcaattcaaggataacagagatgttgtcctgaaaaaaatcgaagaaaatcagcttttctttaacattctgtcaaagctcctgactattagtttatcagcactgttttgccaaaggtgtcttctcttctcttctttgaaaaaaatcatctgctgctgctacgccgcaagtgtgttcccgctgtgcctgagaagatgtgtggcataaaaaaatgggcatggcctgagttaaaagtgctacatttaagccagagctggcttatttattagttgtctaatcataggaaaatgacagagcatgcttttctcttgcaatatccgttgctgaaaattaaacacatgagcagagctttcagagaggttgactggcctctcagacagcacctcataggatggcctgtgttgaagcatctcctttaaccagggtctgtccctcagcattgggttggctcacctagattggattgtcccagcagaaaaaaaaaacccaaaattcagaatcatatccaaaccggaatactctttcattcacattacttgtactaccttttcagaaactggatacctgagtgtgtgagggtaacttagaaacttatctcatggttagaagttttagaattagagagcgatgatcatgaaacggacttcatgatcagaagcaatggagcaaggaatgagatgtctttgaggagtatttccctgaggctgtggataacgctgacgaataatccccaccttaaaagtgggttgaccactctagtagctgtaaggtgggagggttctttcttcagagataaatctgtgctcttcacttgcccatttcccaggttttcatgtaggtagaagaaacacctgtaatctgaagacactcttccttcagctttgttagtgacagggatttaaatatgtctttcacacattttccttagatagttaaatttcacttttcctgtttgtttttctctgaaggtattctaactcccctcctaatggacttctagagctttctaattctatgcaatttctgttgatttgttctggtaaactttgaaggtaatctctgattcaacttcttggagattctatcatgtcatctctgtttattaactttatgttactcatggtttcttgatgaggactcattaaacataatgtaagtagaaaattattaactacataatatttactacgggttgttatttctgatagtagctagctgtaagattccaattgttcttcaaatctttgtctcagtgatctctgtgtagttcttgactacttcaaataacttcctagaaggatagggatttaataatctcttaataggaacacttaacacactgctggtgggaacgtaaattagttcggtcgttgaaagcagtgtggtgatttctcaaataacttacaaaagaattaccatttgacccagcaatcccattattgggcatatacccagaggaatagaaatcattctaccataaagacatatgcacgttgtgtatgttcattgcaacactactcacaatagcaaagacatggattcaacttaaatgcctatcaatgaacagactgaataaagaaaatgtggtacatatacaccatggaatactatgtggccatgaaaaagaatgagatcatgtcctttgcagcgacatggatggagccagtggccattatccttagcaaacttatatggaaacagaaaaccaaatactgcgtgttctcacttataaatggaagctaaatgatgagaacatatggacacaaagaggggaataacacacactggggcctactggagggtggaacacaagtggagggagaagatcaggaaaaataattattgggtactatgtttagtacctgcgtgagaaaataatctttacaccaaacccccgcaaaatgcagttcacctgtatagcaaacctgcacgtgtacccctgaacctaatttaaaagttataaaataaacgtatcttattttcagtacaatacaccacagagtagaagggttaaaagagattgcttctgaggaggtgagatgggggtaaggacagcacaagagcattttggggggtgatgaagctgttctgtgtcttgcctgcgatgatggctacacgactaagcccttgtcagaactcacagaactttacttcaaaaggagcggattttactacacatcaattccaataacaaatactttgtctttaagcaaagggatacctaaatatagcgtattgaatggatctccagaaaaacacatttttcagttcatgtttcagcctaggcctcatctcatccaggaaaccttgtcttgcttgcctttacatacatgtggcaatcagtagtttcttttagggctcggactgaacactcaatgaacttcaatcttagcgcttgtcgtagcagattgacatggtttatttatatgtgtcattctctgtagtaaaaggaaaggatcaaggccattcacttttgtagtgattgtgcatggcagtatttggcacatagtagattattaattatggaacttctgttttcacacacacacacacacacacacacacacacacttcagagctattttcatttaaatatttgctttagtctccaaagcccctctgcctcaacaccaacccttctatctcattattcatcagcttttctcctattacgaaactacttaggaaagcccacttatttagcttatgatggcaaaaataaatatttgtacttttttttttttttttagtcatcgcttcatagaacagcctctgtcctctgcttatgccatgtctgaatatatgctggaggtaaaaagagttcctggttgagagcttcaatttgagaaactatctgagattactttccaggttccaccgtggaacctgtctgaccttgaacaaatgacctcgaacaagtggctgaaatctcttctatttcgtcaactgtaaaatgggggaaaaccatgtctatctcatggggttcatgtgaaggttaagaaattgcttattcagtgtttagcacagtgcctgatatgcataaagctcctaggaatattagctgttattgtatttccttaaagaagcccatagctctatatgccctttcattatatgttttagtagcccaatttaacatatggataaaatatttttaagttaaatgatttgctaatggattgttgaacgagtggcagacacccatattatagacgaaggtcaagtccataacatacagtacatttccccactttcatttcccattaccaaaattcattattctcctgagaaactcattatagaattcatgtcagattcatctgtgtgttcccagcagtgccttatatccagaaataacactgagtcattgtctagatgtagcagaggtggaatcctccaaagagaagcctcagagtggccaggtttgccaagtatagggatgccttgattactggccttactctttatgctcgtgaattcctaagttttattcctcctgtagtcatagattggcttttaagctacaagctgaagagagagaaaacctcttccacctcgttggaatatgtctcttcaatccatttgagccaatttaggacatgagactgctcttagtctagaaccagtcatcaggagaattccaggtctgattgactcggactagcgggtcaatatcagggcaaaaattccaacgcacaacacgatgtatcagtaaggagaacctcaaaattatttcttaacgtccagatcatgttcctatttttatatatctattttctcacataagtcattaaaatgatgtacctgtgcgggtcctttaatgatactcaaagatcttgaattataggctaataactaacttaataagctgcagaaattaacatttctgctacgtttatgtagcattttcccacatgtacttcagaggcttgagaaaagaccctgaaataatgactgaataacagctttactcacttaatttcaaatttgttaattcttctgggaaataccgtcaacatccattttattatttttctcaattacatgtacgtttctacatcagtggataagttaaggagaagaattccctcatgataattttttcatgctcgaaaattttgaatcaattttttattttacattatactctttcctagtcattagaaagggagtggtggttaagataggcaagaatgctttataaggatactactctcgtttcaattcttaacatcaaaaaccttaacagtgtgtagactataaaataaaatatctagggatcagagcattgtgctgaactttgcaggttttttagtcaataatatatatgacgtgttcacagaattctttgtcaacaaagtacttttggagctccaggccatttaagttggtttttgtactttttctttttcttcggaagactttttttgttctatttacctggaagtgtttcttttttggtactgtgaattaaaatgagaccaatctactaggcaggaaaaaaccttaattagattgttgacacagacaaataagaatgtcaattagcatctactgtcacatgcctctccagactgcttctaggatgagtggcctcaagcagctacatcatctttatactcctaaagcatcaaggaaacttggagtgacaattcatatcatgaacacatccacagtgatgatgattgtgcttcttcccccccacccaacaacaaaggatgaatgccaattaatgtattcagttttttgcgtcaaaggctggatcacttgtgcaatgagggtaatcatcctgaccagacaggccatacaatccatattgtgtgaattaaagataatatgcgtgaaacaccttactctggatgtggttcatagcagtagcaaaaagatgaaaactatggtatgctaacattttagagatctgtactctattttaaataattttataaaagtgcatatacaataaaaagtgcacgtatcacaagtatatgcctcaaaatctaaagccagtcatgtaatcagcatccacttcaagaaagaaaacaaaacagtacccctggttcctctttgcaatcattagtctcccaagagtaatcaccgatctgatctgtgacagcatagattggttttgccctactatatttttgctgaattatacaatatatgctctttaatgtctggcttcttagtgcattgtatttgtgtatcagctattctcttgtgtgtagttattaaacaatcattttatgggctgcataatattccatagggtaaatataacagttttattgataacttagctattacaaatagtgctgttgcagacatatattctattacatgtcttttggtataagaatttacacatttcacatgggtgtatacccagaactgagattgctaaatattggggcacattgtatacattttgatttagtagataagatattgccagatatcgtaaatgcacagtttgataaatatagagatttatactttttctagagaaaagccatcaatatcagtgtatgtgtatatatatacgcgtgtgtatatatacgtatatatatacgcgtgtgtatatatacgtatatatacacacatatatatacgtatatatgtgtatatatatacgtatatatatacacatatatacatatatgtgtgtgtgtatatatatatatgaaacaactcagaagcagaaagataccccatgttctcacttataagtgaaagacaaataatgtataaacatgtacacatggacatagagtgtgtagtgataagcattggagactgaagtgtgggggtgtgcaagggaatcagtgataaattaatggctacaatgtacataatttgggtgatggatacactaaaaatccaaagttcaccactatccaacatactcacataataaaattgcacttgtaccccttacattcatacaaataaaaaattatttaaataaaaataaatatgtgtatatgtatgcatacatacatatgcatatacatatgtgtttgtgtgtgtgtatataacttacacttaaaataagcatggatgctgcaatgaatgctcaatttacaagggttgtccatccaaacttgtggcaagtatctcacctctcaagttgttttcttttttcttcatatatttcttgcttttgtctaggaaggaataatttggcttgcctttcaagagtgtacagtcagcatgataacccaaacacttaagacacgtgctaacccatgtggatcccttgagagaaggaaaacagtggtccttttactgggcagatagagcccggggccaggtttcgtggcttgaagatttcagcttctctgcgcctctcagctcagtgcctctggaagcaatttacaacttgtgaggccatactcaaaggccctgttattaattccccgccttccgagaccccatttcagaggatctcaattgctctcagagtgaatttactgtttcctgaattccgtaatcccaatagcaggtctgttgtcctcattagatagcttaagttagagtcggcagtgtaattggcaactgagctactaagtatccaatgcttatgtggaaaatatgttccctattgcaaacaactgatattcatattcaatttggcaccatcatctatctataaagcagatactacttgtgtttattaagttttatcccaaataattattttagtaataatgcttgaaaataggccttggtcatttgcatgtctgtatatggcatatcctgagtctttgtatgtattagaaagatcactcgttttgacttgatggtttaataaaagatgtccctcactttgggcagagacatttgaaaaaggcactccaaccagggacctaagaggtgaatgagatgcagctctgaatcaggtcacacggcctcaggaaggaaacatcttggttttcacatccctcacttctcgatgtcatgtgcaatacacaaatgacccctcaacacacacacaggcacatacacaaacacacactcactcactcactgtattgtctctttccttgactaagtccttcttactaactcaagctctaaagcttttttacttacctaaggtgagtgtgtgaggatttgaggtttcaatattaaaattcagaaacatttaaagttcattttaaatattagtaaaaaaaaatcttgacaaaatacaattatagacaaaaagaaaattcagaatatttggaatttaaggttgaggttacagccctatttatgaaatattagaagaaaaatgctggagagaataaagcaggtttatgagtctgatagaaagcataaccagatgattatgcatatatttgcatatgcaaagctttctaggcaatctgaacatttaaacctacaaatgtggctgcgatgaacagccacagaagagcaggctagaacagaagaggaggctagaacagaagagcaggcagaagttgtaaatgaaatgttaattttcaatggttgatctcccaagtactggaacagatttgtgctgttttcaaggttttggttcaaagaatccagtagtgtattgaattgttttgtggcacttccctgttattttgctttgtaagctacctcaatccatgaagtggctatgagccccttatacaacactgttgatttttttttccttatctacgcaaaagatttttgattcagggccaggcatggtggctcacgcctgtaatcccagcactttgggaggccgaggcaggcggatcatgaggtcaggagatagagaccatcctggctaacacggtgaaaacccacctctactacaaatacaaaaaatcagccgggcgtagtggcatgtgccggtagtcccagctactcgggaggctgaggcaggagaatcacttgaacccggtagccgagatcctgccactccactccagcctgggcgacagagccagactccatctcaaaaaaagaaaaaaaaaaaagattttttattcaggtggctatcagactcattaaatagaagccttaggttaagttcacgggttgctagttggaagcctccatggactatgttcataaaataatagaaaggagttatgcaggacttcttgaaatgttatttaaaaagtcagaataggctttctattacttgtctgaggtcaaatacatgtagtgctttctgaccatttcatccagggtgttagctaggacaataagaggtgcttaaaaattattagattgagtaaatgagaaagcccttagaaacataggaacagaatgacccttgctttggatctaatattgactcccacgcctaaatccctttggagaactcctttattttctcttccatcaagagcaggtataaattaaaaacaccattaaaggggccatctagctcagctgaagctttcatcacacatgtaggggaggtatggttgggagggatctttttatcctttaggtcttcaatttacataggacttttgaataatcaaatagccccaaagagctgatcttaggactagttgtaattgagactatttctccatggggtagaaaaatctagttgtaggaaaactgagaagtagatgtatgttaacctcaaaggctgttttttacaaaggatgttaaagcatcatctttgctcagaaagggagcaataaaacaaatgagtggaaataacaaaaggaaataatggccaggtgcagtgcctcacactagtaatcccaacactggggggctgtggtgtaaggatcgcttgaggctagcagttcaagaccagcctgagtaaaataggcctcatctctacaaaatagatagatagatagatagatagatagatagatagatagatagatagccgggcgaggtagtgtgcccctgtagccccagctactcaggaggctgagatgggagaatcgtttgagcccatgaggtcaagtctatggtgagctgtgctccctcctgccactgcactccagcctgggtgacagagtgagatcctgtctcgaaaacaaaaggcatactttttagatgtaatggaatagagtacttccaaacctggctgcctgctggagttgtattggaagaggttgcacgacttcagtggagatggcctagatgcctgctcagcagtcatctagttaaagcaactaagaacatgtaatatgaaactgcaaaaagagatcgtgtacgtaaaatcactctgggctcctcagatagagtaataaacacaactcctgacagccaaataaaaagagaaataatacagcccttgacttccttggttgctttgacatactaagtaggtgttacaggttgggttctctgggaaacagactctaaaacatttttatttttactttatttgttgttattattattattattattattttagacagaattttgctctcgttgtccatgttggagtgtaatggcacaatctcgtctcactgtaatttccgccttatgggttcaagtgattcttctgcctcaaactcccaagtatctgggattacaggcaagtactaccacgcctggctaattttgtatttttagtagagacggggtttcatcatgttggtcaggctggtctcaaacacccgacctcaggtgatccacccacttctgcctcccaaagtgctgggattacaggcgtgagccactacgcccggccagactctaaaataaagtttaatatgcagaatacttatcagggaatgcccactggaccaatacatattcaagagagggcttagaagcaggattggacagaaagagaagttgagctgtaatgcaggcccaataacagccttagtgttaagcaggctgagagattcagcagttaatgagacagtcaacccaaacagttttataggcatcaaaagtatgatcagcatggtgtcagtttcctgtgtcacttgtcccacagtatgataccaaaattaaagagaccagatgacatgcaacacaagcagtgtgcactctgttgttgagaagccaatttcgtcatgcaattaagcagttttatactctgcagctgtactttaaggggagctgagatggaacatcatatgtctcaccataaccagaaaggcagatgagaaatgttctatcgccacctcccacaaggtaagggacttccctaaagatacagaggtgggtggaatattgccttggtagacttcctctcaagactgcctatcttcccatgttggaaggatcacagagcatttgtcaagacgtgggtcaatctgcagttgaactttgtgtatgtggcctatgtggatacttataatatcattgggcacctccatagagctgtttcccaattgaccaaacatatgggaagcttcagagcttcgaatgacccttcagagtagtcctgagaacagtgagccttactactcctgcattaatcagtcattggatgatagccttctcagaaataagtcatgaccttgtgcaagggggctcttcatggctgggaccacccctaaaactgagagctgaaggctgtctgccaccagcccttccacctgctgggacaagttctttattgaagggaaatctgagtagttcatcagcgtccatcacagtagtcaagccgttcattcttccttcttatgacaacattgtgcttattgttatgtaatccctttccagaacattttaggttaagttttaaaaataatgcatataaatagacaattcaaatactggggaaaaaaagcttgcacttatattgttatagaaatgtgcacacttaaagagctgatttcttctgggtatttacataactttatttaaaaatccatccatttttaattagctgtttttaatatgcagttagctaagatattataagccatatattaggctaatggacatttaacagcttagttaagttcttttaatggaaatgctgacaaacctttgtctgtaattatagcaacactgtgattacagaaggaggtgcctctccttgttgtttgcagccctaaaattccatgtggctataagtaacaaagtccattattagataaacacaagtcatacttggcattacttgcattactcgtctccttgctttatttgaatcattttttaaagttgtaaaatgtttttcaaaactcagaatagtggccagttaataatatgattcctcttatattatgagattttaaaaaatagttcaccagtttctggtggcctctatacccattggcaagtcctagccattgtgaattaagtaaacaattctttatggaaattttttaatccttaaaccctataagtttttattcatcatgtcaggtcacttgtcaaagggtttaacattcagaattcaacaaaagtttatcaaacacctattacaggacgtgcaattttgggcgcactgggatttcagcaattaacaatcaagatatgatttgtatcgacatggatattacattctctcacaggagacagaaaacaaaataactagaaaatatacataaagagactttaaaatggggtaaaattacagattgtgacaggatgaccactttggttcagaatatctaggacatttttttctttttttttcccctccctccctctttcttttttttctttttctttttctttcttttctttctttttctttctgcctttcggagtcttgctctgttgcccaggctggagcgcagtggtgcaatctcagctcactgcaacctctgcctcccatgttcaagcttttcgtgtgcctccgcctcccaaataactgggactagaggcatgcaccaccaggcccagctgatttttgtatttttagtagagatggggtttgaccatgttgcccaggctggtctcaaacttctgacctcaagcgatccacccgcctcagcctcccaaagtgctgggatttacaggcgtgacccaccaggcccaagcaaggacatttttttctgagccatgttatttaaacagagatctgaatgacaagaaggggccagctctgtgatgtaggggaagaaaaatatgttccttctacccttctaggctgcccagctggagtcctacaaagttagagtgacaaaagacagattaacaagaggaaaagcctagaagtttattaaaatattcagtgcacatacacctggtagaaactcagtgatgagtaactcaaaggggtggttagaatgttgggtttatatagcatctgaacaaagaacagtaaacttgtagagaaatgacaaaacaaagaaaaaaggggtttaggtatttagggttgccaaactgtaggaaggtaaatatatgggagaaacatggagtatagtttgtttatgccaagtctatcttgagatcaacttttcgtattcttcatggccataacaatttcccaggagagagggcttatagcagttatcatttctcagaagtttctgcttttatttagacaagggaagcactgggaaggcttctttttgcttatattgattcttacttgcctctaactaaaagtaatctttatgtcaaagtgccatattttggagtggtatatattgatctcctataataacaatcaaaaggaacagtattctaggcaggagtaccactaatgcatagtgtttggtgtaaagacaagttaacatattcatggggcaacaacaacaataagccaatatggctaagacattgaggatgagtgagttggagaagtaggcaatggccagctcatataaagacttgttcgtttttataaattgtttagattttattgtaattatggtggcaagtgattggagagtattagcttcactttgactggcttatcgaaaacggaatgtagggggtgaaagtggaataaaaagaccagtcattaattgagtagtccgtgtgagagatgatagtggcttggacaaggacgattgtactggagagattgaagcgactgatttcagatttgtagtcaacaaggcttaattggtaggagaaaaaaataaatcagtgttaactctttaatgtttaacttgaataattatgatgagggtattaccatttattgagatgtagaatattataaagtaagagcagatttgttcaaaaagtatcaagaatctttatttggacatgctagtttggggatgcttattagagaccctaggaaactgaatataaatgtggattttagagaagagcttagggctggcagatgcacattaaggatctgtctagagccatggcgctagagacctccaggagaacataaatagtctcaagatcaagccctgagacactcagatgtttagaagtggaacagaagagggacatccaatatagaataccaagaattaggaggggaatcaagagagtgtggcaatatgaaagatacaaaaagagtgttgaagggagggagtaattaataaccagcatgttatgaggggctcagtataatgaaaagataagtgactattggatttggcaacatataattttttggtgatctggacaagagcaatttgaacagaatgatggatatggaaggtccagaggagtaggctgagtaaataatataaggtgggaaaatagatacaaagattatagacaactttttcaagaagttttactgtgaaggggcacagcaagctgagacagtgaggataaataatagactcaaggatggtaactttagaataagaaatttcaatctgatgggatttaagtgttagcaaggaagctttaagaagttattttccccattagaatgatctgaaaaatgttttagaacattcctcttatattctattttatcacatttatataactttcagagaattgaaagaggtattaagttattatgaaattttctgagattaataagataacaattataggatgttttcttttagttgaaatacacctactcagcctaatttttataacttcttactgaagtataatatacttcagtagaaaagcatgcctaatataaaggtgcagctagatgaatttgcacaaactgaacacatccctttaaccagcacttagattaaaaacagaaccttgatgatacctcagaggcccccttctgccccttttcagtctctccgtgctacccccatggataagcattatcgtgatttctaataccatagattaattttgccagtttttgaattttatgcaaatggatctatttcacctaattgtaaatatataacattgtcatagcaaggcactcattgccttacactgaaaattacattgactctttgccacaagcttagacttgctttctcattttattatcatcaagcctatagctttcacactataccttgttcctgctcttccctactctatttcttggtagatattctatatcagtcttagagtgcagtttgcagaacccctccatcagaatctcctagggagcttgttaataatgcagattcctaggcccctcccatggtttatgaatctgagagtgaggcagacaagactataccctctcatgcctctataatgtaataatgtcttcctagaatgttctttgctgcatctcttattaaagaaatcttatgggccgggcagggtggctcacgcctgtaatcccagcactttgggagcctgaggcgggcggatcacatggtcaagagatcgagaccatcctggctaacacggtgaaaccccatctctactaaaaatataaaaaattagccgggcgtgctggcaggcgcctgtagtcccagctactcgggaggctgaggcaggaaaatggtgtgaacccgggaggtggagcttgcagtgagctgagatcacgacactccactccagcctgggtgacagagcgagactctgtctcaaaaaaaaaaaaaagaaagaaagaaaaaaagaagtcttatgtttcctttatggccagagcacaacattgtcatgaagtcatctaaaatttcccactagaggtaacatctccttcccctgtctagctcttttaaagcattacctccatttgccttgtatcatagctgcttgtacacctgtctgtctttccgctgaggttataatcctctggagggtcatgactttgcattcctttgtgtctcccattagcagccagcacagtgccttgcatactgttagttctaaataacttctctctctctctctctctctttttttttttttttttttttttttttttttttttgagacagagtctcgttctgtcacccaggctggagtgcagtgcaatggcatggtcacagctcactgcaacctccccatcgtgggctcaaatgattctcctgcctctgtcttccagtagctgggattataagtgtctgccaccacgcctggctaatttttgtatctttagtggagacggggtttcaccatgttgcccaggctggtctcgaactcctggtctcaagcagtctgccctactcggcctcccaaagtgctgagattacaggcgtcagctgctgcgcgcatccctaaataaacttttttttttttggcatgaaatctgtaacactggaaagatgttattgccttagaataattaagagattaaatgtagaatctcaaaaacattcatttttttccatgaaaactttaccaggcctcaagggataggaaaattatgggtacagaattgagaatctgtaggaacttgcaagataaacaacggtttcacaagaaagaccttgttggagagttaaattttcagacagttgtaataacttcacattaaagttttgtcaaaaaataagtatctgcatgttttgtttgccttccaatgccctcattttatttgattttttcccataagtaactatagtgaaagcacgaaaatgtgtttctgtgtttgtgtgcctgtatgttaattgtgactgtttctattgcattgttattgcagaacctaggcacgcactctgtaggcttgggtgctttctccaactgaaaaaaatcctacatatggataaattatttttacagccagtgtttaattttacaagtggtccccctccttctgtttttaggatggcagagagaatacatatttacttaccattatcacttactcatgctttgagcttgaaggaaatgagacagaaaaatgaagtaacattaacttctctctggaactatgtttctcatattagagctttatctgaggagttcacttcctctctcttcaatgctttgttcctctccagtcgattcaaatgtcctcttaaagcagaagttccgaacctctttctgtgacttcaggagagcatgagaatgtaaatataagttttaggactaaattttcaaagactttttccactcagctctcttttcctcttcggtttgttgttgtcgttgttgttgttgtcgttgttgttgttgctgctgctgctgctgtttttccccttccacttccgtaactgagctcttagggtccatctggaatctgattgcaattaaaaaaaaaaaagtttatttttacctccttgtacgtgctttctcctaaagcaggagtcagaagccttttttctttgaagggctagttagtaaatattttaggcttgtcgtctttgtcgcaattactcaactacgctgttgtagtatgaaagcagacaatacatacctgaatgagcatggttttgttcctagcaaactttacgcacagagaaatttggatatcgtataatttttatgtgttgcaaagttgtattattcttttgatttctccccaaccatttaatatgtaaatcccattcttagcttgtgtgccatacgcacacaggcagcaaatgcgagttgtcacacaggctatagtttctgactttatgtcttaaagtaaacagtaataatcattctctttttccaaacagtccactaatctccctttgtattcagcccttgcatagtaaacgccgtttcttcatcatcctgatttttattctgagaaaatactgtatattgttcccatgcactagggttcggggaaatttaaaaggatgtaggatctccttttcattggtcctaaaattgcactggggaggcaggtcatgtttatgaacagataaatagtatcataatataatcatgcatttctatggctagcatttagaactatagcttttgatgtcatgtggtttttatatggttgattatttttttcttatttataaaatgaaaaagtttgagaatttttcatctccttaatgtattcccttatttgagggaaaagtatttacctactacataggaatttatcttaaaattttctttgtctatctatttttatggaatataatcgagcaactattttactaattaatactttaatatcattatgaaaatgttctcatatttttaaccttataagatcagataattgctatgccaatctatggttgaaatgggttcttatacttaacgctatgctctttcttctgagatgtaaaaatatgtttaaatcagaatttatataggtgtcaattcaaaatgacagtagttcattattttgattagtataaatgttcacaactaattctattctcttatctattaagtcaccaaataaagtatatttgttttaaatatttaacagtttaaattattctttgaaaacttatgagtctaaagtaagaacaattaacccattcattttgcaagtgggatagttgaattttacttgcaatccagggatttttgacagtttgaaatatacatacataccatgtatgtttaggaaaacatttaaaaagagggggttgtaaaataataatagttcttccatgattttttagccataatgtttataatataaaatatgtatactcttgttattgaatgtagtatgtttctaatttaccagaaggcaagagaataatcctggagaatttctcaaggcatcttcgaactctttgatttattgctcacatatagtaatttgccaaatgacgccctagtgaactgaaagaattaatgccccgtcctaagtcactttcaccgagggactgaaaacctgcagcattttgccaattagaggaggaaacaatctaccttgcagagtcaggagtactggataaaggagctaagagtgttgctttttttccccttcttactttaaaaatcccaattcatcccatgtctttcttaaaggctaagtgaagtagtaagtacgtttttgcaacatacgaatttagcagactggccttgtgtttatttttggccggaaccattacacttatttccaaccctctcctttatttgttggttgataatgggctaattttgaatctttactgtcaaaagaacattaagagaagcagccctgcctgcatcgcaggctatgtctgtcctttgccgagtattaaacactaaaaaaaaattaagaaaatactaacaaaatgacaaagcattaagaaaataaaactagatgttaaaggaaatgagaaaataggaaaggatgctgtacctggagtgattttttttccccaggctacctaagatgatcaaaaaagagctaatttctcttaggtttctattaaggaattactagaatatcgggcacaccaggaaactttatcagtggacctgtcctgaaccaaattttcttaatgtatatatgataatttgttaccacatcccagattattttacaggaattaaaatatatttgaaacactgacagggaaaattgggtaagacattgatagatactacaatctgtacttgaaactgcactcaaggaattcgttagtcaagaaagaacacaatgactgtgggcccctctgggttttggaacctcttttgtaaagcatttttttttttcccaaatagaagatattatttttgaaaaggttaaataaaaaatctttgttcactatatagtttcctcctaaggagtaaattaatttatataaaatattgcaatataaataacaattttaaaatctcaaaagagcagtgttttaaaaataatgtagaaacattaagaaatgacttcaaatgataagaatgtcattggagagcaaagggtttttaatattacatatcgtggcacgtatatcagcacccaaccgctcaagatacagagttctttacaaaaatcaaacagaaggaaatgtgccaccttgttcataaactatatttaataataagccaggcagataaagtcactttcacaaataatgagcaagcccatggtaatataattcatttacaataagatttatctcatggaattcttagactgtgctttgaaatttaaataattctgataaatgccaacagaatagagaaatcaattccagagcaattactaacacgttgcattacctttctaacattaatatttctcttcatacatatcattgaagagaaaatgaggatggaaaataaaaagatcaggtaatatatttgctttctcatctagggttgttatgatcttcaagatgaagttttattttttactcctagcaaatgatattcttttttattttagtttttattattttatttttctgtaaattattggggtacaggtggtatttggttacatgagtaagttcttttttttgatatttctgagattttttttttattctactttaagttttagggtacatgtgcacaacgtgcaggtttgttacgtatgtatacatgtgccatgttggtgtgctgcacccattaactcgtcatttagcattaggtatatctcctaatgctatccctcccccctccccccaccccacaacaggccccggtgtgtgatgttccccttcctgtgtccatgtgttctcattgttcaattcccacctatgagcgagaacatgcggtgtttggttttttgtccttgcgatagtttgctgagaaaaccacgaggtaccatctcacgccagttagaatggcgatcattaaaaatcaggaaacaacaggtgctggtgaggatgtggagaaacaggaacacttttacactgttggtgggactgtaaactagttcaaccattgtggaagtcagtgtggcgattcctcaggcatctagaactagaattaccatttgacccagccatcccattactgggtatatacccaaaggattataaatcatgctgctgtaaagacacatgcacatgtatgtttattgcggcactattcacaatagcaaagacttggaaccaacccaaatgtccgacaatgatagactggattaagaaaatgtggcacatatacaccatggaatactgtgcagccataaaaaaggatgagttcacgtcctttgtagggacatggatgaagctggaaaccatcattctcagcaaactattgcaatgagtaagttctttagtggtaatttgtgagatcctggtgcacccatcacacgagtagtatacactgcaccatatatgttatcttttgtccctcggcaccccttttctaccccccaagtctccaaagcccattgtatcattcttatgcctttgcatcctcatagcttagctcccacgtatcagtgagaacatatgctgtttggttttccattcctgagttacttcacttacaatgatagtctccaatcgcatccaggtcattgcaaatgctgttaattcattcctttttatggctgagtagtattcatatatatatatatagacacacgtacatacatatgtatatataccgcagtttctttatctacttgtcgattgatgggcatttgggttgatacttgcacacacatgtttatagcagcataattcacaattgcaagtgatattctcaggaagcatgatgtaagtgacagagacttactttgtagactgcactcattcacttgttctctgaatgtgctctaggcagcctgagtttctactatgtcagtgttacatagatgagaaaccccatgggtggtttccacagaggctgcaatactatttttgataccaaaaatctgtttggttttgtgagccccagatgcccatatggaaaactgaagtgttgatacctctttgtagccctctgatgaactgcatggttcaccttcctcagcagtttgagcggggtggggagagcgcctgcttcctagccatccgattggcctgaatcatcaaaaatgctatcatgaaacaggttctgtttatctgctccagattacacccatcatgttctagagtgctggtttcatgcttgaatctagatcaagcctgctttcctcccctgcctgtactccctgtggctacctacagtcctgctgctgacagataatctaaaccaatagcacctaattagcctatttgctcatgtgttttttccatcgtggtataatgtcctccttgtcaatttagggtgaaaatgtagcaacacgttgctgatggtttaatttctggaatgcaggtaatgaatgtgtttttgcttatccaagtcttcccatcagatgtcaaatatagaagaacagtgttcagaggtcctaaatttaaattggagtgagaaattcacagcgcccctgaactcaggcaaaatgcactctgacaagtcaaccagatattcacagatggtctggaggatttgaagcctaatttggtgaaataaaattaaatgagtgaaattgtatgcagtcattaatctatcaccatacttaaaatgcttcattgaaatttcttttactgcttcaaatgaaaaaagatcaaactatgttatagaaaagcattcaaaacccttacataacatagataaaacttggttggagacttacagaactttctctgctgcttcgagaaagttacagtgcccacaaatctattgctattagaatattttattgtattcaacactcaattctaccataattatgtatatgagaaaaatatttttacctataaaataattattattaccttttaaaaatctgacattcttccttttttctaaagaaacatatttagatttagcttttattttatttttgtgttgatacatagagattgtacatatttctaagattctagtgatattttgatacaagcgtataatgtgtaatgatcaaatcagggtaattgggatatccaccatctgaaacacttatcatttcttcttttcaatgccatcataccaaaaggaagtaaatagaatttcaaatataaggacagccatgattttacatacatgcctacgattccaccacaaaccataattacgtcccccaaacttttaacatttcagatactttgtcccaggtatttcatgataaggattgggctatgactctgttacagaagggccaaatgactaaaatgtctctgaacaatattgattgcaaatattctacccagttgtcaggtcaatatgttccaattcggaatttataacattgtatctctactcccaaaccatccaatctcacctacctcacttccatattatggtgggtgatctcagattatatttaagctcatggttacttgtcaagtagatatggagtttagcctaacttttgaaatttatgctgagattacccttctcattatagaattaagtaggcagtttccaagtttagatttagcaggcagtttttttcaaatcacttaaaagttatatttttttagggcattgaacaggtttgaaatcctaccaagatgtcatgtacacatagaccaatagaacagaatagagaacacataaataaaactgcacagctacagccaactgttcgtcgacaaagtcaacaaaaaaataagcattgggaaatggattaaagatttaaatgtaagacttcaagctataagaatcctagaataaaatctgggaaataccattctggacattggcttgggaaagaatttttgactaagtccttaaaagcaattgcaaaaaaaaaaaaaaaaaaaaaatgacaagcaaggacttactaaaataaagagcttctgcatggcaaaataaatgatcaacagagtaaacagacaaacaccaaatgggagaaaacttttgcaagttatgcatctgacggtggtgtaatatccagaatctatgaggaacctaaacaattgaacaaacaaaaatcataaaacatcatttaaaaaatgggcaaaagacatgaacagacatttctcaaaagaagatatacacgcagccaataaacatgaaaaatgcgtcacatcactcatcatcagagaaatgcaaatcaaaaccgcaaggagataccatctcacacccgtcagactggctttgttaaaaagtcaaaagacacccaatgctggcaaggccgcagagacaaggggatgcttatacactgttgttgggaatgttaattagttcagccactgtagaaagcagtttggacatttctcaaagaacttaaaatagaactatcatttgacccatcaatcccattactgagtagatatccaaaagaaaacaaatggttctaccaaaaagacacatgcactcacatgtttgtcacagcactatgcacaatagcaaagtaatgggatcaacataggtgtccgtcaacgttggattggataaagtaaatgttgtacacatacaccataaaatactatacagccacgaaaagaagaaaatcatatcctttgcagcaacatagatgcagctagaggccattatcctaagcaaattaacataagaacagaaaaccaaatactatatgtactcagttatgagttggagctaaatgttaggtacttatagaattgaagatggcaacagtagaaactagggactaatagaaggggaaaggaaagggggagacaagggttgaaaagctgcctattgtgtactatgcttactacctggttaatgggatcatttgtatcccaaacctcagcatcacgccatatatccaggtaacaaacctgaacatgtaccctctggatcttaaaagttgaaaaaaaaagatgtcatataaatattcgtggtcactaaaagtatctaatgtattatacataaaaataaaaattgggtgaattggaagtgtattctttgtatcaagtcatgtcggagatcctattctgctttgatcacagtgtgaattcttttgcatttttgttaccagtcacttctttatttattgaactaataattacatattctgataatctgtcagaaagataaaaacattctttgtccatgtgtctgaaaatttttaacctatttttctaatgttttaagtgagaagagcatgttaatactgaaattgtaagcagtagactgaaaaatcatcccaatccatgggttatatattgaattgcttttaactgtattactaaatattaagcttaatttattttatttctacatatccccatttccactataggtgatttgtatgaatttaggaacttccttctctcatccatttttatattaaaactcagactttctaaaacaatatttctatccatccatcgttggtaactatgtactgacatgttttgtgcatccgaaaaatgttagcattagtttgtgcgcacagaagtaattccagtcaccatatgatgagctgatttatttatttcgtaagtgtgttcattattattatctcttcagcacccaaatatataggggacttaatgatacctacaagtaaaaacggaagacaaaaacgccctgctctctacagaggttaaaatgtttttgcaacagggctctagatctcagctgtgaaagtagggacgagatgaggctaggcatgcagtgtcagtataatacaatataatcaacatgtcagcatctaatgcaggtgttgcaaaacaaaatgtacacatgggtagtcaggtaacagaaaagcatgaagtagtaagggctatctatgcaagaggttccaagctgactatatactgaaatatttaaacactatgtggggcaaataaaatggacattagaacagttcgatggtcagttggggacttctgctctttcttccagtctctgaacatatcttaaagccacaatcatctatttttatttattgttatacatttatttataagccagcacccctgtgatttaagttctgttgaaatgctgagttggaaaagatcgatggatgggggaaatttagtgcagaggttttgccccaggttcaaaatcctttataaaatattaatacatggaacaaatattgaacaattaaaccactgataagttaatcaatctgattcaaagtacacctgtgaagagggacatggcaagaaaaatattacagtaagaactagaaacattccttcatggctgcttgatatggatatgtcatgtttaagaaaattcttctttagactgttgagattttttttcctgacaaagaagattcactgtcgaggaaagaaagaggtactgtgaaatttgttattgaaaacatgcacatacttttgtcagaatgagttaaagagtgaacaaaatgtgcctattacttacgtgttgtgctgttttaattcaagattaaaatatttaacgtccacagacaagaccacttttatatgaatattatttttctgctttattgctcaattttattaccatttcaaaacacccgtgttgctttctatggccaaagatgtttagcacttttcatggttatacttctgtacagtccaaaatacaacacttactttacacatacacaaacatccaatgtattttgttttctgtcaagtaaagacaatgtctgtgttattaagttaaatgtcactttcaaatacaggatatgttgatattagaatgttcaactttatttcctcatttaagcaaattacagtgtgaagaatgtaactgcagcaatttataaaaatcatatcacattcaattatgagagcaaacttgttttgtagacttgaactagtttcaattaatcttggagttatcatttcaaaaattctaaacagagagaaatacggagtgtaataatggtaggtctttgggtaagctgcttccaggaaaagaaagcaattatatatgttcacatagcactgacaaggagaaacaaaactttggacggcaaagaacttgcattagtctttttgacatgttcctgtggtgtgatttattacgtagacaatcagctcaacttctcaagtttgatatccttggaatcatttgaaatttaaattttaatgaaaattcattaattccaaggccaaaagaagtgattctaattgcttttgagaatcagactatgaaagaattctttggcaaacttgcactgtcttttctcttttatcattggttgcttcgtaggtacttaattgaaggtcctctgattatcagcacgggctgacatcagttcactccatgcattttaaacagtaggccagatgtttaaaggatcagctgaagcatcgatagcatgctagggtgaataataaaattttcattatctacaagaagcaaataaaaagcataagcattttcccccattatcctgaaggagaagatgaatgcctaagcaacattttaagaatgggttgagtgtggcctgtgggaaaatttgggtagaaaacttgtagttagctaatgtatatactgtttgcctctttagctcaccatatacccacacacatgggcatgcatgcatacagacagacacatacaatacacacaacaaacaggaaattcagatatactgaagaaatgtatttaagggattactaagtttttgtaaataaaatcctttaagatgctgagaaacaatggaagagaagtaggacatgatggctcatactttcgtaatttacttgtttaacgtttgccaaggtttaaattaatgtagatgtttttgtggctaggattaatgatctaacagtttggaataattaggcacttttatcacctagaaagcccagaaacccagcatgcaaaaattctggtatgtctgcattttacacttagatataacagagaaatgacaagtagtcaagtggatagagaaacgaatgattcttcacacatgcacacacacatagaaattgtctttttaatagtattttaatgtaacacatttatgcataatttctccatagtgtttatcttatagtgaatatgtgatgaatagtctctaacattagtggttttatagattaaacataattaaggctttatatattaaagagtcaattggtgacattctaatataaacatgtttatctcatatacattgaaatattagataattcattcgttgagaataaatcgaatgagtcaaaacttttaacctccactttgagctttgtaatagtatccactgaaaatattcatgaaaatttttaagtcatttctatttatatattcagtccaaacatctcacaagtttaaaatgtaaactcaagaatataatttctgtattctacaattggaagcatccatcatatcagatgaacttatatagtttgtgaaattttgcaaactttctgtttagtaaatcttaatgtcaaacattttaacttccaggttgtctttcttttcagttttaatatccgcgatctttgtatactcgttgaatggattctcaataagtaacccacaaatatatatacatactatgtacctacaaaaaataataaaaagtaaagaaatcgacacttatccatacctgtcccatagtaataaactattcataagtatatttgaaagatatgagaatcataaaagttcgtgtttgcacccttttgtgcgtggaatcctaggtttgcattttgtggatctagactttttggagtgtggaaataaatgaaacaaataatcgagacccagtcttatattcaggttatcattttactacataaagcataaataacatttgcagtttgtttctatggctagctctaaagtcttagcaacgagaacattatagaaagacttcaactgtagcttccagcagaacttctgaggttccgtttatggactaagcagcagttgagggggacaaaactcataggcaattgatcactccaaaggatagattgtcttttctaacctaatcaaaagatttatagtgaaggcatattcagattttgttgaaggatatggatatataatcatgtgtgtgtgtgtgtgtgtgtgtgtgttagacatacttaaaacattatttgagtagaaaattctgcacaaatggaaaagtataacatgtgttatatccacacatgttgagcatttacctggctgaaacatcaaaagctgaattgacttaattgaatgttgaatacttaatagttactttgtagtgactcactattaaaacattatctcaagctttgtcagaattaatttttttaaaaaactcagattagtgtcaggtttactgaaacagcagatctgaaattactgtgtttttttttcctttcaataatcagtttctaatccaaaattgaatatcagttccaactctacattcagtttctgttttacttgtttggactggcttttggttctgttttccacatagatcctctctgtgtaagacaaagccatttgtgcagattaaattttactgagcgtgttaacctatttaaaacattcatccaaaaagactagtatgaattcttcatatggcaagctgcttgttttaaaacttccatttattctaaaatcctttttacttatactttttaagaaacgtattcccgatatacaaaagtaacacatgctcattaaaacaaattaaaaatagtattgtataaagagctgatacatttctgccttgccccatttaactttcttaagtgttcatgtgaatcatccattcacatcaagacatttatctgtattcatatgaacgtgttttaatatatataacatatatagaattttatataaactttccttttaaaatagaaatgaaattatatgatatatttattctgtgtctagctcttgtcacgtaattattcaagaacatatttctaggttaatatctgtattcttaggtagcattcactaactcctcatctacttgttttcttccattctaattgtgtttaacatttcttcatacaattggttgtcatttggtcttctttcatggagggtgcataatgttcattctcaccaattctttacactttacataactgcttgatacgaagccagaccttataaatatcaacaaagcaggaacactgtaatcagctatcagtttcagttgagctgaatgaccctgaatatgtgtacacatattttccaggagattttaaaactgacacctcagatttctaagacctggagaaatcagcatgagaaacattgatctatattattccgtgaaatgatttcactaaatagtgaagcatctcccacatgtggactctgtaatttattagaataaagagttcatgtgcttctgaagaacttgaactactcttctggcctccgtacattggtttcttagctataggaaggctgagcatgtttttcctatgcgtttcctttctagctcatcattttagtgacaaaacaatctttcgtggtgttgctctagctatagaattgtttcagattcatttgaccaaaggtggcaaatacaacagtcccaacaaaaacaaaagacctattacagaatgatggaaatgaccccagggaacaatggcacctccacatttcttaattccaaggttataagcagtggtgtggacaattctcaattccaatgctgaatcgccttctaatttcaaatacctgtgctaaaaattatttacgtctactgaaataatgaactggaccccaccaggaatggccgatatgcttgtagtcagagcacaactgtagaaagaaaataacattttaatttatagaggtatgatgatagctgtttcatactgttttcagaacgatgaatggcctgctcagtagtttcttgtcatcgtactgagacactttaatttcttaccagctgagatgaggaatacgagcccagtgtgcaggtgaaattggttaacaggagccattaaaatttggaagagtcagaatagcatcaatcaaaatgctttcagtgtaggaagtaaacatgtactagcctgacccacctgtcttttcttttaggtatgttggtaatattacaatcattttgaggtatccataaacaactgcttagatctgaagaattgtatatctttctttactctgccctggcctggggttatggttctcattgagctctaacctttcagaaaaaaaatgtagagaagtggttcaagaagaatgctttatcttgcttcataaaaatgatagtgatagttttattgaaggcttactatgtgccaggccaaagtgcgttttattatcgttcccattttccaggcaaagaagctggagcacagagaggctaagtgagttgtccaggatggctcagctaacatgctgcagttgggatttgcacccagaccaacttcttttcaaccactgtcccatcctgtgtcttctctactcaaaaagtgtttcagctccaaacctgaaactttaaagaaaaggaaatccttagtggaaagactaggttttagtcacaaattatctccttccttacattatttgtctctttttcaaatactccaagctttgattaaaactgtctatcactaggaacattgtagaattgctaaggtggaattgttaaaagaactcaattccaattaactttgccattgattactgtgtgttctggaggggtgttctttctttcaggttaatgatgctttattgtatatctcaaagattaaaaataacaatgaaggaagtagcaaaccggaacttctctcacaatgcatctttcaatctcgtgctttaaatgaagataaaatcatggctgtggtaaggttgcaggaaggatgatatagattaagtttcttgcaaactgccctctgaattttcaatagctgtagaaggtattggttttccaaaaaattgacaaattgaggattcattcagcagtttttttctaggtctcttaccagaaagtgatcactaaaaagtgtagggaaaccactcaaagttggatagatcattattttcacttaagcattttaatttcttgaaggagctttataatgcaacaaagaatttacagtcctgtgtcaccgcttaaattttctagggtcatcagtaaactcagtggaaataaattagttcatgaatataattgacccttaaattctgtcactgtgcaagtaatcggtgggtctgctggatatggctttcgagcagacaggtcaacttcttcaaacagagaagaagcatagcataaattgaagacaaataacaaactacttgtttcctccttctttggcatcaccctatggatggagtatgcatttataatttaacacaatcaagagatctttattatcctacttttgggtacaactgcttcgtttctcttttgaatctctacagctatttaaaaatctgttttgtaaaattctttaaaaaactaaaacatcagattcatatttcaggtatcttactatcttataccaacttaagcatccagtattatcacccacccttcccctgagtgaatccttagcactgggctcttcctgttttatccctgtgcatgctgagctctttctggccttcaagtctacttccgttgcaactgttgtctgaatggtctctctatgtccttcttactctctaaatatttcggaatttaaagcctggaataatctaccttagtccaaaagatatgctacactattctagttcacaatgatctcacactgccgttgatacacaacatttaatatcaacttaatatctatttcagttcattacgaggtcacttatgctacatcttatattgttgccttggacttttattatctcttcatatatgtgtttatggtgctcccaccctcacgagaagttgcaaataccatgttagctgtctgatggctttctatgttgtcaggtataccatttcccaaccagttggcattcaatgattaagttcattaacaaagaattgtatgtgttgaaaaagatgtttttttcttaatgaagcacttgtttttatttttttaatgaaatccaccctcttaataaattttaagtgcacaatacagtattgttaaatataagcaaaatgttgcatagcagatctttataatttttttaaccctacatgcctgatagtctatacccattgcacagcatctcaccatttcttccctcctccagcccttagcaaccaccattgtactttctgtttctataattttgactactttagatacctcatgtaagtggatgcgtgcagtatttgtccttttacgacttgcttattttatttagcaaaatggctacaagattcatccacattgtagcatatggtaagatttcctttttgtggcagaatgatattccattgtatgtatataacatagctttatacattcccctgtcaatagacatttagtttgttcacacctcttggctactgtaaaaatgctacaataaacatgggaatgcagatatctcttcaagatcctaaattgaattcgtttagataaatatccagatgcgggattgctagatcttatggtagttatattttttatttttttgaggaaactccatattgttttccacaaaagctgcacaattttatatttccaccagcagtctacatctccaattttcctacaccttcaccaacacatgtaatgatcttgggctttttttttttttttttttaataatggttatcctaatccgtgaggtagtatatcattgtggatttgatttgcatttccctggtagttagtgatgttgaacatcttttcatataactgttggtcattttaatgtcttctttggagaaatatctattcaattcctttgttcactttaaaaattgggttgttcgaatttttgttgttgttgttattacgttcctcatgtattttagatattgacaccttatcagatatatggtttgcaaaccttttctctcattctataggttgcttttaattctgttgattgtttcccttgctttgtagaagctttttagtttgatatatttctgcttatctagttttgtttttgttggctgtccttttagcgtcatatccaaaaaaaattattgtgaagaccaatgtcaggaaatttttcccttatgttttcttctatgagtttcatagtttcagatcttatttttaagtctttactccatttcattttgagttgatttttatgtatagtttaagttaaaggtccaattccattctttgcaatgtgtatatccagttttcccagcaccattggttgaagaggatatcctttcccagttgtgtattcttggcacccctattgaaggtgatgctaggtttatttctgggatctctattctgttccattggtctatatgtctgcctttatgacactatcgtgcgctcttgactgaggtagctttggtaattcattttgaaactagcaagtgtgatgcctccagtttattcttcttcctcaagactgttttggctatttggagtcgtttgtggtttcatatgaattttaggaaatttaccttatttctgtaaaaaatgcgattgggattatgataggaattacactgtatctgtagatggtttggatatatagacttttaaatgacacatcagatgtatttccatttatttttgtcatcttcaatttctttcaacaatatttcatagctttcagcacacacatcttttaccttcttggttgggtatttactaagttatttattctttttattgctattgtaaatgagattgttttctaaatttcctgtttttatgttgctagcgtatagaaacgcaactgttgaatgatgactttgtatcctgcaactttgctgaatttgtttattggttctaaccatgtctctgtgtggcgtcactcttaagattttctacgtatcagatcatctaatttgcaaacagatataattttacatcttcctttccaaatttgatgtattttatttctctttcttatctaattgttctggctagtacttctggtacgattttgaaaagaagtggcaaaagtgtgcattcttgtcttgtttctgatcttaagggaaaagattttcagtcttttgccattaaatgtgatattcactgtgggtttttcatatacggtttttattatgttgcggtaatttcgttctattcctagtttgttgtgtgtttttatcatgaaagtgttgaaacttgttaagcgctttttctgcagctattgagatgaccatagatttttagcctttgttctgttaatgttgtgtatcacactgattagttttcataaattgaaccatttttgcattccaagaataaatcctatatggctctcgtgtataatcctttcaatatactgttgagttcagtttgctagtattttaatgagttattttgcttctatatttatcagcggtattgttctgtacttttctcctagtgtcttttattgactttgatatcaggatactgatgccccttgtagaatgagcttggaagtgttctcttctctttaatttttctgaagaatttgagaaggattggtgttaattcttctttaactgttcattagatttcaccagtgatgacatttggtcctgggcttttctttgttggaaggttttggactactgattcaatctccttactagtttcggcctactcagattttctatttcttcaagattcaatattggtagattgcatgtttcaaggaatttgttcatttttttctaggttaacatacagttgtttacagcagtgtcttataatcatttgcattctttttggataccagttgtaatgtctcctctttcatttctgattttacttatttgaattttcctttttttttttttttttttacttaatctacctaaagatttgtcaattttattgatttgtttttaaaaaaactcttagctttgttgatttttctattgttttctatttcaattttggcttttttctgatctaatcttaatatttccttccctctgctaactttgggcttagtttgtccttctttttctaagtctttgaggaagaaaatggcaaggacatgactttctttagcagttggaaggacaatgctgtaaatactcaaaaattaattatttttatagtgacaaaaacaaaataaaaaacacttcaaagcaaatgaaagtttatcatttaatttatcaaatcactaagcagactgcttgatcagagagaagatactcatatgatcacataaaactgaaagattaagaggtaaggacattcatgttatcattacatctaactttcttatttccaagatggagaaactgagggttggagaaaaagaaagatttctttgttagatacaaacagacaggactaaactcagtatagcagcctcctaaattccaaagtatcatgatactgtgattttatgcattcttcagaaaaatagtagagccactggattctggcaaagaagttatataaaatgtcaagttcttcctttgcctcagaaatgaagttttatgttccaaaattgattgggaagttctccttatacctcacatcacgtctactattttacattgtttacttttgaagaatttttttaattgacaaataataattgtacatattcatggagaacctagtgatgtttttatatatgtaatgtatagtgatcagatcagggtaattagcatatccattatctcaaacattggtcatttatttgtgttgggaacattcaacgttctccttctagccatttgaaacttctatattattgctaactatagtcaccattcagtcgtatagagcactagaacttatttctcctatctagctataatttatttttaaatatgctttttgaatctgttactataaattgaatgtcacatcgttttgaaaatattcttaatttatgctcaacaggcaagattacacacctgtgataatatctttaatttaaaacattactctgtttaatttaccagaatatggaaccctagtcattttagaggtggagcaaatttcagtgataatctagtgcaaatttctcatcttatgaatgaggagattgagtctgatataagggacgagattttcgtcaatgagcagcttgttaacattagctctgtgatagaacacaggcacttgtcctcccaggccggtgtttcttctactctatgatgggctgttttgttgtagtttttaaacagcagcattttcaccatgcatagttttcttccaaagttcgttcttaacgtttttgcacagaataactagattttggaagtagaaaaaggaaattctctttgcatccttgtatctctggttattttctttgtcctttgatctctctctcctcccctcccctcccctcccctccccttcccttccctcccctctccttcccttcccttcccttccctcccctctctcacacattagagaaagagttaaggtattaaagaatacataatactattaaatttccttcacatagagaaaggaatgaaaaaaagtgaaaaatggtcctcaccaaatgtccaaacttctgtaggtcatttccatagtatcagcaatgtcctgtatggtgcctcggggatatgtaagcaaatgagcaagtggttagctaattctagctttggcaaacacttgttatggcttacttgaggagaagtcacttctccaaagtgaaaataatgtgcacaggtcaattagaatttttttgtagaaaaggaaaatactttgtagggacatggatgaatctggaaaccatcgttctcagcaaactattgcaaggacaaaaaaccaaacaccgcatgttctcactcataggtgggaattgaacaatgagaacacatggacacaggaaggggaacatcacacaccggggcctgttgtggggtggggggagggtggagggatagcattaggagatatacttaatgctaaatgaccagttaatgggtgcaggacaccaacatggcacatgtatacatatgtaacaaacctgcacgttgtgcacatgtaccctaaaacttaaagtataataaaaaaaaaaaagaagaaaatacctccttatgctcctgacttattttctttttggttcctcagtcctcttctctctctctctctctctctctctctctctctctctctctctctctcacacacacacacacacataccccacatatacaatatgattaaggatatatgtgaataatgaaagcttcttgtgtatagatttagaagtctaatggacaaaatcaatattttcctatgtgcatttaattcccccctttgatttaggtatatagtctttttttaaaaaagagaaaaaaaattaggtgaccttaaggtatagatcctactttcaaaaggtttacagaactagggagaggaacatggacaagatttaaagaactattttaagcagaataaaatgtgatttatgaacaaagcatatattatttgtgcgtatgtgtgtgtgccaacaaagatgcaattaggagattgcacagggagatgtcattagaaccaaccttaacgggtgagaagtctttgaagacatttagaacatggaagatctctgacagagggaacaaaggcatagtgacaaaagtcaagggcatatttaggactggagagtggtatgtgtggcttgagagtgggcgagaaaaaacaacaatgcctctgtaataggaaagtagacagaggcatgacattaagagctttgccagctgtgctaaaagtagtgaacaagagctaacaaagtgaagaaatgtaccttttctgatgtgtatcattcccttattcatatacttcttgagggggaaattcattctgtgttgatctagtaaactactacaggaccaaatgataaaaagaagtataggaaagaatgtttcagcatactttacgagataacttccttgtagctattctccatagtattttgagcatcacaaagcaatgagctgaaactgtctaagccaaaattgacttgtcatctgttagggatgcttagatgagaattctacatttgagagcttcttagattcattgaccactatgtcccattctaagatccatgaatgcgtgacctaactattacaccttcttttagtctgattgtcaattttgtattttcaattgtgcaagtttctaaaactattttaggaagataaatctagcagtggtgtgggaatagacaagagagaaggggaaagactcttcaggaaactaaactcacaatttatgagtattctttattgcccaagtcttcccaaagtctttcatcaagaaagaggcattgcaactctccttttatagtttgtttttattctggagcagtgatgttttggtggagttgttcctcagtgcgtaattaaagggcctatgacaattacagttcatctcctgctgctcaaggtactgcagatatttggatctactactctcattcatttccaattaatgtcagctttagatttccttcagtatgctatgttataaaatttgattatcgttgtgcccaccttcccacttaatttcaagcaggtttctcgattacctgactaaactaatgaaatctgactaacccaatatctgtggacagtagtgtgatgttactgatttttgtatgattagtcaagtcatattcatgccacgttttcatatagtaccataaaggatattcttctcgtggtccttttcttttattctgaacatacaatgagaagaccggtaaagtgggctaggaaattaaagaaaaatacaaatggcaaaaaatatgggtcactcgaagtctagaatagagagcacaatcaattttgaattaaggggtgataaggtgatttggtcaggtgactggtgaaacaggaaagaaactatactttttgaagtgtttcatccatgtgttaagattcatttggggtcaagaatctaaatttcatatccctgggagtggaaactaagtaaaaaaaaaaattatggaccttggtttaatagctagaggagcaagagtgtatctttatgtgacttaacttctatgtgaaaagtgaaccttaagattaattattgggggaatttacttactcaggttctatgcctagatggtctgcccaactaagaaaacttattttcctgttactccatcctatttttcatacttttatactgcacttgcagaaaagcatatatttctacccaatacgaaaattcctgggaacatatttttctacatttcccaaattacttcaaaaagtaaacttaggttatttcatgatctccattacaatggacaggtggccttattgaatgttgtcctgtgaatacaaagatccagagtttaaagaacaaggtgtacttgcatctcccacttagggtttgcttgtggtggagagagaatctagtttgcttaaaaggatgacagtgcagtgccccaaaatatctgatatcattaaaagtctcatatttgtctttcgtaacttctctagggctgtcgatgacaggagacccttaactcctatgccttgattatgtgaataagcacatgaaaatattttagttatcttagttcacttttaaactaagtttcaattatcactagattctaaatatcatcattgagccgttcttaaggaactgattttctacatattcattcacttcacctatatctagtgtgtctactatttgccaagaaaaatttactctcttaattcagcattccatatacttaacatcataaaaagtaggccatttttagttttctaaattatttatttaaacatttctttaaaattacattctatcattacactatatttcaacactacagtaagcagcctattttgtgatttttccttatataaaatacataattgaaattaaaaatgaagttaccaagagccattttcactctggggaatgcacatttataaattatggggttattttttcttcatcagctttcatattattaaactttgtctcttcataattacagagatgactagacacagaagggaatttaacatttggtgtgcatttgtctaacctatactttatgttagaaaatacatttccatttgaaaaaaaatcagtaattgtgggtgtgatcaagagggcagcctgaaagtcgggtgatgtgactcacacctgtaatcccagcatttttggaggccaaggtgggattatcgattgagcccaggagttcaaaaccagcctgggcaacacagtgagagcctgtctctattagggggaaaaaaaaaaaaagaggaagttagcctgaggcaatgtaaatgaaatacatatttcaaggatatttatacatgattcacgttattcatataaagatgtgccagagaagactataggtacgttattttacactattttgctaggattttaagaaattcaatgtgtttttatttcagttaacttagaaaacttacctaacttatacttctcatggacacaaaagtttttaaagataggatcaaaaagcccacatggtgaagcattttgaactggatgaaaaacatctattatctttaaaattttatgatattactgattgtaatagactccctttttaagaaatcattccttatagaacataaggtttacatttacaatcaacaatttctatccttactacaataaaggcacatataaaaagtacagttgcatatttagcaggtttaattgtacattttaatgtagaaatcaattcaattctttcatttatcagcattattacagtgatttcaaattaagcataggtaactttgatatagataaatgatgtacacagcagttaaattttattttcaattatgtagtaattgtataacctaggcagtataatttgtaaactttgtattttattattatgcttctcccacttggcataagcacaacacttcctaaaagcataattttctatagacttaataactccctaaaaacctgttttggacccctatactatttgatataggcagaaaaaaaacataatccatgctcaaatttgaaaaatgactggtcacatttggtataatactaaaggtaaataaaatcaagagtctatgaacatttccggacctgcacatttgttttattaaaatgcataattgtctttagtgtgtttctatttgtttatactctactgattttaattaaaaataccaaaatacgtttattaaaaaactgtcagaatctaagttgttaaatatacttaactaggaaagtaactgtttaaacgagataatttatagagaaatgtggtgtattgccaattagatgtcaagatacaatacaactgataatgaaaaagtagcattttcttagggatggaatacagtgtaaggaacaccccagtaagaatacaaaaattactgaaaaaaaatcttccttcctgaaaaaccaagtgcccttcaagtgcagaacctcatccaactaattgttaggtatcactaaagcctgataccttcaattttctggatcattcaagctgtatttttgagtccttatactagaggaggtaaagagctataaaaacacttaatggtatctgatgtgaactgtggatcactttgacccatcacttctacgtctacatcttggataaattcccattgttgtcatagattgtacaggtttaatggtgcgtttgtggagggggctcgcttatagaaaatggagactctgaagggataaggaataaatgtatcacttcaggtcttttatttgaaattggggtccagagagcctttttgtatcagacttgtcaaaccatttccatttagtaattatatatgcactagcacttattcctacttacctcacctctttatgcccatttccttgtagttgcggttatgcatgaataatttattgcaccccttaccaacaatggaataaaacttccattctgaaagctttccatactcatttccaatagcaatagggtttttttaacggacgtattacaaatgtacgagtcagttgaacatagtattcctctttgtaagaactccaagtggatgcatgctgttgtctcaaatctcaattagaccttgctttgaggtcccttcattgccagtcatctgttctccttcccctgacttgagtatttctccagatatagataatacattttcccaactctgtgttccaagaactgacagtggctttcattcattttgtttgtttgtttgtttcttctcgttctcaagtatcccgcagtctactgtttcttccctccattcgtttgtcctttcagagtttcaaaatccagcataggtacttcttctaaaatgtcttacccttcacatacacacaccacttgagaccccatcagcctctgtccacacagtttggttacattcatagactatttttatacatcaaaatatttgaaaattttagggtaaatctcagtagtcattcatttttgctcttattcaaccaatactagtcaatcagcctgtgccaggttttgttgcaggtaccaggtatccatccataaagaaaacaacgtccctttgttgtggaatttacattttagcaggggaggcaaagaacccaataaatatgataaaatatcagattaaaagtacgatgaaaaaaatcatcagggtaaaggaaaaagggaagcagtattttagcaagagtggtgaagagaggaggctgagagtgtgacatctgagcagagacctaaatcaagtcaaggaatgaaacatgctactatctaaagaaatgagtcaggataaggaactagtaagagccgaggcccagagatgtgaatatgctgttccaggaacagcaaagagactggttgatatgatgtgaaaaatgagaagaaaccttatgatatgtgtcaagagaaaaaaaaaatttaaaagcatgcttgggaacggaggcctccagatgaaaaaaaaaaacacagttcaaatccttgttcatgcatttagtttgctttgcaatcttgggcaaaatgttaaatttctgtacgttttatcttcctcatttttaaaataggcacaaggacatctacttaataggttcattgtgaggagtaaatgagatgatatatctaggatgcctggcattatatcatacacttaataatacactgaataaataatagttatgtctatttatttccttatcgtttttattattatttcaatgcacagacctgttcataagataatgataaatattagtggcagaaactgaagatgttataaattattaggaggcgggaccactcagttcaatgtatctgttttaatatagtcagcaaaagtgtgaagataccaacaattaaatttcaatgcattcttccatttcactagttttataaactgatgaactaccagaatgtcaatgtatgaattgcatactcattcttaacaaacagatttgcaaaattatgtgtaaaattagccctcagccttccaatttgttattgtcatatttcatggaaatacataatctgtaaatttttgttttaatgatatgtgaaactgcctaaagtagagtcttggcaactacttcacatttgtcctccagagatagtggataaaagtgtcaataaatgaacactctatattcactaatcacaggcaagggacaaggaacagagtggtcacaaaataccacaaaattaaagcacattccaaattaaatatatatgtttttattacagataatgtttgctagactctttctaattatctgcaaagattttaggaatgttttaatgttttaatatttacacacctgtgtatttcaagttcagtcaaacactattgttaaaactaaatcttctcatctctaataataagatgtgaacttatcttggaaggtggttattaggatgggagagataatgtatttcattcaaagtaaaaatatttctctgtttctatctttctctttctctgtcatctatttatcatctatatccaggtatctatgcacctatgtagactagcattcaatgaaccatagatattattagtagtagaattgttactaatattaaaataagaagtatttaagaagaaacatgtcctaaagcataaggtcaattattactctcatgttttttggcatatgaagcctaaaaagtgtcaatttcaagagagtattaataaagattgtgataactgaaaggttcctgcttgaaattttgtgtggtcttacaaatatataaactctaagcatttcagtgagccaattactgactaggcactatgtcttatgactcttttgtcatagtatgtaaaaaacaaagagtagagacatcataaaaattatagtagatgggcactagggaattacgcaaaataatttgtagatttaatgtgaaaccaaaacatctgttcaagtcaatttcccacaggtcatgtggcaaagagtatgagttccagactgaggagaggaaaaggttgttcttccacagggaaataaactgagtgtaataaacataatttttcttcttaagcattatttaaaacaaaaaaaatgccattaaatctatctttcctgcctctcttatcaatgctcccttccctttcaccacttgtttcaaactccaagccttgggattttattttggctttttgccttaatgtaactaaaatgagagcatcacaaatatgaagctcatcaaataatttagcagcattttcccctgtttttaactttctctttggaaacgtagatttcgaaatttaagggcccaaaatatgaaatgcaattataataggccatttgttcattcagcttgataaacttgaataaatagtattgaacttttaatgcaaaaagaacaaaacaaaatagaactctccacgaagaaacttttcaatgtttgcatttctgtgtgaggagaagggtaatgaatgtgggaaccttaatggaatccatgttcttccagtgatgacaagggtcaaaatggagaaaaatggtcactttctacccagtacattatattagttctatgtggacaactataacatagctgatgctggttttcaggccataaatgtaggtatgtattttcctactatttataaggcaaaatttctatttgtttaatgatttctatataggtagattattctgtctttaggattaaaaacgacctgtagaccaagagactttctaatgtccaccttagagtatatggcttttactgttacagtttccatttcctttgcttgcccctttgagagaaggaaaggagacatttgggatacatacatcaatgaggagctattaatgaataaatgaatgaaattgtcagtcaatttatccacatgatcatcaattgccaataattttatcacctctgtgggattaagtagaggtaacagtttagaaatttgattttttgaaagcatttaaaatgttcaaatatatcactctggtaactaagggaaagtgtattattttcttatgcttagtcttattttggttttgcctttttaatttaaattgaacacttatatcaaagagcttgcaggattataatttgaatttttgaagcaaagatcattttcttaacatcaaacaaagagtagatacaataggaataaaatcggcagaaaaacaagagtatcaaggacagacggggagggtgggtctgtgttagcatgtattgctatgaagaaatagccgagactgggtaatgtatttttaaaaagagctttaatcgattcatgattctgcaggttgtacaggaagcaggacaccagcatctactcagcttctggggaggcctccgggagcttttactcatagtggaagatgaaacaggagtaagcatgtcacatggccagagcagaagccagggggaggttgccacacatttaaaaaaaaaaaaaacaaaacagatcgctcaagaactcagctgctatcatgaggacagcatcaagctgtgagggatccacctccgtgactcaaacatctcacaccaggccccaagtccaacacttggcattatatttcaacaagaaaaaaagtttaattggctgatggttctgcaggctgtacaggaagtgtggcacaggcatttgcttggctcctggggaggcctcagggagtttttgctcatggcagaaggtgatgcccacacactttaaaaaaaaaccagatctcatgaaaactcactcactacactgaggacaatacaaaaccatgagggatctgtccccatgacccaaaaacctcccgccaggccccaccaccaacattgggaattatatttccacttgagatttgagtggcggcaaatatccaaactatatcagggctcatgtccagttatatgtcaacatgcctgcattcgaaacatcctgtccaaatcactgccttgtcataatacttatatttttctttattgaatacgaacacaagaagattaaataatagcatttctactttaaaacagtgggcaccatattaacattggaataatagtagtaataacgatagtaataacaatgatataggctgggtgcggaggctcacgcctgtaatcccagcactttgggaggccaaggcgggcggatcatgatgtcaggagatcgagaccatcctggctaacacagtgaaaccccgtctctactaaaaatacaaaaaaattagctgggcatggtggcaggcacctgtagtctcagctacttgggaggctgaggcaggagaatggcgtgaacctgggatgcagagcttgcagtgagccgagatcgtgccactgcactccaacctgggcgacagagcgagacttcatctcaaaaaaaaaattaaataaataaataaataaataataacgataaaaggatatgtgtaggttttttttttaataggctgttaacattaataggcattgtgatttcagggatatcatcaaacatcctggtcctaagacatcccctattgaataggaagggcttaagttaaacttctcatgagccacaattttctgattatatgtttggtgtgtgtaatagccacctcagtgatgatttgattagcctggacccttacataatcattgaagtatacccatgttcctttatatacttctttagtgttgaaagctcaaaattaagcaaaatagtccccttgataatgtttagattcttaacatttgctttctaaagctggcaaatactctcttcccagtgtcatgaagttaaataacatgttgcttagtgaggactttaatgttgccatgccataggaagaccttattcgaaatccccttacctgggagaatgtcagattattaccccccaacttgtttaacacttttaggattttaaaggtgttcacatttgtattagaacaaaatactattgagaaacatttctagaaaaaaattatctttccaaattaaaatcagtggtatgtaatgtaggagtctgattataatgattaaaatacatgggctttgggcatactgcctaggtgaaactcctggtttattgcatcactattagtataacctatgggagttaacctacgtaagcctcagttaatttttctctcaaattgatctaataatcgtctctcataggcttgttttgatagatatttcagtgtatataatatacttaggacagtgcctgatatcagtaagtctccttatatgctatttttctttctattttaattatttatgcaagagaaactattatgctttaactcaattaaaataaaatgcctttgtatttattcatgtcaaaggaaatatgcaagtattgcattcacttcctaggtgcctttttgaattgagctttgcatggttagtttgtataaaaggttcagtgaactttctcataatgattttttattgaacatatggaatccattaagtgttagcaaaagtcactatccactgagctgtgtccaggggctgacagttatgtctatctcttgcaaaaataaacacatacataaatgcactaagacgtatattacctgtcgtcatctcttagagcatttccatttttcttttaagttttttctttcaatgggttttttatctttgtgagtacatggtaggtgtatatgtcaacggggtacatgaggaaggtgtatatattgatggggtacaagagaggttttaacacaagcattcaatatgaaatagtcacatcatggagaatgggttatctatcccttcaagcatttgtgctttgtattacaaacattctaattatactctgttagttattttaaaatgtaccattaagttattactgactatagcaaccctattgtgctatgaaacagtagatcttattcttatttttctaacatcttagaacatttccacaaacactacctgcttgttaaatatacctattctaatcttcatataatcaattacttttttcctctagaatgtactatgacacatccatggggaaaatgtagtaatctaattaagactatttcctctcattttatatttaaaagaatgtgctctatcaatttatttacttgtacagccgtaggcaacctctaaaatatttaaagttcttaaaagtcagatatttcagttaatattgtgattatatagttgattttgatgaacatgttcatctaccagaaataaattatacacacacattgatatggttaggctttctgtccccactcaaatctcattttgaattataatccccgtgtgtcaagggagagaccaggtggaggcaattggatcttgagggtggttttgcccatgctgttctcctgatagtgaatcatgagatcagatggttttataaagggctcttcccccttccctcctcactcattctccttcttgccaccttgtaaaggaggtgccttgctttctactatgccctttctactatgcccttcaccttctactatgattgtaagtttcctgaggtctccccagccatgctgaactatgagtcaattaaatccctttcctttataaattacccagtctcaggcagttctttattgcacatatatgtgtgtgtatgtgtatgtgtgtgtgtgtgtatatgtatgtatatatgtatacatatgtgtgtatatgtatgtatatatgtatgtatatatgtatacatatgtgtgtatatgtatgtatatatgtatacatatgtgtgtgtgtatatatgtgtacatatatatatatatatatatatatatatatatatatatatgaacagagagagagagagagagggaggaagggagagagggagggaagcatggagaaagagagagtaatagcctaaatagaaataaaactagctccaagtacaggttcgtcaacactctcctatcatacccccaccaaagttaatgttaaccacttggagccctgttcttccttagttgtggagtactttagcaaaattttaaatctaattatgcctaattcaacgacagtgctaatttgaaagtgttagaaactgaagacctataataataatgagagttacaaaacataaatagtgagacaatgatgaatgtagtggatgcatgtacgagggctatcatttgacagtagagatgatgctcaaggacagacaatgagtctttcaatgtgtggagaatgtgctgctgttacagtgatgtacaggaaagaaacaaaaactgaggaagtatcagtaaacaaaacactcaaacatatgagtatacagctagaataaaagcaacagtactagatgacaataagcccaatgttaactcagaaagcagaaggtttttaagaatttggggaatactgtggctgatgatacttatgtctcaagccacagatgccatatgggctctgcgcccagttgaatcggcaccacctggcagtaagtgggcaggtccacgactgccaggacatcccttccaacacttgtggagatcaccaggaaggggggagagacctgccttgacagattttcaatgtgggcgaaacaggtctattttgagaaaagatgttcaatagaacatatgtcagcaaggaagaagagatgatgcttagttctaaagctccaaagagctggcttacactccaacttggggaaaatgcatccgggaaatgcaagattaatctcatcttagccattcttttgaatggatggacatgacccctttctacttgaagacagaaaacataaccatattgatttcaggttttcttcattggtttccatttaggattgttcctccccatcttctttctgtgtaggcatcccagttcccaagtgttcatgaagcacgtatggccttcaggggatgtgtctgtatacattgttatcttatggatgcacggttttgtctgcaccttggttctgaatgtctttactcttgagcatctgcccatgggtccccttctcaaggcctcaatttcttgagtttaacactgcatggcccatgcagcttttcagttaagcatctcttgctatgaccaactcttttcctcagtcaactcccacactcttttcagggacaggaaaaatgtagccacttgctggctgcactctgaggcctcaagaaatttagtgaatctgcctttgcccttcttgctgatgaaatactgccacatcaggccccctcttcggaaacctacaagcatctaattttcttgcttcctccccaactttctttttgactcccccccatccagagagttcttatgtctactgtactaggaaaaactcattcttaaggtatggttttcaaatcattctctggtctggactttagctacggttttaaatgaagaaacaacccagagccaaaatataatgaaactatttccttcttccacagagtggaaactgctttggggttaaagggccagtgaaccaaatagaaaaggatctcagggaacacagattgaagagagagaagaaaaaatatgaaggcattgttggttctcttttgagtttaaaatctagtggggattgtaagcacacacacatatacacacacacgcttacacacacacaccagtgaagttatgaaggattttgtcactccaacgaccttgaatttgattatctaggtcagttgttaccaaagtggaatgtacatgcccaataatatgcgtgctaaacagttggggtagtgagaaaaaatactttttatttatcttgttctctagaaattaatattttgattgtatattttatagtgtatgtgatgtgtaagttgtgtctacaaaactagtgtcaatgtaatttaaaattacatatgtctgtgaatatatatttatatagggtacatgcttaaaatgtgtttacttctgaggtacatgaacatttttcccccaggcacagaaagacaaataccacatgatgtcacttaaatgtgcaatgtaagaaaagttgaattcatagagatgtagagtagaatcatggttaacagaggcttgggaggtggagtgagggaatagagagttactgttcaaagattacaaagtttcaactagacagagggaatacattttgagatctatttcaggaacattttgagaccctcactctaagtaataggaaatcattactttagttaacatatttgaatatgagttgtgatgttctatatcgtttatttggattctactaacccacacctagatttttatggcattacctttttactcactgtgaatatcctactcatagacagatgccctgggaacttggacttgaggcacccaagaactgagacagtgagatttgggggcacaaggatctatggataagttcatcttagtgatgataaaatcaatttggcatgtttcacggacagtgtgcattttagaaagggtaaagacttggaaacgggatatttttgagcccaagtgtttccaataaatagctgtataatttgaagcaaataattgattttttgttctctttgtgccctcgcctgtaaaatgggagaaatgtattcctttctcatccttctcatgaggccattgagagtatctaatgagatcagactgtgacatagcataataattctcatttcttgaaggcctattatacactttgcaagcactgtatgtgttgtttctacttctcttgttcgtttttcctggaataaatatccccccctcctttacattggattgccattattcaccctgtaaggaaggcttcatggttctcattttcatctgagaaaacttaggctcagagaagatcagtaacttatctaaaacacacacatacacacacagacatatctatgcccattattcttaacctagtttctctattcaggagttatctctgctgtctctgcttctgattataatctgtgtaagctgatccaagtgacacgattacagggaaattgtaagccctttgagagcagagactacctattgatatctacattttaaaatttgattttagccaacctgtttatatgcaatgactaacaggttagtttgacttgcaataaatattccaaatcctagactaagtaaatttattaatgtaatgatttaacttgattttttcattggcatgtttccctgaagtcgtcatgcaaaattgaaaaaaaaaaaagtatagtgtgtgattctagattgaaattcaggaatcctccagggttaccttgtttgctttccaaatagttcagattgcttagtctgaccaacaaggtccctgacacttggaactctgtctatccctctaattgactttgtccctgatgacctcgcccagagatactcttcaccccagctatactgtgttgctagagtttctctgatatcccatgctattgtttcctttgttctcttcataaggtaccatttcccacccgccaactcctgttttcctgatggacttttgtttcaccttacaagatcattgctaatgtatttattttgagaataaaaagtgtaggaaaggtcacgggacaaagctgtacaccagacctttcccagacgaacctagtgtataatctccctagtccaacatcatggcttaaggcagtcgatagatccgtcttaatgtcccttttgagttttctactattattatatgaggatttatttttgtctgaattcctccctagatttgccctagagagcaatgactatttacagtttattcctctttgtatctcttatgttaaggccagaccttggcacatattctagctgattagaagacgtttgttgaatgaccaagtgattgaacaaatgaccatgtgctctgccacagtccggtcagttctactttggtttggttatgtgtttgccacattaaagttgtagcctgggaagttcagttgtgagatgtctgcagaacatgaaaaattggaataatgaggttatttctaaaattgctataatttaaaataaatagtggtttattccatatatgaatatacactggaaacaaagaatttctagaatactggagattcaatgataacatcattgaaattaaataaataataggattatgctagttactttctaatttactagaaattgaccgtgtgcatggcacgtataatgagtatcatgggatagttacaaaaagtggtgcttagtgagtttctgtggaaaatctcggtaccaataaaacggaggatttccagaaatcgatattcctcaaagcttgacagtatttatgcacggttacactttgtgtgtctttcgtttgaatcaatggaaggaggctataactgaaaattattgttttagtgtattatatctttaataataagagttttaagaatctatcattagaaataattattcctcaatttgtaattctcaacatttgaacaaataaatgctctgtgtctatcagttaatcttgcccatgaagatttaataaagcacgctagtttttacaaatgtgattttagagatggtcattacttggtaaaatattttgtgttaacacttccatgaatatgttctgtgggaatatactgcctccacattgcttgctcatgaagacatgatttttcacatcatcctatcagtattttgagaaagagattgatcccatattctatgagcatttgaacattctctagtatttttgtttaatcattaaaacaacccttgaagtctatgtgctacactggttatttccctcttgactttcctttacagataaccctctatcataaacaacctatctatatttgttgtctccacatcatgttgccagccctgctttaacacactgcacattgacttctagcagcaaaggctcatgggaggtactctcatcaaggacactgatggtcctcatgttgctaaatttggtgggtcctctacagtctttatcctagttcaccttattatggaccactgtcaactctgttctgcttaaaacactctgttccttgcttatatgactctacactcttaactcctttgtgaattcctcatctgcccttccattaagtattgacgacatccttcatagttttgatctaggacctcttttcctcttacttgacattatgtgggtaatcttgtctttgaacgcaattaccattcttatgttgatgacccttaagctataattccagcccaaatcatttttctgaggaagctacaagaatacacaaatgtctaatagatctctatttagatgtccctcaggtgcttcaagcttaaaatactcacctgagctcatcacctcatctataaattctgcttctcctccctggctccctgatttatttaatatgaccaccatccacttagttgaataaagcagaagcctggacaccatctatacctccaattaatcactaagttttgttgttaaatacgttcttacattttctctctagaatgtcttattttccccatctttacacccaaaaccaaaagtcagatgaccctgatctcctgcttagatttcaaaacactatctcttgcctagactctggaatttcagtcttgctcctctccaatctatttctacaccctagactctggaatttcagtcttgctcctctccaatctatttctacacaaaagctagagtaattttttaaaaaacaaaaatctgaatgtgttcattttctgcctaaaagccttcagtaattcttatttgttcttccagggatagagtaacaactttcagacctagtttattagctagttctttaaccacaaaggactctctcacttgtctactccccctaacacacttcgccctaacctttgccattcctccctttcccttttccttcccagatggacttaagtcctttcagattcttaaatgtttcttcctccagtctcttacatctcttttccttgtaactctaaaaactacttagcttacgcaaggaaaaaggtctgtacaattcccggaatcagcgatcctaacgttccctgttgtttttttcgttgggacatgaattcattcacagtggctctaaacatcaccacccctgcctatctctcccattcctactttatctgagcttatccatactcttgaagacttacatattttttttctaccaggaaatcattactagccttattatcccactgtccaaaccaataagtctgattaggtatctgtatatatttaatattactatatgtgtttttctaacactctagtagaggagaaggtgtatttctttctgttttttagaagcctgtatttctgctattatagctcttaaggaactctcatgcaattgcctactagaatgtaagttacggtaggataagaactggatcagtcatatcacacatccacatataggacctagcaccatatctaacacacagcaggtactcaatacatttctttcccaaataactaaagagtttaaacaaaccaaaatgattaaatgagaagtaactgttttggtaattcttgtgtccttactagagtctaaattgagtgatttttatatcatcagtttatactcccctttcccaaccccaattctttcttttttaaattttttaaatcaaatatgccttaaaacttcaggatcagttgagtaaaatgatgcttttgtcgtcttttgcaaaataattgtatttcagaattttgatttagatattataaacacacctaaaataatagctttagtcttaagatgaagtgcttcttaaactccctaagatgggttggactatggatatgaacatggacaatatcacattaatttgtgtacacagttctaacacagggtctggcatataagaacaagtcagtaaatagttgttgaatggaattgaaaatttaagtagcaaataaagtattttgacctacaaagcaagaaatcacatttttctttttgtcacagttccttaggaagataattaattttttagtatttaaggatgttaaatatttattttatgttctatttactaggcttctttttatgaaaattaattggtgaaaatagcgtacatatcttcctttaccagaacatttacattttgggcagtaacgctggcttttgttaaaaaagcaaaatatgtgtgaaatttatgtttgagttgatttcaatgcattacatttccattttaaatcttctttgaaatactctatttttgacaccatgaaactgtattagatcttagtatgttagcaatgttttgcagttttagagccataattattttaatgaccactttcagcatatacgttttctacaggaaaaataatctcaagaacatgaaaagtgaaatctatattttgggtttcaaaatgatacattttagctaaaatatcatagttttaatttctcagtgaaaaatatagtgtggtaatttatgaagagactcagtgtttaaaaattatgactctatagtcaagtttatgtttataggacataggttattcaattacatttaaaataattaatttagaaaatgtgatcaatgtaacaaattttacctgttcttttctaaagctaaatttgttgtttgaagtgtttcttctaaaatgctaatgaactatcaatttaattgttgagcttagagttagaaacttaattatattgccagaaataaagaaacaaatggatcccaaaagattcacacattagaaatgtatgccagggaaatgcttttgaatgtgttcaagtcatggcttctaactcgtaacttataacttgtgttatgtctggcttcattcccttaagaaaaaggaataataatgccttcggagagcatcccagctgtaagagctatgcattggtgtctaaaaaagcttctcactcctcataccatcctggtctgggaatttaaaaaattgtcatcttttgataatctgtatcacatagtcttctgcatagtcatatgaggttagaactgccccataacttttgcagggcctatagtaagtgtgcaaatggttgcctgcatgccacatatttaatatttataaggtataaagtcaacagactattaaatatatcctatctgctttccttgacaattatacaatcataatgatatggacatctagattcgatttagaattctctctctctcattttctttttcttctttctttctttctctttctttctttccttcctttctttctttctttcttctttctttctttctttctttctttctttctttctttctttctttctttctgtctgtctgtctgtcttgtttttttaaatagtgcaagcagtttattccctggcaaggaatttggaaaaaactcaaatagcaaaccacttgatacaataaaataaattccttagagttttgtactggaatgaggcagcttggttagagctaaccctaagcctgttatttaggatacattggcttttcttaagcttaaaaaaaattttactgtgttaatgacatttaacatgagatctatcatcttaataaatactacatgcacaatacattattattgactctaggtagaatgttggacagcagatctctagagctaattcatcctacttaactgaaatgtaatgtctgttgattagtaacttcctatttcgccctatccccagcccctggcaaccaccagtccagtctttgattttatgagtttgactgttttagataccttatttcaagtaagtggaatcatgcagtatttgtctgtgtctgtcttgtttcacttagcgtaatcttaaggtccatccatattgtttcatattgcagaatttccttttataaaggctgaatagtattccattgtgtatatataccacatttatctattcatctgccaatgggcatttaggttgtttctgcatcttagctattgtgaatctgttgccttttttccctacctcctttactccatcctgcactgtgaggaactctgtgcacatagatctggtcgccccatttcccacccacatgttcaagtttttcccactcacctcatgcaaagatttaccccttagccatacccagtaactgactttgaaacatttgcccagggagttgagggattctgaatgccagatcatgggagcggggcttctagtgagcatgttggcttggtcctacagactcctaatcagagctttgcctttgaaagcatggggcccaagggcaaggaccctacttgttaaggtctaaattttttttctgaaataaccacatcgagcttttatgtgtagatggcctaaattgggctaacccagaggcagtgacactcaagtagtttacatctaagcgctttccatgtgcttcttttcccatttctgttacttcttacaaaataaaaaatcagcatctcaattaccctgatttgatcattgagcaatctaaaaagtatcaaaatatcacatgtagcccccatatacatacaactgttatatatcactataaataaatatatacacattatatttaaaaatcaatactttaattttacatgtttaacaaatcactagcatatacattccagattgaacttacgagggatgtggaaaagattcagtgactaaataacaataaagtactctaaaaatgaaaatgtgaaatggagacagtataaatctaaaatcatatcacttatgaagtattgtttcaaataaacaataaaatatatcttcaatcaatttaattttattttagttgtataaaatctttcggtcagcattaacctaattggaacactaaataggtacatctaaaaaatataatcccccccaaaaatatgtagctcataagagataatgcattgaacacagataatattggcgttaaaaacagaactctaccacatttgcaacgaaatgtttatctgttcttcctactagaaaataataaaatagttctgcatgagcttgaactcgaagtattaggtgtacaaagaccttttagtgaatgaatgctagctgaaaagcaaattttaaatatgaaaaattagcaagacaaacatttgaatttgtgggagatgagtaaaactcctataaaaatgaattgtttagtgttaaacagattgtgtatgaaatattaatggcatattgtcctgagctccccttccgctgtttccatgtagatgactgaatttcaaacagaaatatgccaggaatgattacgtgaatgaatattactacatgagattgcttaaagagtatttcttcttttgccttctttttactttcgttatttcatttagtagttagaaaatactgtctacaaatatgtgagaactgcttaatttatttttgagacattaattaattcaactaaactatattgactgtgtgagagagattcccttggtgaatatgtggatttttgcggtggtaagaactctcctctggagcgcaaatggtattgctctaggaataaagcatatacctcaggcccagatgaaccagtgcaatctacagtaacaggttcaaagatgacctcatgacctactgtggactaataaaaatcaaggagacctactgcaaaggtttctgggaaattctttttctcttgcgttgaactaagtaatatacatatgtgatagttagagctgcagcctttgtaataccatgacagaagataacctgaaataaggctgacagacacaagagggagacctaagagtactgagagatatggagcaggaccccctgattgaacttcacttgcagcccccttctgcagttttcaatgacgtgaaccagtagaatccctttgtttactgtttttgattaatttgagtgcagctttatgttatgagcaactaatagcatcctcactgtcacaactgccctctatacggcaggcactttgtgatactaaagaaagcagtatacagagtagagcccagtgaataacagggcagatgttgcaattaaactgcctgtttaaattctagctcttccactagctaacttgtgactatctaagtaatttaaccttcctataatcatacctatcttgaagacttgttgtaagatttaaagcacaacagtgctactataaaacaggtatacagtaaagcttagctacttttttattaggccatatgatatcatttcattaaaatcttatagccatgctataaggtattatgatcctcaatttataaataagacagctcaagttttggtcaagtgactttaccaaggtcatagagctagaaaataatgattccaagttacaagccaaacctcttcaatgccaaatttacatcatcccccattacttgaagtgtaagattcacatggacagaaatttttgactgtttgatcactgctatctccttatcatctaaaacagtctctggtccatattaggtgttcaataaatatttgtagagtacataatttccttcacagactccacaatctggtgaaggaggcagacatgtaagagaattatttcaggattccacagttgatgctgtaacagagctaaatataatgaatggaggaggaatgaataagtttgtctgggagcaatgctatggctattgaaataagtcttgctcatgctttgattgaaatggtggatatagatcacacaacaaataacaattagataacagcttgttgggagaaagcgaggatcagtgtttgccataaacatttctcatagctaatgtcaggtgtttgatttctcaacattttatatctttgactttgattttctctgtttttattttttaactccattctcaagaagtctgcacataagagtttcaacatctagcacttcataactccgtcatctcctctcaggcttagagcaaattctgagacgtggatttatcgtcgagtgatttcttcctggcattttatctctgagaccaggatctggttgctaagcatgtagacatagaaatgcatttcttcattgaaccccataggttcaaactagtggataatgagcacaatgtcaatgtgattatttgtaatgggggaaaggttaccggagaatattacacgaccatccacatagactaacattttcctcatgactaagtttacttagcaaaacaaattaaaaacagaagtttgtttagcagcacagaattgaaggaagacaaccagatggttatgaggaagattcatccaaactatgccagaactgaaagaaattaagttcattcagtacaagaattgtctagaataagagaatccattttgtgtcagcacttcccaagttcttgttaatgctaccttaagttcaattcaaaccaggcagcatttattacgtgttgtgctgggtcctaggaggaccgcgttttaagaacttactgtgatcttctagatcaagtttttatttcaatatttctacctcatttctgattcttaggtgttccttatttcccaatttatcccctgcagaaattgaggcaataagatgtctatcttattgcctatggtgttgattatttatgttatattctgttttgtgaagtttgacctctacctaattaaattacattttcaattgtatcttggattgatttattcaataagtattctttaatatttttgcatgaggtcggtcaggtttcatcagacattaggaattaattataaaaatctctagattggtacttggagcttaaaggaataaggtggtggaacgttaaatgaggaggaaagaaccagcagagctgggataaaattcatctctatcatcttcccacctgcttgatctctggcatataatttactatccgtgaacctcaggtttctcttcagaaaagctgcagggttgttgggggaaataaggcaattcctgggcttcagtatgttcaaaacagagcattaatattattatagacttttgatgatttacacaattttagctttttggcaagacatatttactagtactaagtaaaagcacgttgactttctaaaatgaaaatgtgtatgtgaggatgaagaaaaagaaagtgttttgtttgataatatagcattataacactgcacaaaaaaaaaatggtatatgcagagacttccatcacttgcttatgatgccgcattgggatctcattaataagacacttcctcagacacttcctttgtgttcaataaatttcaatttcctcctttccttcagttcacttcaagaaggacggcagcaactttcttgttgccaaacctgacaaatgttttttagtgctgattatactcgagcattctgtagcaaaatgctgtgggtgaaaatgccttccttcttaagggaatttagcttctgtagtaccagaatctccttgttgaatgaacatgtactgcctaagtcttagtaatccctcctttttgagcccattttctggcatctctccctttaatattcctcaaaaagttggatttttcctggacttttcatattacagactttcctttggtcatcctcatccattccgtgattccaactacattttccctccatcctggcatcttctttcttccagacttgtatatgcaactgcttccattcatacacttgaccaaccttttaatttctataagatcaaaaactcagctcacaagctttcccctaccatcgagcggggttcttcttttgcttctttgtttcagacaatggcaccaccatactcgagtaaggcacgttcatttatcaggtcctaccaaatctacaataaactctcttgaatttatccacttgttttcatttgaacagtcatttctttacctgggtagcctgcaccttctacctgcattgattcagcagtctcttcaccactggctctccctccctctcctgcctctcttcttgctccttcaatttattctctactcttcatagtgacttttattaatgcaaatatgaccttataactcccttgcttaaagacccactcatgtttgtctttgtatccataacttccggcctagggcttaacgcatagcaggtgctcagtaaatctgtggtagatgaaagaacaagttgtataaatactgaatggtctgatgtgctctttgttgtgtcaagaaggacattttgcagtcaggatagctacatcagtcctttagtaggcatttgacagcactcgcattattcctcaagagaagatggatgtattgattctgtatttcaaatgacataacttttgtgaaataagaggctgccacggtaatctgagggatctctcaagttcaagggactccacagtgctttgtgtaaggtaacaggctaaagggttcagtcttaaactttcttaagactgtagttcagggttcctatggtggggctataaccctgaattacatcctctttcatttcatgctgataatgagaactacaaaccaaggggtattaggaaagaatccaggtttgatgcagggaaaaataaaaacaactgataatctctagtgtccccaacttcaagaattcctttcttctttacaccaagctttttttctctgccaggacttactttgtcttctacatgtttaagggagaaaaatgagttaacagaaggggaggtacagcatttctatttacttagatgctagagaacaggatgaaaggtatgaaaaatatgaaagtctctctctctctctctccccagccttcccccgcttctctctctctctctctctctctgtgtgtgtgtgtgtgtgtgcacgtgcgtgtgtgtgtgtgtcataatactcaacctttcttttctttcaagcatatgttgtggcagagacaagtgtacatcaaaattcgtggtccctctttcatagtatagagttcttgctaggatccagctgcaagccagcaactacatttcccagccccactggcatctagttagagccatgtgactagttgtgaccaattgaatgtgagtgggagttatgttgcaggcataccttttccatcttcttacttcccatttgctaaccttatggaaaagagtcccaaagacctaggagatgaaaaagcctaaaatggaaggactcagagtccctgaattactgggtagagaaaagctgtttgcagatgggaatgcccattttgtagtattctttcttttcttaagccactaaaattgtgggatctctttgttatagctactggcattaacctcttacgtatacatacagctatgtgctacaaagaggaatagatacattttttaatcgttgaaaggggagaaagaaacatatttaggaggaaaataatttagtctctacaattgaaaagtgttttatgaataatattttgttttggcagcatattaaatctcaggcagctgaactacattaattttcaattctctatatatgtttttgtcttcagggtttagtaacactgatatataacagtttctttcttttaatttccaaatttaaatgtctaagtttgccttctaggcagaaattaagtcccattgtggaatgagattggatcaacacttcaccaagatcattttagttctttgtaatcttaaatgaaataagctaataaagcattaaattagcatgttgtaaaacttcgtgaagttttaatatgcttctaagtggcagctcttagcttattatctctaaagctaaagtcaaaataaatgtctcagttgatgaaatggagatgaggcaacattttatcaaatttaacaaaatattttatatctgaattataaagtccagattatctagtaattatcatataaatgtatttaaccagacatgcatttttctctaatcagtagccctggagtctttggaccacaaatgtgccttatctcaaatgctttaactgtgacattttgctttagactagctcgactacttctacagaaattatacacttcattcacattcatccagatgaaaaaaatacatgtagaaatgatcataataagtaacatttgtttaggatttcagagtttacgaagggtttttctattcactttctcacttgttcttcatgtaaactggtttggtggacaactgtcattatccctgttacctggagcccctgggtcttagggagacttcttgacttctcaaggtcatgaaggtgctaactctgaccgtgtttttattcctactgtgccacacttctcaggtaaaaatcatattgcagacactttaagagaagtacttaagaaaataaattcctccagagaattacatttaagttgtttcattaactgcagtgcataaagaaaggaaaagtgttcccaaacccatgtagtattttgctattgcttatggtaatattctgcacacctaatattgtcagcataattttccatgtaacaaaatgtcctaaatcagcaatgtccaatataactttgtgtgatgataaaaatgttctgtctctgtgctgtccaatacaacagccactagatacacatgactactgagcaatggtaatatggccagggacactaaggaactaaatttttatttaatattaaataacgtttaaatttcaaaagccgcatgcggctagtggttgtcatcagatactgcagttatagaaaattagaatttacctctttaaatactaaacctatttttaatagtaggatttttaaattaaaatagttctaagtgcttttaagtgatacgaagtcaaatgcaagatttctgttttaatagtactctcaacccagagacaatcttcatgcatccttatacatgttctttgttgccttattctagttttattttaacattaaatgcctctgttctacttgatattgacttgcttcagagaacaccaagtatagtggaaagaaacacacacatgaggacttgaggctaccaaccaggttcaactaaatgcactctgatttaattgtagtattgggatcccctgttgcatttattgaagaagaaaaaaactttgcaaccaaaaagatatttgaaagcaactgttcttcttggacacatgatccctcataaagtggggcttcctgcttttcagagacttaatttctgttcatattcatttcagcaatagtaataatgatgatggcgatgatgataataatcatgatgatgcctaagtgttgtagtaatgcttcttctgagccagacgttagtcaaattactttctctacattaattcaggcaatcatcacaacaatcccacaggacaggttttattattatacttatttagctagcaaatgatataactaggttaagttacttgcccaaggtcatactgccaagacagtggctctagtgtccctgcttctgaccatatgttatgctgcctatcctagagcttttctcttctaaaatagtaaaataatatattctttgtttgtttcatacttttttttttttttttttttttgagagggagtttcgctctttcgcccaggctggagtgaggtggcgcaatctcagctgactgtaacctctgcccccaccaggttcgagtgattcccctgcctcagcctccgaagtacctgggataataggtgcccaccaccatgcctggctaatttttgtgttttcagtagagacagggcttcaccatgttgaccaggctggtctcgagttcctcagctctggcagtccgcccgccttggcctcccacagtgctgggattacatgcatgagccactacacccggcccatacataaatattttaagcgaagtacacatgcatgatcatcatacttttaataatttcatttaactgtttccaaagaatgttagtatgaggttttctttttttctttttataatttcaacttttattttagattcagcgggtacatgttccctggatatagtgcatgatgatgaggtttgctatatgaatgatcccaccacccaggtagcgagcatggtaaccactagttcttcaacccttgcctgttcccttcctccctccttcctctgtagtccccagtgtctattgttcctgtctttatgtccatgtgcactcaatgtttagctcccacttttaagcgagaacatgcagtactcgttgtctgttcctgcgttaacgtgcttaggatagtggcctccaattgcatccatgttgttgcacaggccatgattttgttagtttttatggctgtgtagtattccatggtgtatacgcgccacattctttatcctgtccaccattaatgggcacctaggttgattgcatgtctttgccattgtgaatagtgctgtgatgttatatgtactttttggtatattcaaagagaaatgctattttcctcttgacatatttatgtcaatttaacatatttatgtcccttttctttttaggagcaccattctcttcctttaacattataaataaaatattttttgcttttctgtttttgtaagtgcagttttattgacagagtgagacatacacgtcgatattgtgactagctgcatgtcttctattatttagaggtctcactcaaatgtagattatcaaattctgttagtgaagagggtagaacagcagaactaatgctggtttccttctctagcattatttgatgataaactaagatgataataccccccaggtcttagatacctgcagtaggacaggcaccctacatttaatgctcctaggaatccttcaaagtgatagcatagttattatacagtaattgagaaaactgatgttcataagttagaaatttttccgaagttgcaaagaaagtgaatggaagaattataccaagttctggccgggcgcagtagctcatgcctgtaatctcagcgcttcaggaggccgaggcgggcggatcatgaggtcaagagattgagaccatcctggccaacatggtgagaccccgtctttactaaaaatagtaaaattagctgggcgtggtggcacgcacctgtaatctcagctactcgggaggctgaggtaggagaatcacttgaacccgggaggcggagtttgcagtgagccgagatcgtgccattgcactccagcctgggcgacaagagcaaaactccgtctcagaagaaaaaaaaaaaaaaaaaaagaggattataccgagttctctttgattccaagcccaaacaaatccttttttgcaatatatgacattgtttccctgtttgcattccccattctgtgtatcacacatcctgtggcctgatcaaaattcattttcagattctgaatttattttccattgaatctatataaactataaagacagaagatatatgtatgtgtgtatacccacgtttctcttccagtgtcaactgataaaaatagatttcaaagtctcaataacctttaattccctttttctcttaaaaattctttagaacttgtacatgacattctgactctagcagattttagaaaacagagaggccattagatattcataccttactattcagatgaagtattcaatgctaaattatgtaatttatctgctttgcaaattgtatggtcagattgagttccacaaaggagagataatttttaatataggcattctgtagcttccctaattattgaattagtttagagcaaaatccttaaattgtatcgttgctatgctcaaattttgtatacttgtccacgtaggctatattaagatttcattgaattttggtttctttctcagtgataattcaatatatcaactcaccactcagatttgcctttgggaaaatccaggccccttttctggatttttagagcagattttaaaaaagtgattctgtatatgtgttgaaattaaccacatctcattgcttttgaatgattgaggtaatgtatacctactactttaaaaaaaatgacttacttagaaggtgtccatagttttataagttccattgaactggtttatattgtatttagaaaggaaaactactccttttatccttaagggtgaaaacctggattttattatacaattaacacatatttattttttattatgaaatatatcacaatataaacgtttacagggagtgtttaaagtggtgttgtccaatggaaatataatgtgagtcaaatacgtagttttcaattttctactagccatattagaaaaagaaacagagaaattaatgtaataggatactttatttagcctagtatatccaaatcacaattatttaaatatgtaatcaatataaaaattactaattatgtatttaacctttttctttagtaagtctctgaaatctagtgtatattttacatttatggcacattgcaatttgcattagtcacatttgaattgttcaatagccacaggtggctaatggctaccgtgttggacagcacaggtttaaagaataatatgaacatctgtgttccaacattctgagtttcaaataagaagaacaccatcagtattttgggagaagctccctatgttaccccttgctaatcaccttccttccccccagagccaaaagtaaccattatcttgaatttctagtaaacaatgctcattttttaaaaaacgtatgttcaacacctgtatttgtatctttaaagagtagctagttttagtttgcctggatttgaactttatattaagggaaccaccccatctctaatcttctctgtgaattcttttctctcaatactatgttttacatatttacgttcatcaatgtgcaactcattgtatgtatataacacaatgtatatattttacatgcgtatggacatttgggttgtttttatgtttttgttcatcacaaaccacaacacacatgtgttcttgtatatgttttatagtgcatgtttaaaaatttctcaacagtattcgctagtagtattgtcaggtcatagggtatgcacacataaatagaaatgattgattagctgcaatttgtagtgcacacatatttgctatgtaagtgatccatgtttaagactttaactgaatttaaaaaatattttattggagccaatctaaatgagctaagggtttgtattgtttacataagcaaagattacacttactgggtcaattcggttgattaactttggatatataaaatatatagctagttgttaaatagatataattattaattggcattacttttgtttgtatataaaaatttcaaaatatccatgacttaagcaaggtaaacacccactgggtggcttaagcaacagaaatgtatttcttgcagttccggaagttgaacgtctaagattaaggtgatgacagggttggtttctggtgagtcctcccccattggcttgcagatagccgccttctccttcatgacctttcctctgtgtatgtgcatcccttgtagctgttcttccttttatgaggacattagacttattggattaaggtcctacccatatgaactcatttaaccttaattacccctttaaaggccctacctccacttgcaggggttaaaacttcaacatatgaatggggttgaggagacctacttcagtccataacagtttctatattctgaagatggtctttaattaactaaacagttaatgttactttactgggaatgtcttttggatgggggaataagctgatgatatgagaagggttggtgaatttctcataagtgtgaaatttgttgggccggcccagcatgattttcaatcaaatacgctttggggacaagtaggttgaatcactacgagaggtttaaaagaaagcaagttgtaattgcaacttttaattgaaagaaagacaggctttgttgatgtgccagcaagactgataactggctttaacgtagatagtaaggcagcagattcaatccactgatcgtgatctactagtgaatttcaaagccttatgcaatagaactacaaaccctttccttgcccaccttgcaggtggatccataggcaaaatgaacatttgcaaaaaagccgctatgtttcagaatttgtgctagggctttaatatctataatttctccaaatcctcacaatttaagaattaattcaacttagccccatgaatagggtgaaaattctgagatttaacaaactaaaataagttatctgaagacagacaaatagaaagagttgagatattctatttgaatgtaaaattttcaaaaagtagaatgacagcgtcaggaattacagtctcagtgttgaacacaagacttaggaacaaatttgctgcatgtaatttcattgagatgggacaaagtacagcatacgtaaggaagttttagaacaaataagataattattttacgagctttgaaacatgtgtaagaaagatacgaataaaagtataatcacatttgactaaaacatgaataccttaaaactgaaaagcactgagattatcattatataattttgaatattttaaaccacaatgctttgggagtgcactgtaatattttagaattggaattttaacttactggcttaaaaagtaatgtactttgttttaaattcaaagattatcttgtaaattcagttcgatctattgaaaaaattataaaattcggcaagaagccaaagaagaacaattatgtagctcaagataattaaattttcatgtttggctttagaaatatattcgtcgtgacatagtacatggtaatctagtgagcccagacaagtagttttctctttttgtcaaagggaacaatttgatgcgtgttcaagttgcttaaataaaattttgtatgtgctttctcatcacaagagaacaatatgatttttgaaattatttttactttataaaagaaaaaaaaaagccctcacagagaaaaaagaaaaaaatgatgatgtctttgaaaaacaaagttaatacagctttacatatatttgacctacatcagggttaatatttttcaaggtgaaacattagatgctggaacttgcaaaaacaggcaatcctcctttagatgaaacggacactctaagggttaattcattcactgagacctattgtgaagtaagccctacagagactgaaaaagttaaatgcaactcacaaaagttgctagaagagtcatgatgttaaaataaaataagtacacaatgtatgctgcaagtatacttagagccatgctaggtgcggttgagaagttcaatacaggtccaagataatagctgcttctcctatagaacatgtcttctcattggagggataagacctgtgtctatgaaacaggcgtaattacatagctctggaactatatatgccgaaataaatgagacagtaagtgttattgtactataaagaatgaagaaatcatgatgagaagtaacagttaatgaatgttttctagaaagagtaggatctgaattggccttaggttgtaagcagagtttatagatagagtagtggtatgtcagagtcactctgggtgcttaaacatacaaatccccaagtctcacccaaatgtgtcttcagatgaaaggaaaaaacaaatgacttgagctcccccgcaaagaacacgggtggtatattgagcagccaaggagtgaccagagtggcaggcccatgttgagggacaaaagaggacaattagaatatgattaatacaaatttacagtgggatgagttgttagcctgaggagcttgaatgtgaacctctgtgcaaaaaggagtcattaaatacttttgaaaaaggtgggatgggaagaaaatgacattctcaagacaattagatcgaacagtattaagcatgctgacttattaagttatgcaccttgagagggtggaatgagggaaaagggtctttatctggagtaagacaggaagaagctaagctgtaattcttactggactgtaaattatgtgcagatatattatctgtcatgttcgtgggcgcattctcagtacatagcacttgaaacaggtactcgataaattgtcaaatggatgcatggagtgatttccatgcaaaatctaatattgtatagtattagaagggggaaaaaagcatggcattatgctagcagaaatgtcatttggtattgaggatgaaacattttcaacagtttgcaaagccatccactcaaacattctgtcactttccaataattttgaaggatgttctttctacttctaccttattacacaatgagttgagtaagataaagaagtcatgtgcaacaaaacagagggagattttctgaaaggcactacaccaggaagttgttgtactcttgcttcatcttgccatcttggatatacttctggcgctacctccaggccagttcctcgttacatatgtcatttacttcccacatgctagactcaccgagttaatcattttgctgcagttaacacattttagcagagtgtaggtttatgggtgagaaggaaatcaatgatgtttcaatacagggttcttttcccatcccccttatttccacttagaactgtctctcaagtcttaatttgcctctaaacttttttcccagcttacattcttttctgaaaaatgcaacgacgatgccaatgtttgttgacctgaaatacattgtaaaacattcataatactttgagcagagcttccaaactcccatttgcctcttttatctcccttaccttggcccctttttgaaggcaatgtgatatttaatccgtttctattgatgcttcaaaattattgaaaaactggtaattgtatttttccctttacttatcagttgctagttgacaatgagtgtttgcccaaacaataaccaatcaaaaggtaaaaaggagattccagacatatctgagaagaaattctttggaagaagcccgtaaatggaatgggaattcaaacaaagccgtttccaaaagaaatactaaatggtctctaaatgcaaaaggattgctccccaagcattttatgggagcataaaaagctcccaacacattttatgacaatacttctactcaatgacttcttgtgttgacatatttgttgcactcgacgttagtatttacagcttcttatcccaaatatttacttaactgaagccctgatgtttttaaaaacttttcatctgtgtttaacagcccattttacagaaacttatttgtttcatcaggcagatatttactgagaacttgcaagtgccatatattctaaaaatgctgatgataaaactgtgaacacaatagattctcatggtgcttatggtcagggctagcacacacacttgtgaaatgatcactgatgatcaaaggcataaacactacatttggaagaaataccgagggatccagaagtatcttggaaacactagcaagtatagcagatggtgggattggtgcttcaaagaacttcttgtggaagatgttacgtatgtaccttctctgtgccaggcactgctaggaagtgctggagagaaaaagatgtgctagataccgcctctgtcctatgtgcttgtgctttgtggggaggtgagtaggataatcccagttctcatgcagtgtaatgagtaccatgacggaaatgcactccaagaactaggcagcatgaccagagataggacatttgagaaagacttcactcgggtggtactatcttagtctgggtgctaaaatagatgtgatagatgagtaagggtgacccggaagcaggagggaaagggaggggctttcagaacaacaagtgcgaggacattaaggtgaaatagagtataatagtattcccagatccttgggattgttctccattaggctaaaacaaaggtgttttctcttctttaagatttcatgactgcagattgcataacagaaggtcatttaatagacctctaaactgaaggaattcttgaattaaatcacaacatatcttccatggccagagaaaccattgcctccttatgtcgacattactaacagcaccagcacctgctgctcaggccagcgggagggttgggtgttgctgcctaggtaatgctcaccaactgatgtcctgccatgagtagttttgccaagttccacaaaaaaaacttagtgttctatcagcatctaatgagaattacagtcattagttaaataaaagaactattagataaggagcagaatgaacaacacacaatccatcagcttggtgaatggtatcagatggtttctgggtgctgggcagctgtgcatccaagtagacagggagaatatatatgtcctttgccttatgtacttgtttctctaatccaaaggcacagcaatccgtggaagctgctatgataaggtgtttagtggtgaaaatgtcttgaaagccagtagattattaaagtgatgtttttaaaaatgcagatggagagtaagtactttttatctagagtagtagttctcaaagggaggtcccgggatcagcagcgttagcatcacttgggaacttagacctgcatgggccccattccagatctcacttgaaaactctagggggtgtagcccggcagtctttgttgtgaccagctctccagggggttctgacactccaaatgttcaagtttcagaacgctactcacaggccatcatgctcggcatcacctgaaagcttgttagaactagaaagtcttggccccaccccaagcctactaaatcagagtttttgggagtagggccaagaaaactgtgggttaacaaggtctccaagtgattcttattcatgtcaaaatttgaaaagcgtcgatcgaactgttggttctcagctttgattgcgtatctgaatcacctggggagacagttgagctattccgggcccagatcacatctagaccaattgaatcagaatctatggaggcaggacccagacatcagtattttaaaatatttcttgaatgatcccagagtgtagctaaggttgagaaacactgttctaggattaaaggattaatgtgtttgagagtatgttaagatcttaggcaaatcacaagggtgttaagaactaccatcttcgcaaaaggagaatgtgcctcagatattctggtactgctttgattttaccttcagtagtcttacctattttgagtatgcttagtagtactaatatgaggcttattactaatatgttaaaatttgtcttttaattaagtgggtctaaacgttttaatctttaatctctgacccaactagaacttttctaaacattttcataatagtctccaccttgtcttctgaccttcacttatgttctttcagggttcttcgtgtgttactagtaatagtaatggcaagtgtttattgaacacttactatgtgaagattctaactggcttttaataatcacatcagctctgggaggtagaaggtagggatcctccttgcttatcaggtgagaaaactgtactatagagaagttagcaacttttcccaggtcataatatgtgacagctaaagggagcataatggttggaataaaataaatctactctagttgtaccgaaggctcatatttgtctcacgtacttgatttggtcgaggcccaaggggtcaatttccaatgcttggattcctggatatgtagagttgtattaaaaatgctaaaaacctattatgtatcatacaatcatacatatcacctaaagtattatggaaatgaatctgtattattaagggaaaaaggcctgtgtgaagaacaactgaaacttcattttaattgaaattaaataacatgcatcatacactaaaagtgcacgttatgaccccatgaattacttcaggtggctttgattcatgttacatacactaacaaatatagaagagtgatataatgcttcttaattaactactaatggaagtttactatttaactgcttcttatgtaagaatgtaaatgttttctgaaatatcagaacttttcattaggaagcacttttaaaaatagcaaaactgatatgcactatgatttccatatacattaaattgaacttgtaaatgatgttataaattatagaaaccaaggggatgttcaaattagatatttgtctaaataaatcatgtatggattgaacaaatactcattgagaaataaatgtattccttttctttcaattatctaggattccttgtttatctcttcagaagcaaaatgtcttctgtccgttttatttccagttaaacattcttcagattatgtaaataagttaacttccaatcctcttatttctgtttatctcaccactcttctaatttagacgtgatcaatatcttatctttttgcatttcatagacatcaggatccagaataattgagtgagctcaaaacaacaatggcaagaatgatgttttcagaaaactcagcaatcattcgtttaataaatattcattgcctaccaactataagcaaagtattggctaggccatgtggggtatacaaaaatgtattaaatatggctcattctccctaagaacttacacctattagacaaagtacatgcataaaaattataatgtataatagaaaataaatacaagccctagaatgcacagttgaagtacgatttgcatttattataaaaagaaagatgaattggctgggcacggtggctcacgcctgtaatcccagcactttgggaggccaaggtgggcagatcacgaggtcaggagttcgagaccatcctggccaacatggtgaaactctatctctactaaatatacaaaaattagccgggtttggtggtatgcacctgtaatcccagctacttagcaggctgaggcaggagaattgtttgaacctgggaggtggaggttgcagtgagccaagatctggccattgcactccagcctgggcaacagcaagattccatctcaaaaaaaaaaaaaggaaagaaaagaaaagattaatttcctgttagctaaatcaaggaaggcttcatggagaaaaaaatatttcaacacacacttgacgtagcagtgggatcaggctgatgttagggaagaatgaatgacattctacactgagaaagagatattcagtatatatatgaagagcagtagagaaactaacaagtggaaatagactcaatttacaatacttgcctgcctggagtactctatacgttgactgtaagttgcagtttactcagaacaatcccactttctacttgtttatcctatgtaatcatttattgggcctccttttgctctcaaaaatatccttgtttggataatagattatcactctgttcctaaatgaactgccctgtgtcctatcccagtaaaagggtgcattcgggcccttcgtaactgcctccactacatggttgattgaaaccagagcttggcattaagaagttagctgaacaatcagatttctattcttggaaaacccaagaatttcagaatagatacagaagctgtatagctttaataacatgacagagttgtagccttgaaagctatgtacaattcagaattatgagggagaagaaattgaagaaacagtagcagccgggtaaatgcagaaacaaatgagggagacacctagggggtgactgaggcacaataatggaagagaagtgcagtgaaattgcttgaactcttactgatgagatttctactgttgccttgaatccaggaccacctatatgttcattctttgtcatgctcagagttatgacagatgctgttattgaattccccagagactcccttatcgtctcacctcaaaccttacaataatcccttctatctttctatccatccaagctggcttaagtaaagtctatgatccatattcctagtaaacagagaagggaaagagactgaaggcaaaggccccaattagtaggctattgcaatatttcagggaaaaggcaatggccatcacattgttgtcccaggaatgagaatagaaatgaaagaagataatgaaagttgaaaggactgggggggcttgacaactgtttagacttgaggagtcagataaaataggaagccaaagataattcagaatattttgattttgattttcatcaccaaataagatagtagtactatgaagaaaaaatggttaaaaaacaataataataaagagaactcctccaaatagtaccaagggagggagtttaatagaggaaattaattccgtaggtgatgagagtcctgagaagccaaacgagaaaagatcaaaacaacccagggattggcagtcgcaggaagctgttctcacttatggctggggctttaagcacaaggtgacatgagatttcagaatttgaagtcgtctggaggcagctaggatcaggtggggcctgtcctgttcggcaggacctgcaaccacaggaggaggatgcgtcaagcagaaagttggaacacaagaggggattcagccataagccacaaaataccttccagagcagagagaaggagaaataccctgaattccgtattttccctgccatttagttccctgctattgccacacattgacgtattccatccagagaagtccattggcatatgagtctgggaaatgtagttcccagggggacatgatcttaagggaaatagacaatgactggtgcaacaactgacctgtgtgaggcaggagggaaaaaacaggaataatatagtttttctctagatcccttcatgcacaaagatgcaaaagaaatgtgttggcttaatgagccattctgggtggccctgtaggtggctgtcctacgaataagatttttagacaaaacagagatgacttcaaatgtcacaagaaaagtatcagacaggaattaatattgacttgatctgtcacaggcgtcaatgatttgcattaagccaacgatcttcattgttaatgtctgggaaattgccagcagcattacgactacttgtgtggattagtgtaacggattcccccactaacattcaggaaatcatgtcaagcacagagtgcctatgtaagagtggttgtgtctattcactacatttcttggactaataacacacttagccttcctgaattgccaacatgtacaaaaccagattggggttttttagttgttcatggaactatcatttattgggtagctcctgtagaagcaagatacagaaactctaattaggaataagacagtccctgtacttcaaagagctctcaggggaggcacacaagtaaacaagcaattattatcatacgttaggataataccgtcatggtgataaccactgagtgatagccaaacacatggaagaggtacccaagtctaacttggggtagtcagagactgctttcaaggatatccgagtaagtgttagctaagacatgatacgtatttctaggagggaaattttcaaggcaaggtggagattgtgcagtgacgcccagagcctggattattttggtgactgctagtatttcagaatgacttcagcaaaagttgtagagaagatagaagacaacaaagtataagcagaggccagataatgaggacctggaacagtggtttgctggtaaatgtttaacaagaggctcttggcggggagagagagtgtctgatttgcagcatttggcaaattttgttgcacaaatgctccagcatagccaatttcaagctaccagtgtgacgtcattgaatgcagaattggaaagaaacgggcagtagcacagcattgtatagttattttcattacccagatataatagataaaatatccagatggtatttaatagatatggatgcaaaatttaaatatatgtacattcatgtgcttcatgttactgaatgcgcacaacattcattatccattcattcacgtgttaatttaacaaacatttctgagcctctgctctgtgccaaacgcagttctagctgctggaattacagcactgaaaaaaaaaatttgtcctcactgaggtaagacaaacattattatgcccattttacagctgagaaattaagacatatgaggattaagcagtatagttaaaatcacacaattggtacatgaaggaatcaaagaggaaatcagctctcagattttaaatccagggactcgtttctgctataccatactacctacctagttgagctggattttatcatggtttccctatttttatcaccatgtggttggataagtaaaataaatatatgtgacctttcaaataaatttgggtcatttttcttggaagctcatctggtgtgaactttaaaatactgcaattaataatgattataataccctggaactctgtagcaacctcttttgaagaactccaaggagcctctaaatgtatcaaactaagttcttcaagtgaattagttatcatctgagagtaatatagacttttaaaaatgcattaattgtattaaccctttcaggcccatagacttaagtgtttctttctccaaataaaaatagtaatctctgtccattttctttagagaataatgaagtaattttcattgaatatgtagtcaacataattacttcaattcaatcgtgaaggattttaaaaattatttatgtctactaacttaaagacatgcatagatttcaagaacttaaaaatgcatattgcctctttgccctatgcctcataaaacaaaattatgataacgttgtgtgttacagaaaaacgcactgattgtaatgaagggtgcttcaaaggccatgaacttggaaagcaacttatttacagagacccccagcaatagcagctaaaagattgactgactccctttattttcagttatccttcagacacttttgacctcttcctgtgcctttctagtcatgtgcaatcttgtggatatctcttccttcctcttgttattttctatttcctctgtttctatttgtttctaaaaataatcatgtttgaatataggattagcttccttcccatctccccattaccaatctctcactataccgctatgttattaatcttcctgagaaatatatcaggttcattacattagttaccagctcaaaacgtatcagtggctttctagtcctcacaggctcaagttaatctgcatattctgactttcatattctgggttcatgcaaacttttcaactttccctcttatacctacttaggaggaccctcaggttccatcatgctcatgtttcaagccagaagttctcctgcctcttcctctatgtagactccacatagactatgatatcctgcttctcttttaatcctccatcttcagctcacagccacactcctctgtgaacagttaaatgattctcccacctcttacctcctatagcacttatttttcatgcagcatttttgagacttaattaaatctacagttttaaaaaatgtttttctaccacagtctcttattcatactaaaactttcaagtctatccattttgcttatacaaccacaccgttaggtcttttaggtccaagaatacaagagaatggcaaagcacgttgtttacatccacacatactgtgtaaattcaggtaattttttttaatcctatgatcctcaattacctcacctgtaaaataggtactactcatactgcagaactcttgttggaattaaataaatgagtgtattaaaaatgctcaacaagatttggcacaaaatcggtactcagtaaatgctaatcattattccctttctcttcaaagctccacaattctgtattcatatcaccctctttatatcatttgcaaaaatgtatcctattccaactctttccacctagcctcaacatttacaaacactcctggtgggaagggaaagcttttgaggagagcacatctatactcatttacttctcagggatgcaagctgccctgcttactgagggcatatgttcatagtcacaccggagcccactgtccccttatactctcaaatgggcagtagcaaatcatcttgatcggtagtaatgacctgtctctaaattttcacatgcatcagataatttcttttttagtaagtgttatcttacatatatgccaaaatatcaccattatatggaacactagctgaaagaaaaattattcagtagtcttaattttctagctaacataaattctctccattttcatcatccatttagattaaagactttactgttagctgaatattcagagactttattctgatttttaaaatttatgaggttcataatgttaagacttcaagggtgagctgtttgtgtcatttataatgcgtgactagacagtaactagaaaatggattgttgactttacaagatttctccccaccacgtccccccaaacctgtgctgctgtgtatttggcctgaaatctttacttctagtcaatctttggacctaaagcctaccagcttttagcatcctttaagattgacgtgtctctgggagaccaatagatgctaaaccaaatttcgtatgcacttggcaatataggataataacaaccatactccctgcaattgtttcctaacacagatgtaacaaattaccacaagctgggtggcttaatagacatttattctctcacaaatctggaagctaggtgtccaaaatcaaggtcaattatccctctgaaggctctggggaagaattcttccttgcctcttccagcttctggtagccccaggtgttccttgatttcaagcagcacaagttcaacatctgctcctgacctcacataaccctcttctttgtgtgtctttctgtgtccactcttttctttattattattattattattattattattattattatactttaagttttagggtacatgtgcacaatgtgcaggttagttacatatgtatgcatgtgccatgctggtgtgctgcacccattagctcatcatttagcattaggtatatctcctaatgctatccctccccccctccccccaccccacaacagtccccagagtgtgatgttcccattcctgtgtccatgtgttctcattgttcaattcccacctgtgagtgagagtatgcagtgtttggttttttgttcttgcgatagtttactgagaatgatgatttccaatttcatccatgtctctacaaagaacatgaactcatcatttttttatggctgcatagtattccatggtgtatatgtgccacattttcttaatccagtctatcattgttggacatttgggttggttccaagtctttgctattgtgaatagtgccgcaaaaggacaccagtctttggatttagagcccaccctaaattcatggtgatgtcattttgaaattcttaactaattacatcttcaaagaccctatttccaaatctggtgacattcaaggtttcagggacatgtgactattcaggggaaactattcatcccaccacatcccccttgaaaattctggaaaatgtagtaataaaggcttctgataaattagtgtggaaagtattcacggttataaattactaaaaagtctcactgtgagctcttaatcaaaaggccctataaaacatttatttgcttgattaaaactacacatccgatattttggttttggatttattattatttttagacttggaataactattttatgtgaaatagattccataactgaagcagcatacctctcaatttcccaacatttattttattattttttgtcttcacactacttaataactgaggaaaaatcatttagaccaaagttcaccttggttgacaccatccagacagctacaggaaataacaatggaaactaaatctctaagaaaaagagtctttcatgtgaaatattgcagagttgattctagatatatagctgttggaagaatggatactattacatagatatggcagagtggtatccagcacctttcaacaaagatctttcagagtcagtcttattatgtctggagaatttacccagggcttaggtgcttttactgacaatctaaccacctgcaccccacccaccgtctaaagctaaagtttattggaagacttaggaaatcagtcttcggaatgtttctgagactggtacacccaccacttcattaaagtgcttcacttcacttcattagacaagaagtaaaatacttgtcaggaaattatttatagtaccatgtatatgggtatcttatttaatactacttaatgatggtactacaagttatataaaatggagaaataagtcatcaagtttgacaataatgatatttgatattatcattatcttttttattcgttcccacagaagtactctgttattggtttagaaaaatgatatttgatataataaagaaggaaaaggtggtaatattctttattttttgtatctttataccccagctctttcaccaatctcccccatctctgtagttctcctctggtgtccccaggcagtgaactattcccagtggttagggaacatctcattgagtaagttacatcaacatttcttcacatttcaggacaacaggaacagtgccaaatcctagcccattgttcaactctcaagccttattatcctaataacacatccatcccaagaaagaattcatcaagatcagagaggaatacgtataattttttatagtacagtatttaaaatgaaacagcttttggcccgcgtggtctcagtgggctcaagggggaaattcaggatgctagctcatctcacaccaagtttaataaagggtgtcctataaaaagctaatttcttgctggtaaattgctttttaagtaatccttgctgttgcaagagacccattcatagcgctgacactgggagccatgttggaaaggctagatatgctctgggagataaggtaagatccaggtggaatcttctctttacagaatgacaatgtatatagctaatattgtcctttgaggctagtttgcatgcagttgctggtatggcactgctcagcagcctgctgcagataagaatgagtgatgatgccctagattttaatggaacttttagagtgcatgcagcagtggggtgcagtcttcagcaaagaaaaacgagctgacttgcaggcatgagagatcatcaagaaagataaagaaataggacatccactctaggttaggcaaggctttttagaggatattatggaaatgagcaagaaccaatttaatttttataatgccactccatttaactttaaaatacaaggtcaaggtactgtgtttttcataatgattaaagatttggagcactctttctgttgaaacatactgcatctgtttggcagaaaaaaaaagtgacaaagaataaaactgggatcagagaacaacaaaaacatattctgtcacttgcctaacacaagttaaaaagcaaaggaaaaagagacaactctgatggacatgttcatccttatcccaacagaaggatttatttacctaaggtcctattatttcaagttactttgatcccaggatggtaacataaaatgtacattttaaaataaaatggaagtataagatcaataaaaaccacatatctgtggataaaacagcagattcaatcttgtggctgaaagtttgctttaacccaacatttggtaaactattcactctgtaatttattaaaagacatactgttattataaaactatctcagtttgcatcttgttggttctgtcaaaatttcatcctgctaattctcaacttgtaatatctctgatatacatgattaatctattttaggaataaaacaaaaactacctttatcttacgcatttctaggaagtgtttttagatgtaaagtaggggtaattgtagtatagtggaaaggattttgaacttgaagccagaacatatgtctctgccaaaaactaggtgtgtgaccttaaataagttacttagcttcctgaatcttagtttgtttagcttttttctataaagtggcacacctatccacatcacagttttgttgtcaaaattaaataaaatactatattagaaagaaacttttagaaagaaatttataaactgaaatgtactatacaagtttaaatcattctcattattttcttaccctaaaattttgaccttatttttcttagcaaatggctgaatctgtaaaatttaacccccacgcagcatctggattcaagagaactacggtcatttctttatacagaatactaattatacacatatagcaaaacacaagttttttccaactactctgtgtttttaaagattcagtgtgggcagaaggaattttatcaactatgttaggggaaaaaagtctgaagaaatgaaaataatgagaaaaagcactgttgatttaagtgcaggaacataaaacttcaaggcaaatgtgaggccaactgagttcatatatatcctcacaaaatgatttagttaatttaaaaacttttctaataagcaacacaggtaatcccaaattctatcttttatagctctaagagtccccataatttattcagcaattatttaccacccacttattataagaaaagccctgggataagtcttgagaagaaactaacaaaaacaaaacttgattgtttgctctcaaaaagctgggtctaaaataggcaaggtaagattttgttttgaggagcccgtattttccagcactgtccattgtaacattaaaatagtttgccaaaatcctcactctgtgggtgtatttgcctagggtgctaaaattgcttaaaaactttgttatttggctaactaaaatcactgaatagtaaacagtagcattagagatggcagagacattaggtgtcatgcagttcaactgcttcacctagcagacaaagacattaagttccatttcttaaatttaactatctggttgaggatacacagtagcagagctaaatcaagaacctcttggggttagagtttttgtttatgcattactttgttttggaattaaaaacagtgcctgtttgctaagttaaattgaaaatatgctctgaaggagaaaaacagctataaaaatagacttaacttccaaactatggatcacaataaactaaagaaataatttctgtagcaataaactccaacactttccataggaccagaaaggcttgagaaagaggagaacaaaaaaatgctttggggcttaccatatatatggagaaagctaaatgaataaaccagttgaaagacagcgagttatactagtaacaatattactgatatcggagctctcacttataaattgtatattatgatcatagtgactaggtactttatatctgctttctcattccttcctcacattaattcacatgtaggacagattacctcttctgtttctatccagaggcctagagctcaggccctcatcgaagacagacagagctatcatccttattctaaaaaaaaactaagaccccagacatagctgtgctacttatagactagaatgtgagagaaaaagacaagctttcatcatgggcttaacaaactgaaacacttcttcaattttgagattgagaaacttagctaatgctaggtgtaaagatgatatgctaccttcataaccttggtgaggagaaattagcatttctctcagtcctagaaggaggatgaccatgaaggtcttcattctcttgagaagataatcaaatgcttcactgccctgttaacggtttactcaatattcaccaagaaaagtagatgggattatttttgcagacacttatacgggtaatttattctgataagcagagacatacctttagtgcataaattgttccctttgtgctctttgtaataaacatcaccatagagaacaaacacgaagtaatgacattgaattaaaagacaccatagaggcaacagcgactggaatttgtgaaagtaaaaggatagtgcaaacagttgtgcgttgcattctgctctgaagattaacaagctgggtcaggctttgaccatcatgatgagcaggagatttttctaatggaaatccccaatcaagttcctgctgcacccagaaaggaacggcttacagaaatcttacatttctttgcacataccaaattgcttggcatattctatcacaaggtttactttccagggaatgtgatcaagaaatcatgatcctaattcctagttaaccctcaaagtttctcagaacagtcagtgcatcactgtcaacttttgtgcaatgtggaaatcagaattggtcacacgtttttccggccactgttttagattcatataatattagtgaaatcatgtcagactggtatagccatgaatttatacttcatgaataggcactcaataaatagtggattaaatcgaccgatttgatttttacctccaataatttcaaaaatatcattgaagacaaggttgttgaagctgtcacttttcttgctgaacctttgttgtgccaggaggaacagatggtaaaatcaaaagtgattagagaatcagtggggtgggggtgagattggaggggagaggtcttcccagtgagacccgctagcgtcttccctgagcagtatgttaacccaagacaattttagaaatctgtgcccctaagttgcttgacatccaaagcacacttgatgcatcctacatttctaaatatttttattgttgtttctcggtagtaatcatctggtttagtcactctaaaagtcaaggatgaaattttaaaatgcaaataaaagtgcctactttctctctttccaattcctttttgttttattgaggtataatttacatgcacaaaaaaatcgcctttttaaagtgtacagtttgatgagttttgacaaacatatgcagtcctacaaccacgtccgtgatcagaataggaaatatttttatcacttcaaaaagtttccttgtactcccgttgcagtcagtctcctgccccaccccagcccctggaaaccactgataggtaaaagcacttttaatctgaaaggtatttaatgtatggcagtgtcagtggtaataataacaagatttattcattggttcactgtatttttgagcacttatatgtgcccgttgtatgcaacccattatgctcaacccctgccctcctcaccagggataaactagtggcagagatagacaaagaagccgtctctctatcacccctatcttatagaacattcttcaatgttagaaatgcagtataatgtggccattgagaacttgaaatgtgcttagtgggaatgaagaactgaagttttaactttatttaatttcaattaatttaaatttatatagccacatgtggctaatgactatcccactggaaagtacagcttctatacaatatgataatatgatacattataacgcaggagtttaaccaagtgctaaagctttactatcaccagggtcactggtgttatgtgaaaagaaaacttacaatagaaaaataaatcctttaaatagtcacagacctgagaaagtttccttctcaagggaacacacattggctcattcaaaggaggttaaaaactagcatttaaggtaatttcatgaagctttcctttggatttctcatgcttattgtatacataaataggcaattttcgatgggacctaataaatcactgttttttatttgaacattttaacaaaattatcaaacagcattgcatttatgttcaacctatttgttctgagaaagacaacgattaagtagaagtcatcaaagttaccagaacaatttttgttcttatgttttagaaggcattgaaggtgtttaaaatgtacacttatagagtcagagtactatgcaactgtggcccttatagtttatccgtcatgcatctaaagccattgttacatctgtttctaattgtgcatggattgtccaagatacacaattggaaattccattttatttatcaatttgaagaggtttcacccatgtggtcactatgatcactatggagtcacattaaattgagaagtctccagaagttgcagtatttatttaaaattctaactttcttcagaggaacaaattctccatttctggattctgaatcctcattagccataaggttgttgtaagaatttgcagctaataggaacacatcctggggagagaccagttgaaaagtaacttggttctgagtgaaattatacagagacagtttctacttcaggtggtgttgctaatgaagctatcatggtaattttagcccatatgatccctaaacgacttcagaaccacttttcatccactaagaacccacttcaaccactgccacgttcactaccacagtataatatggaacaccctctggaattcagtaagtaacttcttaactcattggctatagagctttgcctttgtaaattctttccttttgcagtaaaagagattgtttcaaagtaatccaattagtccctaggcatgtctagaaaggtagagtcaacaacagtaaggtaatagtccttataagatatgtaagaaattatcagtcatttactttaaaataatttgtacacttttccttttatatggttcttctatgttgaagccagtggtcatccagtgattaagattagccaaactcaaaaggctaaaactaaattcaaatggtattattttgctttaattttatgcaatgctatgtatttaaatttcatgaaagtttcgtatggcattgctatcaatttcagtcaggataaatttcccgtgaaataatccacaattttcaactgtacgttgggtacaggtaaggaaacacccttaagagcttatccagttattagctggtattataaatttcaagtaattcaatgttcaattaataaacagttactttaaatgggaaagtatgagtcaagagttagtacaaaggagaatcttaaaagatgaacatcaaagaatcttactattgatttgttggtgcctttgcttgcacttctccaaattgacttgacgttttaaatttgtactgataatcatcagagtcaaatctgcttttaggcaaaaagtatccgctagttattcccctactatgaaagtgatgagatgaattgatcatgtctccagtgtatggatggatgtctttgaggaagacctactgaccttatgtttatcttctgtcagcatggtgtgactatgtggagagacagtgctatttgctaaatactttgtttttcaaataaaaagatttcacagattatgcattgtagaatttataagtattcttttatgtctttgaatgtgccaatacaatttttatgaagttggaactattttatctattttaatgaaattgtaagccttctgtgaattcttttattaattttattctgaagaaaatctgaccaggttagggaaatcaggtcaggttacgacgtgatcccagtggaaaagctgaactgtggactgtgatttaaaatagggaagaggtactgaagtgttgtttttatttttgtttacaaatcagcctttctaactattatgtactcccatccttctatctttttctccaccagaacgtattaacaggcatgcatataattaatgcttttcttgagataatattaaaattaacttcatctgtcaggccgtctgggctaaaagtacacagtcagatctgggtaacatttgagttgatgtaaatatgcccacacatactgacaatgcttaccatttattgtgtgaatgaaaagcagtgtaaatattgtttgttctactagggaagctccacattttaatcaaactttgaccgtatttctaaaatgccagagcatctggaattgttaaaggaactgatagtttttgtgtttttaactgttaggatacttgaaatccaaagggtaaagaaactcagctgatttatacgtttcttcctctttattttaatgtgataaaatgtagtttttgtcatgggctgacaaacagtggtagactacactaactctgcgtttgctgggtttaatcttaccctctcaaggcatggaatgggagctcacttcagacccagccatgcttcactgtccactgccttctcatggatatagtgtgaacattaattagatgaattccataaagtgctttaagctctttggagaaagatactcgctgcataattattcttaactcccatacgctcttatgatataaaccattctgccaggaaatcctttttagggattatcacttaaaatgaaattttcattattaaaagcaggaagaatatacatctactgacagacgaaaatgtgcttaaggcgactgcttttaaataggcagaaatcctgaactatggagccatccatgcctgaaaatactgagtaataatgaaaactggtagcaaatttggaatattaatcatcacattaagttgcaaagaaaaaaaaatacaagccacatgccctttaaaaatacgtgcacaaatctttattctagaaatatataactttaggcctaaaaaagtacaaaaagtaaattattttatggctctgaaagtatccttaatttactcaggtgacaacaattagtgtttaaagagttagttttcaatcttagctacaagttggaattactctggaagctctaaaaaaacaaaaaacaaaaaaaaatagagatgcctagttcccacctgcagaaattctgatttgatttttctggtgcgagacctgagaataggaatttttttaaagcttccctagtgattctagtgtgccacctaggttgccttaaggtaaacctcatattatgcagaacctagcaatcacctatcctgattttatagacgaagatcataagacccaagagggcaaattgatttattcaagattgaatatacaaatgatagaagattcacataagatgcagtatacagagtggcttgtggattcttgccaatgcaggcagcagaattttctttagggttcacccagttcaggcacctctttgcagcagcacttgactaaggttcttctgattggatcattatatgggcaaaaagaaaaagcttaattgaaaagagctgaacccacattgtggaatggaagatatacagtttacacgttataaatgattaatattcatgaaagcatactgccctttcctcttcccttcccatagatgacatcattgcattggtgtagttaggttggtggtttcttgttgttgatcttggttctgacacagttcatcacttattatcctggcttattatctacttctacattcattgttcactcactcactaattaattcaacatggtttttattgttttggaccggttatatgcctgcaacgctacgtaaggctgaggatattacaatgaacaggaaacaaccctgaagtttaaggtatcaagcctttgagttactgtcttttatcatagctgatataaaattgaagccccactttttttgttttcaattactgaaaattcagtgctaaaaaaatgtggatttttattcaactagataaagtactacaattaggtttccactgaccttggctgtttttgttcccagttgccattacataaatctgtgccactcacaacttaggaagggtgtaacattctctgtaatagtttgcctttcgaatagtgtttggattcattactgtccctcgcagtttggaataatgaccactgaataatcagtgtttggagactaaattagtgctgcaaaattccctcaaattacctactgttcttttccctgtcgatgtatcctcatattcactatgattaccctgagaagaaagatattgttgagaaccactttacctactcgaagttttggtatttcaaagattcatacttatgtcatgttgattacattagcactaatactattggcagaattctaattcacgttattttctttttttccaatttctctccatgcctatgtgttgtcccttcgcagctataaagccatggccgattcatgggtgcttttgttaaggcgttcagcagtcacgtttgtagatttttgaatgggacttagagcccttttttgttctttatgtatttctctatttctcagcaaaggaaatgcagacatgcaagaaatagtgatcaaatgtcctgtgtactattgtgggtgtcattaatggtatagggagaaatagaaaatagttgcaaagatgcatttaacaaataaacgaggtcttgagattcaccatgaatgtggccccttctatgaaaagtagttaacatccaactgcaaagttgtactggatcagtttgactttaacctttagctaatatgaaaatatggaattgtgtggtggtgctcacaaaaaagaaaactcatttttcttaattatcatcaattaacatgtactgactacccatgagggaaagttaatttgctcttgagtggaaccagttatttgccctattatttctcccttgcttattcccctctccctccctcctccctttccattcaacaaagaaaaatagataaagcaatttctgattagccagtgaaagcctctaacataaaatttccaaagatgtgccataaattatccacaaaatgtaaaacttttcaattttggtttgcattttcttttttcttattataaaggtaataagtgctcattatagaatttgaaaaatataggaagttgcacggaagacgaataaaatcagccataatcctacaaacctattgacacttgtacatatgtttgttatctctaatgcattcattatgataatgcatcttttcaaccaatagagtaatcactggtgactttcaaatttgcctactcatttttcactctgtggacttactttactacctcttgccctttttcagtaaatgaataaatatttaagtaagtaaatacaaatgtaataacttatgcgctcaagcacacagatacacacagagagaatttggaacttcggaaatgccatcctctccctagggccgcaagtgagttgataagcacgtaaggaaggataatcaggggagccttctcgtattgcccagatggctcaaaattcgtcatctctaccaaacaactatttggagctttgaagaaatatccatgacccctttgaattcttcagtttctttcgcgttcactttgagaaccaagtgacaagtgaatttcctgacttggtcttttaaacctgttagcgcagttccattgagattttgtgggcacaagattgcaatgaagagatcaacagggagaaattcatttccctatatatgtgcgattaatccggagtgctaagggcagatataaagcaggtgcctactcctgtataacttggaataaaaccatttccaaaggctgatgatcctcaagtcttgttctgcaaatgactgatgtataacttcaggccaatttttctccagttagtctgtgtcactgggagtcccatttctcggggagcagccccatgctttgtcaggtgcggagcccacagaaggttaatgcgaaaagaaggcctcttgccagactgttttccagatgatacgtagggttattagtttgagctccttaagaagatttttctcacctgtcctaccaacttatgtttatttcattggtgttagagggtttcagtggcggaagtaaaatatttagcggggaagggacagcgttcatgggaattttgcctaacttaattttgtatctttagctcattcgtagtcattgtactttgtgttttgtcaactgaattttgtttgcatacaaaggcacaaaatgtttgcttcagacctgtcactcttatttttagcatggttagacaaaaactgagatgctttaattgtctaacttatcccagtttaagtgctgcaaaatctcccaggcaatgtcatgggcaactaagggataaaatcagagatttaaaggtgccaggtttcccacgcttctaacagttggcgttttgggtgtatacaatccctcagctttcttctttagtttatggagtcttgtggagggaatagcaggtttttagctaaaattatcatgctgtcgagttgggtctctagtgcatcctgaagagcttgcattatttacagaggctgggctatcattttaaatcctgatgcttcaatgcccgttatcattcttgacaaactcttccagcccgtggtctgttttcctctgtttgcttccatttactttcctgagcaaccagctgagcaaagatttacataacttttgtttaaacaaaccctgtacagttcactctttcagccagtatgtaaacacttttgagacacagttacatttttctattttagtcccagattctgtttatttgctacattttttgtgcccacatttttgtctttgttaagtctcttacagattcacatgaaaaaccagaaaccgtggctgctcaaaagtcattaataatgagatttttagctactgtttctgcttgtaaattcttcatttcacataatacagtctcaaaaggccacagagaattcagcctcgcttatctctgtgttgcagatgatggcttctagccttacccaatcccagtgcagcttgcttgccatccaggagtcgaatttgtttccatctgacattagcgtattaaaaagattggagatcaacaagcaacaatgttcttgtagaaaggtaatcaaggtttagagcctgtgtgtcatgagactcctagcatttgaaaccgctaaggggttgaccaccattgtcccaagcacctgtttaagattctttcctatgataagggacctaaagtgattagcatactgataagattttcctagaataacctatttatttcagtattattctttcaaatcttaattaccatcttttcctttacccagggtcttctttctacctctacgacacatttaattacctatattccccaacctgtaccatattaaattttgaatggaagttttatagggtaatttattggaaggatggccttgagtgtcattatgttcaatgaatgccctattttgacaaagagatgactaaatgttattgaaatctttttaatccaccacgcttctgcttagatgtaaatgcaaatctgttctttacatttgtgattgaattgaacttgaaaagtaccgccatattgattccttctgcaaataaaatataattacatttccctaaactttctacactctcccaagagattggctggctttgtattgtagatttttggtgatcacagaggacaatgcattatcataagaccaataagatttatttttaccttggtaaagaattttaatttatttctagtttcattttcatttatatccatctcttctcaccctctgctctacaaaagtatatatgactatataaattgaaaaaaatatcaagtgcaaaattacagaaataaataattaggttattttagtggaggaaggtttgttgtgggtggaggaggagaggagtgagccaagaaaaacgagggaccatacgtgatcatatttttgcagctattttaaattgtttgtgtatatactttaaaatattataaaataaaattttaagtgcaatgcatatttggagccaatgatgagggataacttcagaaacgtagcatcatcatctagtgctttcatagtcctttcaacatttccagatagttttaatggcctgctcatggaggcaatgccctaattttaacatatctcttcacaactctgatttcttgcttcctaacattaaatgtcttcaaagcttctttcaccactaattccttatcaagaggataagccagtttattctttaagaaaaactagctacacaaaaccgtaagtcattccaacataaatccttcactatcctctctctatagatttggttttgattcctcctgctgaaattcaaccttctttcttcagctatccacacgtcttaccctctaacttccctcaggagtgtctattagctcccattacagtgaccacagtaatatagtaatcccctgctgttctcactctccacttccttacactgcgttttaagtctcttcatattctttatcaccttgtatcatgcatcggttttcttagttgtttattttatgttgccttcataaattccatgagagctcactgccgtatctttagaacatggaacagtgcttggaacataatgggcattccttaaatagctgtagaataaactttcaaaatcaacaataatgtatttgccaaatccattggcttctctgccattttatcttgttcaataccactgcgatattccccttcctttttttttttttttaaagtctgtaaccctttagcttctgtaatattcctagttttttattcctctcatgtgtcaaaatcatcagttgaggcttattgttttctctttctcactctgacctcacctttgtttacatctcatcttctggctttggctatcctgttttttatctctgttccaacctgtatttctagccctactacctggacatgacatgtggatatctccgtatgaccgcagtttccatatgactttgcaaattcatccctgctctcccctccaaagtcatccccacaattgacttcctgttccttccaacctattaaggttcaaacccacttttgctcctcctttgcaggctacacttttccttctcagtacctcttttttttccaagttcttagataaaagtcatagtaccttacgttgtaattgccactggtctggtctttctgcctgctttcctttccatttgtaatcacattatccattccaatccatttataatactgtgatcagccataaaaataacatttatcatatcgtttgtctccttaaaacctgtagtagatcccctctatttacaagatctggtataaaatcacccttcctgatattcaatgcctgttttaatataatctcaatattatgcgtcataaatccccctgtgttcttgcactttttatttcttatacatctcatcaaccatgtcttatcaactctcaaaacctgtattggttttcaggaaaactcataaattattcttttgtagaccttttgtttgtcatctttgaagatctctctctgaactacaatattttgtctgtataatcaatttggaaattcatcaggtattgaaatatgacatgtcttctattgtcttgaacattaattaaaactttatttgactttttatatgcttacatcttgtttcctcacggagtgttaacctactagaaagtaatagtttaatcttatatttattttaattcagatttagtagcatactttacacgtggtaggatgtgtaactgccttacaccttgcttacgtgagttattaatgttttcgtatatttaatctgaggatgtactagcaatgttaaaactgtaccgcatgaaattgagtaattgaactatttgttttaaatgtgttgcttaacttattgtaccattttctcataatcacagctcaagttaactttgtggttgtacgtattatttcttgtgaaatgccaacaaacttagagcaaggaaaataacaggtataatcatactataaaggcaaccttaacactagcatagtctcttagctcatatggtaactacaataatgtacagtgacaaagagaatattgtactttcttagcacacactttcctactactctactgttgtggataaaaacagacatactttaggagaaactatgttatttccaaataatgccttaaaggttactccaggaaaaggcatttacataaactatctaggaaaagaaccttttaaataatataaagagctcacccaaaaggactgaagtgtttagttgaaaaaaagtaaaaatgtcgaagactttgaaaaatagtttcttgcagtatattttcatcgcttccacttacgttatgaagacattaagcgctagtttatcaaaaactatttttgtacatgtcttctaatgacagaacaatgtcaacatgattttcatcattgagaatgcgtaaagaaaccctttgtacagttttttctatgaatgttcccctaagattaaagcaaatttccaacacgaattaggcactccgaaaggaggaggggagggaggggagcaagtgctgcaaaacttcctgttgggtactatgttcactatctgggtgatggaatcaacagaagcccaaacctcagcatcacgcagtatacccttgtaacaaaccaacacatgtacccctgagtctacattaaaaatagagattaaaaaaaggaaatcagtatataatctaataaatacctctcaagctttctcatttttaaaataaaattttagattattattttaggaataaaataggctcttcattgtatataagttcatttctgagttgcaaaaatcctctctttatgtttttttccccgtattagcatgtttttctcctgtttttccccactcaacttggctgccacaatcagaaagcacaaagacaattttttcttgcgcttgtaaatcaaaaccttagcatcagacaaaataactgctccaggtctgtcaaatagattcatttgagctttcttcatgcattgaatacggcagaatttctgacctgaagaaatctagccttttccaaatttgctttaagaacattttgcaataaatttaatataataaaaggaaaaaacacatcaggctagaatttggaaccgattgttattaaaaatctcaagtctatcaatttaacttcaacaaattacttaatttctgtgatggttaatttcatgtgtcaacttggctgggccgcagggtaccgagacatttggtcaaacattattctgggtgtgtttatgaggctgtttctggagagattcacatttgaatcagtagagggagcaaagccgattgttctcccttgtgtgggtgggtctgatccaatcaattgaggacctaagtccaatcgattgaagacctaatcaaaaagcctgattaaaaggaactcctgcctgatagctaaagctggaacacccatcttttcctgcctttgagcttgaattgaaaccttgggtcttcttgagtcttaagcctccagttctggggctggaacttaacgtcattggctttcttggttctcatgcctttggactcagacaggaactacatcattggctttcctgggtctccagcttgctgactgtaaatcttgggacttctccagattcgtaatgagccaatttattacaataagtctctccctctctggtttcgagagagagagagagagagacagagagagaaatgagagcacaagaacgtgagtgtgagagtgccctaatataatttctctaaatatcactggttactcttcaaagttataaaattggtataaaaggtgacctcaatttttcatggagttaatgtatgaaagtcacaattaaaaaggaagaattagttctggtgtcctgaaagttatttgaataaattaatatgctatggaggctttaaaatactatgaaaatttaatattgtattattcttagtgttgctatttttaaatagcactttttcttttcctttttttttttttttttttttttttttgagatggagtctcactctgttgcccaggctggagtgcagtggcatgatctcggctcactgcaagctccactgcccgggttcacgccattctcctgcctcagcctcccaagtagctgggactacaggcggccgccaccacgtccgggtaattttttgtatttttttagtagagacggagtttcaccgtgttagccaggttgttctcgatctcctgacctcatgatccacccaccttggcctcccaaagtgctgggattacaggcatgagccaccatgcccggcttaaatagcactttttcttgtgagtcactttttaaatatttgtgcaaaccttgttgccattctactcaagctaatatcctaaaccgaggacattataacatttcaggagtcaaaacttcagacacttaacatagtatcctcaggttcatccatgttgtcataaatgacaggattttattcttttatatgactcaataatatcccattgcatatatatgcaatattttctttattcatccattattaaacacttaagttgattctatatcttggctattgtgaataatgctgcaataaacatgggaatgcagatatctctatgacatactgattttatttgctttgtctctgtccccagtagtggaattgctgtatcgtatggtagttctatttttaagttttcgaggaacctccataccgtcctccataatggatgtactcatttacattcccaccaacagtgcataagggttcccttttctccatattcttgccaacactttttatcttttgtattttgataatagccattctaactggaatgagatgatatctcattgtggttttgatttgcattttcctgatagtgatgttgaacattttttcatatgttgtattaactaagccaaacacagaaagacaaatgcagcttgttctcattcatatgcacaatctaaaaacatcgatctcatagaagcagtaaatggacggtggtcaccaaagaatgggggaagtaggggaaaagcgagaatggggagaggattgtcaatgggtacaaagtcacgattagaaaggaagaattagttctggtgtcctgttgcatagtatggagactattgtcaacagtaaggtattgcgtatctcaaaacggctagaagagagggttttgaaggtttctaccccaaataaatggtaaatgtttgaggtgatatgctaattttcttgatttgatcaagtaaaggtcttaattgtttggcaattaagactcatgaatacaaataaaggtcttaattatttggcaaagcatgctgagttttgtaaacaattcagtagtgatttttgagaataggtcaatagcaaatattaattaaaatgtcttctatttatgacctacagctagatggtaaacagatagatgatagatagataactgatagataactaatagatgacagataaatgataaatagataaatatagataatcgagagagaatacctttcccttcacacacgtgcatataggcacactccatttctatcatagttaccaggattcagacattttgtctcactatttttctcaatgtgaacatgcatataggaatattatagtttttgttctgtgcccattttagttcgttttttaatatttcaggacaaaggcaatatggcggtttcactttgtttttcatttttgcttatactttttaaagctcagtgtagaaaagtttgaaaatacacaaaagtattaaattaagacagctgggcacagtggctcacgcctgtaatcccagcacttcgggaggccaaggtgggtggatcacgaggtcaagagatcgacaccatcctggccaacatggtgaatcccgtctctactaaaaatacaaaaattagctgagcatggtggtgtgtgcctgtagtcccagctactcgggaggctgaggcaggagaatcgcttgaacccgggaggcagaggttgcagtgagccgggatcacaccactgtattccagcctggtgacagagcgagactctgtctcagaaaaaaaacaaaacaaacaaacaaaaaagcacctatagtctttctcccataggttgccttcttaatgggttttacaccttttgatgttttcttgagttctgtcccattagcaagtagtattgtacaaaaaaaattttatcatcttttatttaatattttattgatgtttaataattagaattattttaaattttatatgtcattttaaaatgcaatacaatatagtaaactcccagatgtgattgtaaataattaattattctcccattattgggcattgggactgcttccacattttggtcactgcagtgaacatccttgtacatgaatctgtatgttgaagttgatttcattccacactccccttcattcaaggggctccaaccattctcgttttctttcagcttctttatatccaggcatataaagttccttcctgactcgggagcgtcatacatgctgttttctccatctggataagtagttaattctgttcttctttgtgcatctcccgtttcagtaacttcatctccaaagcctttccaggtcactttatctaaagttacaccataatcttgcaaatcctcaactattgagcattattagtctccgttatcattattctccattattctctgtgaaagcatcccgtgattttcttttgtccctattaccacaatatgtgtttattccgtgtatgtacatctttgtttgtttattgtttgtctatacctgcaatgaaatgcctaaggtcaggaactgtctgatgcaggatgcaatgcgctcaataaatatttactgaacaaattaattcatttgctcagtcttgcaggcaaatggtacttctgtatatttaaatatctaaaatgaaagcgttactcgttactgttggttgtcaatcaaaatttaaatgtcgatgtttaagcgtgaaagacctctgtcaagttaatctgtacttacccaaaggctattatgtagaagcgacataaatattttcctaaatgttgattttcatattttaagaagacaatgaatgtttcaaagcattttcttctacacagctatttattctggagagtggggcatatgtttcttaatattgttaaaattggcaaggggatactgttgctatatacaaagaacacctaatcatcatgcagacgttttgtttctggctctcagttatgaaaagcagagattttaaaaagttacctttatatgctaaattaggaatggcagaaggtaatattctaatgtttataagtggttcttctctgagtccttggtttctatgtttatgaattctctttttgaaagaaattatagttattattaccaggtctattcttttacattgtttctaattctatggtgatcttcaaaatagagtatcaattttaaatacttgggaatgaaattattcttcccatatcatttctttgtatggcatacattgtgatttgttgtcccatcattgtttcagtatgacctgttactgcaaaaacatattgagataaatcatcccacatactctcggccaggacagacatcacactgttgcagcaacacttcagatgagccccattcaaccttgtgtttttatagagaaggatgccacatgtttatattcatttctgaagattggctcatattatttattgaaacatactagtttaaaaatctgtccatttatataacacctggtctatctacataacttgaattacataaatataaaactaaacttcccctcttctccagtgtatagcttgcaagcaagtgcatgtgaaataaattaaagccttgtttgtgtttttttcatcatgtgagtacaagacttttcaataaaaatgaattacttttgaacatatttgtttggacaacaaacaagagaaaagatctatttgattgatagtggacagaattttcattaagttcaacagcagaaataccacaattgcatcattcaccttcgtgtatcaaaagaaaacagaaaattagatgtgatgaactctacacaaatgttcactatgcatactttacccattaaatacattatcaagaatcatgtcagcatgacattctaatatagcagctttacaaaaacatgtaatctaatctagggatgctgttgtcctctttaaatcagcttcaaacatattctgggttgatatttctcattcttttttgatccacattgtttattcacataatgattatatttaactgaagataacagcattatcaaagtgaaagacaaaatagatgtttaataggaaagtgagtatcgaatcatcttttttctaccaaaaacatctataattatgaagtatttggttaattattttcacaataatttaaaagtgtacaacttgccgatttttttgtactttctacttttcatgtctcgcatatatctctttaatatctaagtatttgagtcagaaaagagccagtaccgaataatgggaatctcactgaaatgtgataacaatctggggcctggtcctgggacctttatctgcaggacaacttggacaaatatttagacccccaattcctcgtctttaccctaggaataataacacatttttctgacctcatacttcacgtggatctcaaatggaacaatcatctgatagcactttatgaagtatatgaaagcaataaattatcacaataagataattgcaattattctttggcatagtattagtgatgtctttatctgtctgacaaaatcaacatttctgtatggtaactgcctttccttgttttaacagaagatcatgccagaaaagatgagtaggtagatacttaacttgttgttcctgaatctggaatgtattgcagatgtcccagactgatctttgttcttttttttccttacaaatttcttttcacattgacagtgtgatatttctttaaatgtgcaatacatagctaaccttatttgtttgtgtttactaattaaaatatctaaactgcttaaaggagaaaattcagttttaagttttattgatttatacccttcttcaatccacataggattagggtagtatgtaacaaaatttcaaactataaatgaaatattgagttttgtattaaggccaaggatgaggaaaaaaaaagtaagtatatatggaaaaagaatggtattgaatgggagttttgatggagcatgttgacatcatgataatacctattatctttatattctgaatgtcagaacaaaattagagcaattttcccttatttccctacaatacgtctgtcttaataattctaagctttcctgatttcagtagtaatctgtattttgcaaaaggcagcatgtttataagatatcaagtaaactaagtttatggaacttgtaacagcatttttaacaacatttctccctagatagttcatggtagacatgaatttattcaaaactagtatgtagaaaaataccattaacaaaagctctgaaattatattagaggagctgaataatgttacttgagaaagaataaaatgttatttatgatttttggtatcttttacccactatatatggccatatctctgaaaaactttagtaatatgtactaatgcaaatatggtagtaaattatgtctacaggtgctgataccatagtagataaagtatgataactttattttaaaatatcatatttaaataattaatatacagtactgggaaagactattttatctattctctcactcttgaataaaaaaatccagaaaaaaataccttgttttggtaagattatatcaatttatttcccaaatgggtagagggttatttttttctgatcataaacgtatgtctcttcattataaaaatccactaaaagtgatagaagaaaaccaaaagaataaatgtaaacaatgatgccattttccaaaaatcaccttcgacatttttctggatattgatacagtctaaatctcttttcggaagactccctcctgtgtaggttccccaactactctgcaatcttatttcctcttgttctgttcttgtagaaaggagacccattgtcaccatgtcaaataacacaaaatggtgcacgtataagatcattgtctctgtccattatttgccagaggacctcaaactttttcaggtggtgggcaactggatgtcatgctgctccttgtacaacagaacacaattcattatttatatggttatttcattttaagaaaatttaactttcattagctggaaaaaaaaagaagtggtttttaagttgtttagaaatgtgaaattcaattttcatactgcaaaagagattcaactgcaaacacaggcacacatgtctggtgtaagaacgagttgtcatacaaacccaaattagctgcctccacgttgtctttgttaacaagtgtttgtttgctccttgttccatcattcagaaatgctctttagcaggaattgatggaacacagtcgcagtgacctcttcctgtctttaaaaatcgagatgacatttgcccatctgcagtgttaacatagttcctcaaagaccactgacagtggggtaggactgtattgcgcaagttctctcatttccctagaatataattggtccagggccagagattttagctcatttagagcagcaaggtgctcttttaaaattccctcacctattttgggcttcatttcccttatacggttatgccttttccagtctgatgaacattctccttgacagagcagacaagcaaaaggagctgcacactgctgctttctgtgtcgtctctatccctaaccttctcccttctgccccaatcagtgaaccttcgtctttctggttcttcttcctccaaatggaagtaaaaaggccctgaatgttgtctttaccattatcacgagcctcaattcattccaagctcagcttttcctcactgtttatacagttctatattgttcttctaatatttgccctcagttctctgtccctcgtttcttcccatgttcatactctattagaatctgagcacctttgaggttgtccatacagtggcacacatctttgttttatactcactgggatgatttgccattatattgtcaaaattttattctaaagagcttttacaggctttcttgagccattttctcttgaaattcaagatcgttgaatctctacgctttttccttcttaatctaataaacatacacccccacatacacacgtgtgttcctgaaagacagatgccacttgactcgtcttatagattgtctaaattgatcattgtgtgtggggataaaagggtgaattgtataatatccctgatggttcacgaagtctgttcctgtataacctgattagtcttctgaactcttttaaattctgtctgcaaatgactgaggtttggcaatcagcctatttcagttagttgttttcttgcataagaagggtccatatgtactgtgtgaagtaagagagagaaagtacttagatttgctggatgccctgattgttagcatggctaaggtattgtgtaagtaaggagagcagttaaaaatgatattgtttttatttcttaattgaggtaaaattttatataagatgaaacagacttatttgggagaggaggaagagtttgttcttacataacatttcaacctgtcatatttagttgagaacttcaatctgtcaagatactttgtataatattcagattctgccatctaatatattttccacgctttcttactgggtgtgacagtaacttatactgtggcaggtgtataagttagtaaagatattaaatgctcaatctgttaacttttgtgaagtggtcccactgataaagtgacacctcaataaaataaaaatttccattacctcagaaagctttttcatgctaccttccagtcaattcccagccccaataggcacctattcttctgatttatatcaccatagattagttttgtctttttaaaaatttgtataaatgaaatcatacaaaatgtactattttgatcagcatactacttttgagattcatccatgtaagtgtatcagctgttcattcctttattgatgattaatattctattgtatagatataccacaatttatttatctattctccttttgatggacattcaggtggttttcagtttttggctgttatgaataagatgctgtggacatttgtgtacaagccatttgtgagcatatgttttcatttagtttgagtaactctgtagaagtggaatggctgggtgaaatgtttaaatttatgagatattgtcaaacagcacctaaacagttttctaaagtggttgtgccattttgcaatgccaccagtgatgatggagagttccagttactctacatctttgtcaatatttggtcttgtcagtcattttaatttttgctatcttacagaatatgtaggtatattgttgtggttttaacttatattcctctgattactagcactattaagcatcttttcatggatttattggacattcatatagattatgtgtgttgaagattattacctttatgattattgggtgaaaatagtatcattttgaggtcattcatataacttgaagactgggaatgacagacattttcctgttttgtttcttttctttttactttatctgaagagtctactagaatgcagtgttgctgcctgagcagcagggcattagctttgtaaaagctctgttccttggcaaccccaccactaatatgaagtgcagaacatttgaattgtctttgaccagcttcagcatcagcactattttttttttttgctagacccctagtaggtatttaaaagtacagaaatagaatttaatcatgctttttaccaaatgtgctatgctcttagagattctttcaacgtgcataaaaattctgcagtttcaccacataccagtaaaagaaactcagtcactcatttagccatttagtaaaaagaacaaattaactgatgagcatagtggagacctcaaaggtaaagaagacaatgtccctgaaataaagacaatcataaattttcaatcaaaataatgaaatttaggctgggcatggtggctcatgcctatgatcctagcactttggaaggctaaggtgggaggattgtttgaggccaggagttcaagaccagcctcagcaaaaaagtgagaccctgtctccacaaaaaaattttaaaaattatctgggtgtggtggtatgcaccggtggtctcagctactcaagaggctgaggtggaggatcaccagagctcaggggttggagactacagtgagctatgattgtaccactgcactcaaacttgcatgacagaatgagtccttgtctctaataataacaaaatttaatttttatagactgtgaaaaaccattatgtagatacagttcaagtacagtatgattttataggatagataacttttgcttgaaaatgtattcccaatttataggatagataacttttgcttgaaaatgtattcacaatagagttagtatttggggcacacctttatccatttaacaaacatgttttgagcactgccaggtagcaacacgttactaggcactagagtgagaaaagattacagttcctgctctcatggatctcatggtctagtcaactggaatgaaaggattacataagtagaggtaaagacacacatgatggaggatggagaatagtcaaaggtctggagaatgaccaggacgtcactgtgagttgtctaattgcactgaagcatggatgaagaattggaaagtcattgtaagaagcctaaaaaggtatctctcagggatgctatgaggttctgaatgttatgtacgctatttgggcttcaacaggcaggcactgagtattcagtataaatttttgagcagggaatccaccagaagaactatgcatctggaggattaatctggaaagattgtgtagaatgttatgcagtgaaagagtctgagatgaaacagttaggagggtgtattaataacataggtgaagtgtaatgaataaccaggctggaggaaaagcaataacgatggaatcaaccgggcaagaagtataacaattaggatcagtaaaatagaatttggattggaggaatgaaaaaaaaagggacaaaacaaagttgaactgctggtatccatactggaaaatacagatgtcattcaaataaataatgtaatgaatataagaaaccagttttaggagtgaagtggatgttggcttgaaaatatttcctttgaggtttcagtcaaatgaaaaggtcctgaaatgctacgtggtagcctaagaaggaagcgttcctagagagaaaaaaattagaaaagatttacatttgataatttaatcttttccttcatacaagctaaattgataagaaagtaaaacctatagttttcaccactcttttacaaatatccctaaccttttagatattcacatgaataattgagaaaaatctaacagatgacttgcttatgtcatttgtctgctttatccttaggttcctctggcttatatattgttcaataaaatacagatcattgatattgtacaatgtactgataatggggagtgaatccatgcttgtgcattcttttttttttttttttttgatttgcagagggcgtgcccagtcaacaagagaggcacaattgtttttatcatcacctcttctcatctaattccatgaaggagagtagtattaccatacaacagataatgagttggaaaacaagaaacctaacctcagaacttaaggcttggggaaaaataaaagagtaatttgtgtttaatgcctgtataacttggcaagagggacatataaggcttagtgatgcccaacatgtgcttagatgtggattgttagttgatgtcttgggggttctgtaatctaagctaaatgctcaaaatcaattaattgatgttagacacagagatctgctttgatccctctttatcgtatttctaggccttcccattctcaagagcctgagaaacgacagctttccttaataacttgttatttgtggtaggagatgaaactttgataaaaacacaattatttttaaatgtctctttttcactctaggctgttgtatgtatttcaaaaagttacttttgaccctttccagaatgagaaagcaatcaagaagattataatatcttgcttagttttctgctcaatttatcaacaaatatttcttaagcaattattaagctgagcagtgctcagcgctgtacttggtgatataggaaatggggaaaagactgtctttaaggcctttataatagtaattacctcaacttgtctgtttcttttccttaccatttcgccaaattcattgatctatcttgttctcaaagcaatcgccatagttatattgtaacacagcattttctagggtgtccccattaagttgagagtgttgacaagaaaatacaagcttatttatcattgtaaaacttgagacacctagtagttaccctaaattaaatatttgttggagtcagtcacactaaagagaacacttactgcattgaacaatttacctacattagacagcatttaaagactatgccacagcaaaggcccatggaattcttgtgaacacagaatagaagtgtattaaggaacaagcttaattctgttctcttaaagcacaacactttctcaaaacatattttgaaatcacctttgaccattttttttaactaataggtgggtgggagttagggtaggaaaacacaagcagcttcatcaaaacgatattctattttcttcaaatttgtggggaatcatacggcctctcaattttctacattatgctaattatgatattaatctctctgccagcaaatgaaaataatacatattagatgtagcaaatgtcaataatgacaaaattagtcatcatgcagatactcagggattcccaaaatatgtttggattatgattgctagctttgagtttgcccagaatcgtttcaataaaaataagggactcaaacacatttggagcaaaactcacatcataaattttagacatagctctgccaataatgctctcagttatattttcagtcctaatatttcctctgagttccagaccagtatcttcaactgtctgattgatactctctccttcatttctgtctccaatgcattaagtcctgtgtatttactttccaaatgccacttggttccatgcacttctctccatttctgccactgactcctcctcaatccaagcgaccatctttcctcactttaactaccatgatatctcctgcttggtctccttacttctattcccgggctcctccaatccattcatcctccagcagagaatgatgactagcaccttccacagtgtctggctaataggaggtatccaatcaataattgacttacagagtgaaaatataggcatggcaaataccagtagagaactacagggttttagaaccaatgacattagatacttccatcaaatatttacagtgtataatcaagttgacttgcacattgtcttatttttgaaaaacaattttgttggctttttctatatgcacacatacatattgtatcaccctctacccgccaaatggcttttgaagaagtatttatgtggctccaaattgataatacctctagagagaagagaaattagaaattttaaaatgacctatgcttcctttcgaatatcacgtcctgagacagtgttttttgagttacgtgcaatatgttccacgatgaaacatttaatgtgttcagaggcatgctagtaatcatgtagaaagaattttatgcctgaagtcacatgttctataaccaggatcacttaataagaaaacaagtacagctgtggacaagatgcctttttatcagggaaaggccaatttgttttctttgcaaatctaagtaaatggagagaaaaacacagcccttaaatgttttctatttgtcctgaagttctcatgaatgagttagaaggcgagaaggattaaataaatccttgaacgtagagagagctaacatttattttagcaaactaaaacctattcgctttgcaaagttctgttctgtactttgtaacaacagttttctttaaaacaagagccaccaattcaaatgcctttacagaatgattgaatgctttcatgccccacctaaaggcattcaaatcattaatcaaacaaagttctaacgccaaaacatgtctgggaccagatttaaaatgtagccctcagtttcagagggcaaaaacttaacatatttatattttcctcactttaggtaacactgtattgaatctctgcttgaaattgaggagcacgtgattttttctttttggcccagggcagcatttcttggaagagaaagaaaaacaacccaagatacccttacaaaacatgtagtacttaaagctctttatgatgaattaattttggtatacacattaatagcagtgataataacaaatctatatatatatatataattgatatgaataagataaatacatcaaaaggaaatttcattacaatttgatattaggtaaatgtcccattaaaataaattgctactgtacataattttccttcagttcattggcaggatgtttgctttggaaaataaacagtctatttctagttttagaaggaattctcattattcttttatagcaaccattatcaggagcagatgggaaattgtaccaagagcatatctactattatacctcacaggaaaaagagagtattaaatgaaatctaacaaggcctgctcctgactctagttcctgtaacaaatgaacacacacatttgtatggtttcagcatttgtattagtaaggtacaataaatgtttactgaaattgaaaaaaaaaaagataacaggagaaagaagaggctaaaaaggtgcattttatttctgatcgttcattgtaaagactgctcctttttaaaataatcaaattttattttatatacagagggtacatgtacaggcttgtcacaggggaatagcgcatgatgctgaggtttggggtacagatctcatcacccaaacagtgagcatagtacctacctgatgagtagtttttcaaccaatgcgcaccctccctccttcccacatctactagtccgcggtatctgttgttcgcatatttacgtccatatatgctctatgtttagctcccacttataagtgagaacatatagtgtttgtttttcctgttcctgcgttaatttgcttatgattatggcctccaactgcatccgtgcttccgcaaaggacatgatttcattctttttatgactatgtagtatttcatggtgtatatgtaccacattttctttatccaatctaccattgtttcacaactagatggattccatgtctttgctattgtgaatagcacaagacaggacctttttatttgactgagttccttgcaaattactaataaaagatctggaggtccttagttaaaagttgaatctgtagtgccgttcaaatttagagatgtattttctgttcaagagaagaaagccctcattcggtcatgcttaatattcagctgtaaagtccaaaacatatgagaatgacacaaatggaaacattttataaatacctatacaaaggaggggcacttagttcccctaggcctcttaaaagtcctctagaaagagggtacttttatgctaactattaaagatgagtaacgaatttgtcctatacaacttaacagtatcgtcaaggaagtagaaagttactcagttttactgggcattggagctaagcttgaaagtgaggaggagaagcggcaggagacggagccgagaaggcagtggggagaagaggaggatggtcctttccatgctccctgttgtactaacatgtttggatattatcttatacttcatatatggactggattcttgtccttctcattctgagctctccttgaccttgattcttacctcctataactttcattctttctttactcaaaaaaaggccatttatttcagccatttttcactgttttcttatccttcctagttgcttttctatactatttttccactcttttttttttctatactattttgcccttctctccattttcctaactgctagatttccccaattttagccatctttcaattgttctgactatcctcaggtgctcccacaaggttatcagaccttccaccaagacggaatccctcagtctatggacaggctaagttgaatgggtcctggtgctgtgcttagcatatgccttgagtatttgtgcatttattttgcttctttacaaaaatccatcatccgatagaagttgaaagaaacttgctgaagcacattaaaatctctgaaaacagtattggctatattttctaataattagcatgactggttaacttgctttatttatcattgaaaaaagtatcagaaactgtatatcaaactcctgaattcttggcactgacgaagagacacaatgagaatgaccttaggataaaaaaacaagataaagcaccatatttgtaggaaattgcaccataaaagtctgtttcacaactctcccaaatttcattttattacatcttttctcttgaccaatcagtaaactcggttaatgatttacctgtctcaaaataattcatgaacaaaattacaagtaaatctcagtattggattcttgaaacatctccttgttcaatgaagtttcctttttcttccctctatttccctgtatttatcttttcttccagttgcattttatctcttctgtttttttatcttgctccctagtttgtgattttttgccaattttttatttcctacataattcatccaatctgtcattgtacaatttcttataactgcttcttagcttattccttttcttcatttgtcacattctatttttcatctattgtgttttcatgcagttttggaaagttttacaaatagacttttaaaaaaatgtacgtaatgttttcatagaaaaggtagtggtttctttttcttatatccttccctgtataaaaataaaaatgtagcagttctttctttgcctatgtttcctctttccttcccccaatttgaccagacttgaaggacttagatatgtaacagtgttattttctataatttaggaacagcttttgacttaaaaagcagaagagaagttgaaaataatatagtaattctacatgtccttcctgcttcccaactctctgcacatgtttgtaacctcccctttcttttttagtgtatctctttcatatacctttgtccccagaaattctgattcagtagacttagaatggaattctgggcttttatattttgaaaagctccccacgggagttagatatgcacttcttattaagaatgaatgcttaatattggaatcaaaacacaataagctttctaactatgatgaataatccaacagatttaattatgattttctttttgtccagaaccaagactagatgttaattgccagagaaatagataagaatgcctatgacagcagtacattaatatgatatcaaagcttggaaattttattggtaatgaataattcagtacttaaaatatttagaagctatagaattaaaattaattaatgttgttcactgtgtgaataaagttgattgagattttacatttaattttgtaaacccagtgttatcttttccagctcagaaaacaccacatacaagctactactttctgttttgatcccttatttttctttcttatgctttatcactgaaaactctccttgagcaggccatgcactgtaaatatttctcctggttgcaaaaccttctcatacaaatgcagtagactgtgtaatgagctcttctttcacaaaattaaaaaaacctgaaagccctgatttgcgattctatacaaatgagatttagatctaacaattttaaattattgcttcactcttagctgttcaattctatctcttatttgggaaaccgaaataataaaaccattgctgattccacaattaggttgtaaaagtcaccgtagccatcagccatgaagcaaaagtgccaagatcaaaactacaaagcaaagaggctgagataaaaatgctgcagcattagtttatagcattataagcagcaataagaattccttgattgcttaacaaagactcaaaaggcatttactccattaccttacaactcaaagaggtattcctggaccagcagtattggcatttttttgaagtttgtaggaaatgcagaattttggtgcctccacggacctaatgcagcagaacttgcagtttagtaagatctccaggagatttgtatgcgcattaaagtctaggaagcaccgctatggtatacatctgatgtgtgcccatgcattttttaaaagtatgaagtaatagttgtaagtattggacactcttgaaggaacaaataagagccatggtctttactctctaaatacctccctgacatctatgttttaggcaaaatttttttcccatttcagtagtcactgatgcttgcacgatgcagtttattccaaaacaatggtgattctcatgtaatagttcatgttgccttaataatttacgttgcctcaagttctctgcccaggccccaatatacaccgagggctgtactcctcccctaacgcctgctctcatacagtggcatagagcccagttttatgctcttggtcacatcatggagattgcacaccacaggctttaacttctgccgtactctcactgcctctaaccctccatatgcctaagttctacgattctttaaattccaaattgacccagaagtctcctccgctcatccttttcactgagatcatccctcttctggcctaccatttgttgatcaccttgctttttttttatcctactgtatgtagtataacaaattatcacttgcaactgtgtcttattttttcaactagattatgtactgcctaagacctagaaaattgtgcttatttatttgaatctctaggaggatcagtaatgggtattaatactaatgactccatggtgatgatgagcctgaacttcctcccttcctttctttctacctctctcctttcctcccttcttttcttcctccattccttcctctcttcctccctccgcttcttccccacttcccttattcatagattcatgcgttcactcagcaaatgcttactgaaaccttccatgcatcagacattgtactaaacaataggaaactatcatgaataagacacaatatctgacctcaaagaatttatgatataaaagtaatggcataaaccgtgattacttttgcaccaacctaatatatagacacagtttgttatgactggtgtctctattactaagcaatgactgtcacatgcaacgctgatctgaacaggtggtaaagagtgagatgtaagcaatggagcaaagccaactagttacaaggaaatatcacatgtttactagagcacatctcatgggcattcaagagagtatggccaggacagcttgtgaatagttcagtaactgtgcatagttttatattcattgtgaggcaccgtgtcaccggtttgctgatttacagagtattttaattgctaactgtatgctaccaaaatttccagtattcgaaaataattttgcttgaatgtagaaaaagaaaaaagccaagaaatgtatgtgaaacgagagtctaagggagctttacctcagtctcagaaaacatgcattccttccttcatttaggaagcatgtactggggtctactgtcagcttgctattgtgtcaaggagtaggagaatacaaaaatattagagaatatgaatcacatctattaggagagttttctacatacgcacattattctgtcagtgacataaggatttgagtcattcagatttaaatacggtaggtacctcaagttctcagatattatttcattttctaaggttcgtatttagttaatatgttattttaatggccttacaaattctagattatcttttttaaaaagttaaatagaacgtaattgccatttttatttaatggtaaaaagcatttttgtttttgtgtgtacttggttgtaatattctccttttcaattgagctatttttctgatactttactcttaaaatttcattcaggaaaaaagtaaacaatatttaagcttgacaatcataaaaatgctctggtgactatagattattttaaaatttattactgtagcttagggatatcttgatgggatgctcctgaaagcaattaattctcagttttttgtggcttctaatgcaaaatacattgacgcagacagaatttgaaatgaattttcttctaatatagcaattaattttatttaaatatctctagagtttttttttaatactgtgactaacctatgtttgttctttttcacctctcgtatccacgatcactaagaaacccaaatactttgttcatgtttaaattttacaacatttcatagactattaaacatggaacatccttgtggggacaagaaatcgaatttgctcttgaaaaggtttccaactaattgatttgtaggacattataacatcctctagctgacaagcttacaaaaataaaaactggagctaaccgagagggtgcttttttccctgacacataaaaggtgtctttctgtcttgtatcctttggatatgggcatgtcagtttcatagggaaattttcacatggagcttttgtatttctttctttgccagtacaactgcatgtggtagcacactgtttaatcttttctcaaataaaaagacatggggcttcatttttgttttgcctttttggtatcttacaggaactccaggatggcattgggcagcggcaaactgttgtcagaacattgaatgcaactggggaagaaataattcagcaatcctcaaaaacagatgccagtattctacaggaaaaattgggaagcctgaatctgcggtggcaggaggtctgcaaacagctgtcagacagaaaaaagaggtagggcgacagatctaataggaatgaaaacattttagcagactttttaagctttctttagaagaatatttcatgagagattataagcagggtgaaaggcactaacattaaagaacctatcaaccattaatcaacagcagtaaagaaattttttatttctttttttcatatactaaaatatatacttgtggctagttagtggttttctgctattttaaacttgaagtttgctttaaaaatcacccatgattgcttaaaggtgaatatcttcaatatattttaacttcaacaagctgaatctcagttgtttttcaagaagattttagaaagcaattataaatgattgttttgtaggaaagacagatctttgcttagttttaaaaatagctatgaatatgactatgaagctaaaaaaagtgatagtgtcacttacctctagtttcaccacatttgtgaatacattcttgaaggggaacttgagccaaagaggtacaagtttaatggggaaaacaaaacctcaaaaaggttactgtcaaattcaatcatcatttaaatttcccttggaatgtattgaaggcacagaaagccaaatgcgtgctgctgcagttggaaagcctagagagtttataaatgggattttgtattatgcttccagttgttgatgttaatgtgtcttgtttcgtaaaggaagacttggcctttatttaccaaatgagactattgttatgaacaatgaaaacttcgttcttttgccaagctcttgcatcccacccatcatccacataataggtggattttaatattcaggaagctagaacaactcattgatgaatatctttcgttaagatgtattaaaaagaagattttggaattatgtcagttgtctttgcccacctcctctttccctctttattcatgttacattattcagaaagtagatacaattcatattttgtacaaaataaacacattagttgacctaaacacacacacacacacacacacacacacacacacacacacacacacacacacacacaccccttgccaaagttaaagaattatagcctcatcaaaagatattttgaataattaagtcttggttttgaaaatcttcttgattatagatagataaaataaagaactaaactttgtagttaaactacttccttaggtaagtcatatacttttttcccagattgaaattcttctcttaatcatacaagtattttattatttagataactgatgtgcttatactatgaacaggtataaacctgtataatgtcatttctgaactaggctcaatctaatccaaattaagatggtaagaaatgagaaaattaaaaaaattgaataccatactataaatatatatatacggagagaattcataaagtggattaaatcgactggaagattatttttctataatatataaagtattgtttcctattttaaatgtcttactcatatagtatttgaatagagtgtattaacattccctctgataactctaattcacctgaattttcaaaatcttgttatctgttattgggctctaaaggcacattataatttataaacaaagatgtagcaatatgcctgtttcaccaaataagctctaaaattttagatctttctaattttataagaaagtggtatatgctgactctgttgtgaaatagtatacaaattttaagttaattacagctagggatttggctgtaattaggaaaaaaattttcccatttaaacatgttgacctacattaaatattgcacttcagtgctttaaaaagtcaagttcagcttccttgagttttttttttaagctgagcttttaaagttgtctatttcacgctacattttaaaaataaatgttaacatatttaaatttccactgagaccacttttgtggcatacttcctcaggatttttatatcacttaaattttatgaaatgtaaaaatgtaataaaatataagtactggttctaccaatatactcatagctatttctaagcatccagtagcaaatcaagtaaaaattaataaaataatattttatgaataatatgttaacctaacaattaattatagaagggctgtaatcacgaacctattgctaatcaatagtgtactctcagtgcaacgcaagcagatgttagaagggaatagaagttatttattgcaccggtgaaaaatatataagatgcctattcaacttaacaacagtagtcttcgtttgtaatggactttaagtacagcggttagaaatatttaacattttttagtccagggacatcaatgaaagaaagtgtataaattcaagctagatgtctatatggagccctgtagttgcaaaactttaagtcttctgaaattttaagatattagaaataggaaaaaaaatctcaaaagttcaaataatagtggacatccaagaaggttagtctatgttggaagcaaatgaagtgtgaaatgtagtcagttagcgatgcagtttaagatagacaattcactacagcttcaattatgtaacagaagaactggatacatctataggcttaagcatgataataatgagtttaatgatggcgtagccaccaaaactgtctttgtacacgaaggaggtgcaaataaaaacctatcatcggctgtaaggggaagtcataggttgatacaaagcaagcctgtgtacaagtctttaagcaagcgtccatgaatagcaaggggcgccatgctcttcactggagaagaaaattacctatttgtctttactaacctctaactgaaattaagcattccttttcattttgaaagtaggcaaaaaaatcacagtagtacaatcagtacctatgaagtcacagatatgtacacatctcattacagttataataaatatatcaaaatatcatttatgcttatcactacttcaaaactgcagtacttattatatgtgctacagggtcttattgttgggctttaaaacattattctgaggaatgtcaggcttcaacagattgccaaagaagtccaaggcataaaaaaatgatcctagccagctgtctgtttatctgcccagaatctcatcctaatttactatggtttcagtcattttaatgtgcagtcactatcttcatacactccttttcttctggagtattctaggagaagacataccagtcgaggggttctggggagccaggccttcaagcaatggattgctgacaacataatgaagaggattttacttagaataatgtcagttgataaaagtttgaatgggagacggaagcaaggcagtgggaagtggaattcctaaattgaggaacctctgaatcataatccttagcaataataattaagatttcaaaacattataattctttcttcttttagacaagtctgatattgcttatcccatatcacagataaggcaattattctactaatatgcattaaggaatagtggttttaatttaagtgttaccttaatgaaaataattttgaattttttccttccccaagtctttttgtgaaaaatttcaaacatatagaaaaattgaaacaattgcaaaacatatgcccatttacactgttttcctccccctaaattcttagagtcaacaattgttaacattttgccatatatgctttttttctctcgctttctctaccctctttctgtatctctcatatatagggcatcacacacacacacacacacacacacacacactttttaacatttttgcaaataagttataaataccattatattttacccctaaataattcagcatgtgtcgctttgaaatacagacatgccatatataaccatgcctgtttattatgctctcctccaaattaaatataatactgcattattgttaatatccattccatattcatatttccttaatagttcaaaaatgtcttttatattttgcaggggagttagtaccaatatcttatcatggctcatgcattacatttggttattattatttttcatccttcttagtctaaaatagcccttccacatttttttcaccgatattgaaatttgaaaatgtccaggacgctagcctcaaaaaatgtctcatctttcaggatttgttttattttttttcccctgatgggatgatttaacttgttctgtagtctctgaatttctagtaaactggaagttaggtctaaataagacttcaagagatgcatgtcaaacatgtttggcgagaatacttcatatgagatgctgtgtattttgtattacgtcacatcaggaggtgcatcatatgaagtagtctcactaaatgctgcaaagttttattacttgcttcaggtggtgactgacagatcttgcattataatgtcacattttttcttcgcaattaataaatcatctaatggctttagtatccattgatgatccttccctaactcagttattacactggggcttgcaaaatggaggttttcctaatctgacatgatcttaacatttaccagctggctttcttctgtttgaaaaaaaaaaaaaaaaaaggtttttcctctatatttatgtcaaaatggactcataaatttttatttattcaatatattattatgaattacagttattattcttgcccagagcttcctgctcaattgtcccaggctcaccttggactttgcctatcccagatttagaattacccatttttttcaaggaactctggttacttttagaggtgaatagtacgtagaaacgtacatctgggtagtagccccttctcaatggaatgtgtgcacctttctggcaagcagtcccaaaggagataatattttcagattaccttggaaatgattcttgacaaatctctttcagaatacatggaagttaaaagtaagtctagacatgttaaaaagcccttcttgtgtgagacttcatgtacggtcattaagttactactcctttaaacctctctacttctgaattcttaaaccaaaatgtactagtatataatctatgctggtttgccatgcaaattaatggtgtaaataagataatgggaggcattcgtaaatgtacttaaaggaagaaattattgtttaaagaccttagctcattgtttgcatgcaaatacacgctgttgattagaaatgagccttatctaattcattaaagtaggcctggttggtcctcttcttgaaagtctccattagcaattcatattgctctatgcgcttccttgtaagacaactgttgtctcttaagttttctttaactttggcttcttacaaattcagaccccacccccaaccaaatagctttcaaccaaatagcttttcagcatcttatttcctacaaattaaaagcgaatattttaatgactcaaatggctctttacagtgtgtgcaatatgttaaatgtacccagtatatccgtgtgaaccagtgctacaagcctgctcacacattcacattttgcccccaggatctgtcccgtccgcttgctctgtactcaaacttcctttttttctcattgccagtttagaccttgactctccatccagcccagagtttggaaactgagtacccacaggctgaatcctgaatgcatgcagtatttttgcatagccactgtttttaaataattgacaacttttaaaaattgagagacctcattttttaaaaaaatatggatttctgtcttcttttgaaaatttagatctggctactaggcactcattactatattttctcttggcaccatcacctacaactgagtaacagatgtttcattttcttgctactcaaagtgtggtctctggtccagagcacagacatcacctgggagttgctaagaaatgcagaatctaataaataacagtcagcatttttaataagatttccaagtttccaagtgattcatgggcacattaaagtttgagaagcattgcctggggtaagcaagctttgtcctcagtttgcagcacctgtcccactttgctcatttatattaattgcttttccatagatatttgattttatagtacctcatgcagacctttgtatgatgatgacggttagggtggtgatggaagtgatggtgataacacttaatattgccatgcactgttccaagtgttttacgtagctcaatacttataacaactctatgaaatagttgctattctccttttaattttacaggagggcaacgaaggcacagactgataaaactctttgcccaagattgcacagccagcaagtatttgaaccaggatgcagtcccgcagtctgcctccggagtccttactctagatcagattttgcattatttatcccagttttgtccatcaggattctctggtatacacttgcaatttcttcctaccaaccttctccttacctttgatggccacacgtagtagcaaaagaattgaacatagaatctgttctgacctatctttccaaccctgtttttcataatttccactatttctgtttatgtctgaagctttgaatgacctgaagttttctgttcttcagcttttgcaaaaaaaaaaaaacaaagaacaaaaaacaagacaaaaaaaaaaaaaaaccgcttcctttggttgaattctctttccccttattttttttcccaaaatcttacacatcccttaagactcatcttaactgctattacctcaatgaattgtgacctgctcttctcaaacataagcagtttattctcttaaggttttcttgcccctttttataacactcatgtaatattgtatgtatatatcatgtatcatacctatttacatatgcttttcccccagcaagattaaaagcttcatgagggcagaggactctcttattgttatctctataacccacagtacttaccagaaagcctgatatattgtagatggccagtaagtactttcttaatttaaatcgtaagaattttattcacattcagattaaactgaagatttaaatctttacacttgacattattatatagattaaaaatagatctaaagagccagaccaatttttctgtttttatcatgttatcacatttccatggatacgtttgcaattctagaaattgaccttgatcccttctagtcttaaaaaaatggaaggagtttggttaataatattttaggtattcttcagaatttagtacatttaagagacaagtaacttcaatttatttagctagttatggcaaaaagcagctctttgattcaaacattttgtacatttgtttatcctactctcactgtatctcaactaataccttttaagtgaattaagcaggaattagccctgaaactgaatgttttagcctcatcctacatatagccacaagatgttttagatgcaatccatatcaccaaagagctatttttagattgatcagagagaatcatacagatattattattcacaggtgtcaatggaaaagctggtctcttcccatctgttctctgatgactcttgaaaagctttcaagggcattcataattcttcatcaaaagactatgaaaaatcagcttcatagttaattgttttatgtcatattttattttttcaacttggctagttctagtgaaacagactagctggcaccaaatatgttgttgcattggctggtaatgatgataccactgtgtggagatatacaagtgaatgtactttatttgtggccttccatgaactttatgtgcctgggaaagtaggagttagggagagtttgttagggaacgtgatctctgggatgggtcttaaaggatgagaagaggcaaatgaagagtaaatggacatgccagagagaaaaagtgacaggagcaaaatcactgaagcaagaaaaaatggcctacattgaaggactatacacagttcagtataaaaaggctctgttaagcaagcaccattgacttaccctaaactcttcattttctacatataaactgcccaattcccactccaaacctattgatggatattagtaacctattgatgtttttgaaaggtgttcaagtatcctttctggtaccatgtaccttggctcccaccatttgagagtatgttctccaagaggcaacagtctgtggttcctgacctggctatgcaagttattcttattattaaaattgtcctatttaattaaatatcatgaaaactaatgaaatagaaatgaaaagataagagaattgtggtttctatgaatactaaattgaatgctttggaagacttgataaaggtgattagaaaaaaaaaaaaggccagatgcggtggctcacacctataatcccagcactttgggaggccgagatgggtggatcacctgaggtcaggatttcgagaccagcctggccaacatggcgaaaccacatcgctactaagaaaatacaaaacttagccagacgtgggcctgtagtcccagctacatgggagtctgaggtgggagagttgctcgaacccgggaggcggaggttgcagtgagacaagatcatgccattgcactccagcctgggtgacagagtgaggaaaaaaaaaaaaaaaaaaaaaaccacggtgctgttgaattagatgtaggtaagacaactgtttaagattgggtatgagggatagaatccccaaaaaatggaggtattttgcattgagattattttcagcatctccaaatctgactgtaattcaaagaaaccaaactaaaagtcacagattatgaaatgtagaagtgttttatgcaaaaagtaatatgcttaacttcaacctgtgggcttttactccaggaaaagtctcggaccccataccaaatgagaagtaaatgagtgaccacttgtatattctaagaaaaataaaatgtttgaagatgtgtaaacacatttatataatccctccaattttacaatatttttccaaaaaccgcctatccacttaccctaatcaagtttgataaggggacttccttttatatgtaggaaggctgaaaaatgacgccatgacaaatgaaattgtcaagatggaccaggtcatggaagatttgaaatctcaaagaattttttccagggtagaatataaggatgttgggacgtttttatatgctttagatttgcatcctcatatgtccctttgacagttgagctcagagtgaaaaaaagagagtgaaactagtggcagggtgactcaagttagagacaatgagtaagcagaatagaactttaaaaacctgacagattcaagaaatacttgatgaaagtggaacaatttagtcgttaagtagatgggatgatgaggggaatgaagggacaattctaggatgatcccttttccaggttttttgcttgggggaactggctgcatggaaggctgttagtcaggataggaaatacaaaggagagtaactgaatggaaagaggaaagcaaatcagacatacagagctcaacttgggatataatagtcttaaggagctcttggaacattgaaaataaggtgatcagaaaacacgcatttgaataggtaagtctgaacatcaggaggaagacaagggctgaagacactgagccattttgctgtcaatgtagagatggtggcaatctccattgaactaactgcttctcaataaggtacctttctcaagtcattaatttgctaaccagtaaacaaaccagaattcccagagtacacattaaccattaagcactgctgtggaaaaggagttcaggtgtcaggaagccaacgtggcagatgagcactagtggtgacaaatgaaccaaagtgatatgggtgatctttatggggccacagagtaccactgtaaactatcacaaatcagaagggttgacaaacaaaatattggggataaatcagggaaaacctaccacaacatacaggaaaataagttcaaagatttcatcctacagattgcagataagaaatgagccctttttatttggggcaccctagggaaagagtagatgcccatatgtatatttaaagtatgaatacagcatttatttgaatatactgcaaatggtcaatacaagggtagctacagagcccataacatgaaaaggaaacacaaagaaatacatgccccagtcagactccttacttgggttgctgtaaattctctctccctttaaggttattgcatttaaagtctatctgttgattggacccaacagcagctgcaccaagactgtaccatttttaaaaaaaaaaaaaaaaaaaaaaaacaggccaaatggcattctgcatttattttccttgttgctgaagaaacttgaattgtctaccctcaaagcctgtcctttgagacacattttataattagaaacacttatttacaaagttctttttatgttagaatcacaaatcataacactccaaaaaaggaatacactatcctcaggtgagtgtcctacctttgtttacaaaagaaaacccaaagtcctaagagaaaaatgtgttgatcattttattgattccttaccttggtttaatatagttaatggatgtcttagatatgtataataagtctattatcatgttccctttaaaattctcttttgttttactaattatatgttgtcatagtttgaccattaatataagtctaaatttattataatgtgattttttctacaaaggttaatttgaattaaaatattttattttatctctctctactatgataaatgtttttaaaaatcgtttgtaaaatgaaagtactatatttgtgtaagctgccaatctaacaatttatcatttaccattatgatggtgaatgtataacaatccttatattcagcagaaagccttatctctcatttcagaggaatcttgccccggttaattattctgtctcttgaatgcacacaaacacaagcatatctttaccctttttctgctgcctcactatccctgatcaggtgaatgtttttagctcctagattacaatataaatatattcagacattcctttccaaatgcattcattccactgtacttgtcagagttcatagctgtgaataacagaacccagtttttgttgatagaagcggaaacggactttaggagaaagatacagacctgttcccattcctaaacaaagggatagaaaaccagctcaaaatgggcagaactcaaaaaagaggctcagctccaagaactatagtccaaatcataccctagattggatctcgaactcttggactcaagcgatccactcatcttagcctcccacagtgctgggattacaggcatgtgccacgacgtctggcccccatacactagatgtaaacgttgccatgcaccactctaccactgcagacactgggtgaagaatgtcattgctactggaaagaattctagatagtgccttataattctgtcactcattccagattcaaaaactgaacttcccccatcagattccatttgtatttggggattttgttcgacataatcagggcattcagattctgggcaaccaaagttaacaaatgtctcttacttcccctttcttgttattattcccatttgaatcttcttcatagttagtcactgttacttaaacacacattctctattatcacatttccctctcctctcttttgctgtttgcttttgatccaaaccactgctcagaaaccattattgccaataacaacaatgatttcttgtagttaaatccactggacatatcttagtcctattatccgtaggccatgtgccattaactgaacactttccgtattagcacttggtcctatcttatcttccaagtcactaatcttatctgaatttattcttacctctctatgtaattccttactatattgatgacactccttgctttacctgccccttacatcctgatgtttctctaggacatgttctgaaccctcccttcttctcattctatacggtttccctgattgttatccatagcaacaaatgtagctttcactgtatcaattagaataatatctagggagattaaaaaagaattatagtaactgaaacaaagtagaaatatattcatcttcttgtagaaggaatctgccagtaggtagtccgaggttggtatcattgctctatgatgttgaagatccagatcccttctgtctcacagatctgccatcctttggtgaggtccttacactcatggatcaagatgactatcagctctctatctatcacaactgcttttcaaaggctgcaaggtgtaggaagtggacaaaaaagggatacctctacccttttaaagggacttcatggaagatctacacaacactttagcttgtatgtcattggccagaatttattctcatgacaatgccaaactgcaatgggcattcaaaatgtagtggaatggatcatgggctaagcagctaagcagtctctaccaaagtcaccgatttcattttatggcctaagtctaatatttggcccaatatatagtttcagattagacctacatatgtagcttcaaatggaccatttcctcttctatgtctcaaagccatctcaaagtcagtatatccaaaactcaacatgttatattcctctcccaaaatctactgtgggtgatatcactatctattcatgtacccaaactataaatttggaagttacaagagctagtattaatgacactaagttttgtgcatttactctatgaacaggactttgataagagttttacaaatgtttcccacttaattgtcgcaatatctcagttatagagattttatacgtccatcatctcacctgactcttcgagatcataagcaaagcatggcagcattcttatgtccattttacaaattaccacattaagcacaagaaaaaacaagatatatgtccaaggctaaccaaagttatagaaggatcgagaactaaaagtcagtgatttagacccagatctgtgccttttcccttattgttacatatgaccatatctagctatgtgaacaaagcagctaatagtgacgacagggtagaacaaataagaaagtgaatattccccactacatttatgattatttgccagtttaacagcttcaagcctgtgtcttctcagatatgtgcttcctcttatgtctaaggaaaagtactatatttgatatgcttttatgaactttcttttttgagatggggttctggctctgtcactcaggctggaatgcagtggcatgatcacagttcactgcagccttgatctcccaggttcaagcgatcctccaacctcagcctcctgagtagctgggaccacagacacgggctactacacccagctatttcttttttttttttttttttttggtagaggcaggatttcactgtgttgcccacctggtctcaaactcctgaggtcaagtgatccacccacctcagcctcccaaagtgcggggattacaggcatgagccaatgtgattggcctgaattttttaaatttaattttattgaggtaaaatatacctctatataaataaaagtaaatatacctttaccatttttaagtatacagttcagtggtaataagtaaatttatgttatttttcccctttgtcccctctccctactcctatttctgatctctggtaaccaccaaggtagtgtctactttcatgagatccatgtttttagctcccacatgtgagtgacaacacataatatttgtctttctgtgcctggtttaccttacttaaaataattacctccagttctatccacgttgctgcaaatgacaggatttcaccctttgtatggctgaataatatcccatggtgcatatatatatatcacattttctttatccattcatcctataaattttaaatggtgtggaatttggagaatacttaaggaaaaatgacgattgtgtaaaaggaaagtatctacaaaagcaaggtttatctaccccataaagataacaagagaatctgtgaatgtggatacggtttctggagtgtttcagaggttgaaagattgtgaagaactggatgggtataaaaaaaagtgaggaggagaagaaatgaaagttctggaatgttctgtaaattgtagatgagttccctatattaattttaaaatgtaaattgagattataattattttttgatgatctatttttgctgggctgattctctgttggtgtaactctttaacgaatatgggtcacgtgggaccctggattttattagaattacatgtgcgaatcaaattctaactttatgagccaatataatgattgtttttttaatgattagagtctatccatgacaaaaacagcttgtttctcctactgacttatttggtgttttcttgctaattagcctttatactaggcagtagtaaatcagagtacttggacttcaggttggccattacataaacctggcaactaaatgctgggtaataatcacctatcttcccacctgtgtttattacctttggaagtatgtaacatggtatctttgcgtttatatttttaatttgttcttttttctcttgcaccagctacttaaattatctgagcttccttttactaatccaaaaataaagataatagtacatatttatagagatgttgtaagagtaagaggtaatgtaaataaattggctagctctatgcccagcacatgagtaggtgcttagaagttagtgtctgggtacatgacttctggggatgataaagtgagtagctcgataaatctccccaagaatcagtaaaatgggacacactggagaaaacatcttatgaccctggatatcaaccaacggcatatgctaaattaaaaagtgattatttataaaaagtactaaactttgtatatgaacaatatgaatttgtggtgtatttgcctgtattgcccccagtccccactcccagcttggtcaagcataatagttctatcaaggtagaacaagccatggaaataagcagcttcatcaccacagggactgattttatttgaagcagaagtttaaaactccatgtccagaagcattgtcagtaacggtggagacctaggcggcaaacaaaaaggcagaatagcaactcagctggcctaaagttgcagtcttgattggaacaagtaactgactggcagactggccagaaatttaatttaaccagcatatctgcaaaatgaggcagccgtaataggcctcagtaaggactccttgtgtctccttcatgaaaacttaaaatgtgcctgcatgttgaatataccctttaacacatataaagaacctttagcaaaacttggaagtcttactggcttgaggtatttaagatcaactgctggccaactattgactaatgcaaattaagctatgcttacctctaggaaactaggcatacagtttgtttctgttgtttgacagagaaagaatatcaacagccacacactgtggggaaacagattccacagatttcatctaggcaagttattaaaacttcaatttaaaaaacgctgggcataagaaggaacatcagaatttggggctcctttaatatgttatttaaaatgtcaaattttcaagaaaaatttacgatacgttcaactgtgacccattctcatggggaaaagcagtcaacaaaagttgtctctgaattggcccaggtattggcagatagagacttaaaggctcctactataaataccttcaaacaactgaagaaaagcatgtttaaataattaaatgaaagtatggtaacaataactacaaatagagaatctcaactaaaagatacacactatataaaagaaccaaatgaaaattctagaattggaaagtagaataaccaaaatttaaaaaaatcactaatggggctcaagagcagatagtaagacagaaaaaaaaaaaaatcagtaaatttgaaaatagataaataaaaattatccaatctgaatgtcagaggtaaaacagtataaaaaacgaacatgagtcatagctttgtgtcaaaacattgagcatatcaatgtagatgttacaagagttccagaaaaaaagagaatgttgttaaagaggcagaaaaattatttgaagaaataatggccaaacacttcacaaatacggttaagctcaacaaaccccaaatagaataaacacgaagagatcaataccctaaaacataagagtcaaactattgaaatagtttcatttgaaattattgaaagacaaatgggaaagtctttaaaacaaccagaaaaaaatgactcctcatgtacagggatcacatgattgatagttaatttctcatcataaacaatagaggccagaggtattgaaatgacatattcagagttctcagagaacacaaaattgccaaccaagaattccgcataaaacaaaactatccttcaaaaatataggtaaaataaatatattaccaagttgagaatgagaatatttcttgctagctgacctgacttacaagaaaaaactaaataaagtcattcaggctgaaaagaagtgatattcagtaactcgaacccaaatgaagagataaagaatcacagaactgataaatatgtagatacatataaaagactgtacaaatatagatatatgtttttcttcttttaacttctttaaaagacctaagattgcataaaaattataacattgtgttattgtgtttataagcaggaggagcaaaaatggagcttagcagagaaaaatatctaaattttactgtgttaaattagtttgaacttaagtaaattatgatcaattaagatgcatatgtaatctttagagcaagcactaagaaaataaatagttaaaaacaaaatttaaaattacacactaaaaataactaacaagacagtgcagtaaaggagaaacaggaacaaaaaagacatgaataagatgtgaaaaaatacaatatggcacatgtaattgcaactaaaagttgagaattcccattaaaaaaatctgaaatttgaaatgctctaaaatgtgaaactttctgaaggttgatataataccacaagtggaaaatttcacacctgacctgtaatgagtcacagtcaaaacacagccaaaactttgtttcatgcaaaaaattatttaagatactttataaaattacctccaggttatatgtataagatatctattaagatatatatatatacatatatatatatatacatatatatatatatacacatatatatatatatatatgtatatatatagtatgtgtgtttaaacttaggtcctatctccaagatattaggtatatgcaaatattacaaaatctaaagaaatccaaaatccaaaacacttccaatcccaagcattttggatatgggatactcaacctacatatcaatagttatagtaaatgggagtgaactaagcattccaattataggcagagatttcagacaggattatttaaaatatccaaccatagtttgtttaaaagagaaatgtattagagccaaaaccatataatttcaaagaaaaaagaggtactatgcaaattgtttacatataaaaaatgaagtgacaatactaatgtcagacaaaatagactttatgacaaaatatgtaacaagagaaaaagacatttttaattatataaggggtcaattaagcagaaaatataacaattataaacgtatataattaataggaaagtcccaaattctatgatgcagaaattgacagaattcaaaggagaactagacaattcaacaattattattggagacttcaaaccctactctcaatagctggcaggccaattagacagaaaaatagcaacaatatagaagaattcaccaacactatcaaccagcttgacctaactaacatttataggagacgccaccaaatgaaagcagaatacatattattttaaagtgcacatgaaattttctctgggatagattctatgctaggtcaaaaaacaaatctcaatacactcaacaggcttgaattcataaaaattatgttctcttaatatgtcagaattaaattggaattcaacagaaggaaatttggaagatatcaaaatattttgaaattcaacaacttctaaatccattggttaaaaactaaatcacataggaaattataaaatattttgaactgaataaaaataaaagcacaacatgtcaagatttataggatgtaactaaagcagtgcttacagggaaacttctagttttaaatacctattttagaaaagaataaaattcttaaatcattaactcaagctttcgccataagaaactagaaaaagaagaacacagtaagctcgaaggaagcataaggaaggaaataacgggggttagagcagaagtcaataaaatagaagaagaagaaagaaaaatcaatgaaaccatacattaatctttgaaaatattttttacatggagaagctttagctagactgaccaaaaaaaaaagaattaccaaaatcataaaggaaaaaggggtaattactaccaaccctacagaaattagaaagactagaatgtaataacatgaacaacattgtcaacaatttctgcaaaacatattaaatgaaaaaattcttagaaagacataaattaacaaaactgattcaagaaaaaaatagacatatgaatagacctaacacaaacacagaaactgaattagtaatttaaaattttccaacaaaaaaacccaggtccaggagaaagataggaatccgaggcatccacagtatagaagaagaaatgaaactctctttattcacagacaatacaatcctgtatgtagaaaaatctgatatccacaaaataactgctagatctgataagttcatgaagcttgcaagataatcaatatacaagaataaattacattcctgtgtactagcaataaaaaattgaaaatgatactaagaaaataatttcattctttgtagcataaaatagattaaatggtcataaatttgaaaatataagtactaaacctgtactctgaaaactgtaatacattgctgagagaaattaaaaatctaaataaatgggaccatattccatgttcatgaattggaagactcaatactgataaggtagtgattctccccaacttgttctatagatttaatgcaatctccatcgacatcttagcagatgttggcacaaattgaaaaattgcacaatcttggcacaaattgaaaaattgatcccacaatttatatatagcaattcaaatgtaccaaatagccaaaacaattgtgaaaaagaagaaaaaagttagaggactttgaaatcaggacattacctgatttcaaatcttgatgtaaatctgcaatgatgaagacagtgtggtactgtcataaggacaggcttatagatcacctgtaggtttaggaaacaaacctattcatatttttttcttaaatctactaactgcactcctaatgttgacaatggaagagactcgatagtccagcaataaactcttatatttatggtcaatcaatatatgacaaaggtgacaagataatccaatagaagaaaagcttattattgggtagcttattgttagtgtacagaaacagagctgattgttaatacaactcaacaggaaaaaggcaaataacttgatttttaaaatatttaaatatatatttctccaaagaagacatagaaatggccaacaggtatgtgaaaaggtgctcagcatcactagtcatcagggaaatgcaaatcaaaacctctgtgagatgaacactatcatctcacccctgttaggatggctactataaaaacaaaccaaaaacaagagataagaaatgttgttgaggatgtgaggaaatcggaacgctagtacaccataggtggtaatggaaaaatgatgcagctgctatagaacacagtagaaaggttcttgaaaaagttaaaaatagaactaccatatgatccagcaacctcactcctgggtatatatcccaaagaattaaaaccagaatctcaaaaagatatctgcactctcatcttctctgaagcattattcacagtagccaagatatcaatacagcatagctgtgcatggaagaatgcatggataaagaaaatgtggtgtattcatacagggaatattatttggccttaaaagggaaggacgtcctgccatatttgacaatatgtatgaacctggaaggcattatgctaagtgaaataagccagtcaccaaagggcaaatactgaatgattccatttatatgaggtgtctgagacagtcaaactcgtagaaccagagagtagaatgatagtaaccaggggctgggcgaagggggaactgggagttgctgttcaatgagtataaagtttcagttatataatgtaaataagttctaaagatctgctgtacaacatagtgcctgtactgtgcacttaaattattattaagaggatatgtcttaagtgttcctaccataagaagaagaagaagaaggagaaggagaaagtgaagaagaagaaagaaaaaatgaagggggcatgagcaaacttttggagttgatgcatatacttggttaccttgattatggggatggtttcatggttgtatgcttatatcccaattcatcacattgtatacagatgctcctcaccttaggatgggattgtgtcctgataaacccatcataaattgaaaatgttatgagtcaaaagtacattttcaattaatgatattttcaacttacagtgagtatatccagatataaccccatcctcagtccaggattatactaaatgtgtatcgcttttgcaccatggtgaacttcaaaattgtaagtcaaaccatcgtagtcagtcggggaagatctgtttgttaattatggacccatcgtgtacaccttaaatacttaataaagctgttaaatgaaaattaaaagttgactgggcacatggctcatgcctgtcatctcagtgctttgggaggccaaggcaagaggattgcttgaggccaggagttcaagaccagcttgggcacatagcaacattccatctctacataaaattaaaaatgtagccgactgtggtgatgcaagcctgtagtcctagatgctcgggaggctgagttgggagaatttcttgagcccaggagttggaggttacagtgagctataatcatgctaccacaccccaggagaccctgtctcaaaataaataaatagaagctttaaaaaatattggtatctcagtgttcctcattatccactgtatttaaggtttagctacttgtgcttgatgcttgacaaggtaatcttacttttctccctgatattggtatgatgcaaatttactatatatatgacacaaatttatatatgcaatattttctcgttaatggccttttattttactctcattttcattatgctttgccttttaagtcatatagcaaataaattatgtggcattttcttagcaactattaattcaggagaatgggaacagaattctctcatagattcagctggaaggtaatgatggtcagctcccagtggagaaaaaaaaaaaaactcccttcagttttcgtaaacatacagagaaattttctcctaagtgctatgtcagtctgctgtatgtcctattgatctgagaaccagaaaacacatattttagtttacactgccttgactctattgtacatggctaggtctgtttaaaaaagaaatccttgaagataccctttggattctagtattttaaaacggatgcttagctaagtgaagtggtctacttcaaggatcaaaaccaatcttgagtaatctgttaggtagactccctaagttcatctgtaccttgtaccaaatttttaatgaatttagtaattgacatggatgtaaaataaataatacactaataaagttcatgcagaatcaaattttaatgcccagaggtaatgtagaagatattacctgtccatttctctggacttagctcctgcaactctccatttttctctctaaactttagccacactgaattcctagtttcaattcctctgactcgctaagtatttcttctaccttgataaaagctaattcctttgtcttgtaccatctgtattccggctgatattgacatagttttcagggctcaatttcaatgttacttactcagagggactcactgttacaaccaccacagccttttcaatctaagtaagatccactgctcttcttagaaacaggttatattccaaatgactgtaagtgcttttgttcttagaacatatgtctccattcaaaagaccgatagatattcagttaagccctttgagaaaattataaatgttgaggaccttgattattattgttattattgcttcttttctatgttttcccaggactctcaacaaatttgctttgcttttgtactcatggcacataatgagattaataatgtttagaaaacatttcaaaaatacacacagaggagacacatcttagtctaaagttagacatgataccaaaaactataataactatagctgaccagtgaccccatttattcatggaaagtaaaatttgatgcatatttgcctttaggagcaacatacctatgaaagttctgaaagtgaaagtttgtaaaaaaggagtactctcctaacaatcttaatttttttctatatatatgtatggtttgcattaaactcttttgtatgattagtggtttaatgttgatgtcacccatgacaccataagctacgtgtatggactggctctgttttgttcactcctgaatatccagcaaaaatagtatagtgcctggcccttggtagatgtgtaataaatgtttggtgaatgcatagctacacttcaatgcttatcgcattttaatcccagctactcggaggctgaggcaggagaatcgtttgaacccaggaggtggaggttgctgtgagccaagatcgcgccactgcaccccagcctgggtgacagagcgagactccatctcaaaaaataaaaacaataaaaaaaaggagacccattcatgtatctgtatcactgactagcctgtcaacattttgttaactacctcatcaagtagcaaaatcagtacctggtatgtggtagatgctcaaatatttgttgataaaatacagtaagttaatgacaggcgagcttgcctcagtgaaatataatctgtaagtgagcagtgtgtatatcatttgaaggtgccctacttagcctagcatatcacagagattcccagtaaatatttaggcagttcattaactctaaaagttgaccctcatagtcattggcctacattattcacctccctctgtctctaataaattcattggcaaatttctgaactccaactggaatgtttgtggtggatttcttcatacctaatggattatttcaattttcattttacattgtattatttacttgtctgaggtctttataatgacaaactcggcatgcatgataagctgtcattacttatgccagttgacaaggacatattatttttctacaaaaaaaattatcttggccaggcgcggtgcctcacgcctgtaatcccagcactctgggaggccgaggcgggcggatcacgaggtcaagagatcgagaccatcctggtgaacatggtgaaaccctgtctctgttaaaaatacaaaaaaaaaaaaaaaaaagcagaacaaaacaaaacaaacaaacaggagtggtggcgggcgcctgtagtcccagctactcgggaggctgaagcagaagaattgctcgaacccgggaggcagaggttgcagtgagccgagatcgcaccactgcactccagccgggcgacagagtgagactccgtctcaaaaaaaaaaaaaaaagtggtaattgttcaaaatatttacttattaattcattttaaaattgcatgttgaaataaaaaataaatgtttagtttttaaactatctcttctacaacagaaacaatatagtgagaagagtgatcttgttttacatttttgcaaatctctttaaaagttagcttaagagaaggcagctggttcttatatctgtttctgcattgaatgtgctgtcatatctcgcatcatgtagcctctgaaaaactcataatagaatgagagaggaaaaagtcaaataacatcttagtattattacgaaaataatttggacctcacagaaccactgcatgggtctcagggactcccaggggtccccagaccacatttaaggaaatactgtttcagggaatataactatttttgtacctcctgtggctatattcttttaaagaatagtaacctctgtttctgaggaacttagctgcaattatgtgcagagtttaaataagtgaaacggaaataccctttgcctttctgctcgagtatgaaagtgatgatcaaaatgttcccttttctctctctctctctctctctctctctctctctctctctctctctctctcactctctggggaacttcgggtttccgtctctatataatgtattcatattccactggaaacatacatagtttgagaaaacagatgacattttttctgggggtggaaagaattactaccacgaggaattcaaaatacagacacagtaataaaaatcaccataaagcccagaggggaaaaaaattgagtaacaaaataggaggtgaaattataaaactgagtaacaaaaaagaggtgaaattataaaataaatgataaagttggttgtgggttaggaagaaagagaaatataaagaaactggcataatgtaaaagccaagacaagaaaagtgaggcagaggcataggtcttttgactattttccatgtttgattctaaggtaagtagatatagtttctcatagttggaaatgttcgtgaatttaaacagaattaatgtttataatcagatgcaatgtctagtttttctatttgtcctgtgaaataataattgtgtaaagtgctcatgattgtttcaaggggtgaggagtagttctaattatcatagatattttcatgacttcgcataccactggtttatagagattatacagattttcttatatcagaactctcgtatctttaattccctagtagatgtctaagaaggagatttatcacatagcagatggtggtaaacttgagtaaagtgccagatactaaatgcctttggctttgtgggccattcaatctttgctgcaactactcaactctgctattgtagcatgaaagtaaccatagacaatatgtaaatgaatgagtgtagctctgttccagtaaaactttatttacaaaaacaggtggtgagcacaacttggttcatgagccatagtttacaaacacttgctgtatagctttccctggttgaatttcgttaattttatacagaacctgcctcccatacacacacactttgttcttcatggaaaatctccccagactactatgaaataatgttattacttggagatatacaattaagatgatgtcattaggagattattaatataggaactaagcaaatactatatgctaagtactgaggatagggtgcgatcacaatagatagaaaatctgcaatagtttgatgaacatgggaaattacagtatttcctgtgatggaaacattatgaggggctgtgggactacataacaggacctgtgacctatacctgggttggggatgtctaattaatcaaggaaagctttgtagaggaagtgatgtctaacctgagattggaaaggtcaacctggagctacctagatgaagatgtatggaaggacatcccaggcagagggaacattgtatgatgaatcctgatatggatatagtgctggattttaaggaagagtaagttgttccatgaactatacagtgcaaagaaagatgaagaaatagaagtagagaccagatcacaaagggctttttgaccatgttagagaagttatattttatcccattggcactaggatgttgttgagtatatgaggacatgatcagcaacatattttagaaagatctcttattctgaagtgtaaagagtggataagaaggagacaaggtaggaggcacgagctaattagaaagcagtctcagagaggctgttagaaatcagaacagaatggctattattaaaaagtcaaaaaacaacagatgatggtgaggcttcagagaaaagggaatgcttatacactgtttatgggaatgtaaatgagtttaggcactgtggagagcagtttgaaaatttctcaaagaacttaaaagagagctgccattcaacccagcaatctcattacttggtatatatttaaaagaacacgaatctttctaccaaagagacacatgtactcacatgttcgtcgcagcactatacagtaacaaagacatggaatcaacctaggtgcccaccagtggtggattgaatgaaataaacgtggtatacatgcaccatggaatactacacagtcataaaaagcatacagtcacgccttttgtaggaacatggatgcagctggaggtcattatcctaagtgaattaatgcaggaacagaaaaccgaagatagttagaagctaaacattgggtactcattataaaggtgaaaacaatagacattggggactactagaagggggaggaaggagaggggcaagggttgaaaaactacctatcgggtactatgctcactacctgtgtgtggtgggatcatttttaccctaaaccttggcatcacacaacatactcaggtaacaaacctgtacgtatactacctggatcaaaaataaaagttgaaatcagaatgagaaggagcgaaggagacagcgacaggaggatggagagaagtgggcagattcaagagagatttctcaagtggacttatgaggacatgcttattgatacgctctgggagtgagggagagagaagaatcaaggatgacttctacactttcagcttaaaaaaccgggagctggtggagtcatccattgaacttgacagaggagcacgtttaggcaggaagatgatggtgtttgaatgtctgcgaagggaaaaactgaactgggattcaaatcagaaaaaacggtttgaagtcataccctcttaattgcattttctatcggatggtaatggctttgtgacaggctttactgataggtgatgtaactctgcctctgacagatgaagatccaaagcatcctcagattttcccgaagcctgtttcagcaactgtgtagacagcacacacaaaaatctggggggaagtcctagggctcagttagttgattggatctattaaagtagcattggagaacacagttcagtctgagatttcccaaacatattgctctataatttatttttacccagaaactgaattcgatgtgggatagggattataaaagccttcagattccagatagaatctctgaatagaaggcttttgggccacatctagtaatctcctttcctcactccatttctgaacttcttgttcacttcttcgctgtttttaggacgttcttactacactcctgcctcaaggcctttgtacttgttttctctgcttagggcgttctttcccgcaatatttgcatggcctcctccctcgcttctttatttctatattacctatctttattaaagctgctataaaaaaaaaaaagcccacacctcagtggcttaacataatagaaactttccgttcatgcaaactttacaaaaattttctggtcaacaagtagatttcctccaaatggtggatcaggggggcccagggcacttcgcttttgtggctctgatgtctttaacatacggatttcaaaatcactgtgctcttgtacataagaatgaaaaagaacaaggaatattacatatgtggtggtggttattggaggtggggttatgagccaggcttcatattcatgagcatcacttttgctcacactccattggctcgaactcagtcatgtagccaaactaatggcaagggagactgggaaatgacagctagctgcacaattaagagaaatgagtagacttgtctaatgagcagctagccagtccctaccacgaggactttgctcaaatgtctccttctccatggaaccttctatgatcaccctttataaaatcacaactgctccccatcttcccctcaatatttccatcccttttccatgcttcatttttttcctctgtaacacttactgtatcacaatctatagattttatttctttatcttgtttactgtctgcctccccttcctcccaatcggatgtaaggtccatgaggcagggattgctgccgatattcacggccatatcaatggacactagtagaccctcaataaatggctgttgcattgtgattacatatatgcttcacctagaagtagtctcatctggtggcacatttactcatagattgacattaattctctattgttttttccccagcaaaatttgtcaaggtagtttgtcagtagggagaaataaagttgtcaggtggctcatcaaaagttcaattttgagtactcctcctgtgtactcataatgttttataaatacttttatctatgtaagcacgtgggcttagacacaattctaggattaaaacagaaagctctgtatccatattttcccttttttgtacctccttttatgttctctaccattttttttgagtgctgttagtgaagcactaggctaaatcttgggtttctgcaaaaaaaactttaatcctcacaacactctaaaatgtttattgttctaattttaagacgaggaaactgagggctaaagagattaaggaactcgcccgtgttcacgtactcagctgataactggcagcatttagatttggacttactttccatacagatattcgcattgctaaccttcaggtttttccctcatcgttttccacatctactcaaaagttgctaatcatttccttaatagtgaggcataaatgactgagaaatcttgatatattatccccctcaggagcacttcattccgacaagacacaaactttagggaaaatgaacaaatgtctacttgtacaactcaagcaccaaccaggtatggtagacatgttggcttaaaaataaagttgatgcttgggttctgattctgataatgacctacggagggtatggcctgaggaggttactaggtgtgtgtagaaatcaatgttttgttttggttttccctcgggaagggtcaacttatacttgaatccttctgaagtttctcaaattacaagatggtcatttattttacttcaatcaaaacaacaaagtactgtccgggaaagatgtattgccttgacttattctcaatttatgcttattttggaggcttgtagaagtaaacctgatagaggagggcaaaaacacacacacacagacacacacacactgggagaaaataaatttaacacagtttagggattgactttggttgtatgacatcacaattgcaagagttggatgccattgtaaacaagctatggaaagaatactgttaaaagtaactcattaagtggttacatggtgtagctcatggacatatggcacagaaaaaagataaagctgtctttacataacataaaactgtattctgttatgtaaatgtgtgcttgtggcttgcagtaaaattcctagtgaaacattacctctagattcagcagtactatacctcaggccacatggatgtaagtaaagatgatgccctctggaaaactgagttaggcaacaacaagtgcatccatgaggatgcaaatttcaatgttgaaggtgcctgtgaagaatttgaacaaaattgttgcatgaaatatgaatgaagaagtgtgatctaatgacataatattttgtactatataattttaaagtagtacacacaatcaaattaatgaattaaacattatatgtaaacaggtgatcattgtatctccattttctaaagtttctatgttaaaggtgatcaaaaaacttggagagagggacttctcatttggaaaatgggatagtcacctttgggtatgtgatgtatcaatctctagaacttcagtttcttcattgaaagcatataaaaggcaatccaaaggatgtatggaatattaaaagattccactgtgaaactatctagcactttacctgaaacacttgttagatcccctcaccaaaatcatgccatgtgatttggcagtctattcctcttagcgtaagagtagcccgacagaaaatgttcattaagagttaatgttaaattcattgaatttagcaacacatgagtagcgcttcctttctgattatgcaaatctctcaccatcgtaatacgtgcttcctttaatttcattgggaacatttgtaatgtaaatggtaacagagccaatatttcaaacagaagccattctttctaaaaaaagctaaatgtctaaatgtattgaaatgcttctaaaagtaaaatatttagcacttatttgcagatgggtaatgttaaatatctcactcattattattactaccacttgtctgaataaatcctcccataagcattaagcaagtaggtaaacaaagaaataacacttcatgtgatgaatgccaatatgaagcacgtttaaactgttctgtcaagagacaagcctggaaatgctaactgtgtttctttgcttttctgcaatcatctgaatacataaattcaaattgcagcttttaaaacttcaaatcgaggcttttgaaatttcagaaaacacatgcgcttggaaaagcagattataacaaggtcccaacgggattttgtcaccatcttttttatatttcaaagtataaaaaaaatctagataagaaatgactaccaaatgttttcatatttaaaagatgctgtttttttaaaaaattaaatcactggaaaaaaagttttccacaaatatcgtgtaaaaagaaagacagcaaaaagcttagccaaagcttttactgtttaagtgatgatttattctgagagttcttaagagttttctaaattagtatatggttaatatccataaaatcatatgcaagatgctgtctttcaaattgatgctgaaggttaattataaaatgtacttaattatttatagtgtcccattgagtcccagatactctgtgtccaagaacactgtaaatacagaaagtttagcagaattatattggaaaggcagtaattcttcacaaattaacttattgatataatgcaatcccatttaaaaattttcagcgagaattgttttataatttgactgaatgatacattacataagttagaataactaaagtgggagagcgggttaacctaccagaaattaaacatattttaaagctgcaataattgacatagtgcattactgtcacaaaaatctacagtagatcaacaagcagaaacttaaaatatcatgaagaaagcaccataaatcaattcagaagagatggtgctgggggaaaaaatatcagtttctgaaaaactcttcaaggttagaaacaacactatataaatttaagatggattaaatatttggttgttcttttttaacaaatgaaagagtaaaggatcaagaataaatgagaatatctgaacaatggtaaaatggccacaattttaaggatactatcaatgaacataatatcaaagaaataaactgttaaattttatttagaaaaaactactaaaaggcaaaaaggaagctggaaacgtagtctcaattaatctatgtttcagataatgtgaaaagagctcttaaaaataggaaaacacaggaaaaatgggcaacagacattgccgataattgacagtggaaactaaataaatgacaaacatgtacacacatacaacattttcaactttcctattagtagaatacttaaaatatctatggcaagctttttatttgttttattggtatatcaattataatgctcaatagtggcaaaagtgtagtgagacaagtattttgtaactgttggtgggagtttacgagtgttctgagtaccaaccttgacagaaattcaacaatgtgtatctaaatccttaggattcccattgttaacttttcattctcattccagcagatacatgattcaaaatgtataaataaatgtgtttattgtagggttattcattataataaaaaatgaaagcaaacaaaattcctaataacacaataatggtgaaatatagggtacccctatatatcttattactaggatcttaaaaaatcaagtttttaaagcgtaattaatgacctacagagacacatagtagaataataaatgaagaaaataagcatacaatatagggtttgaacccagtaatacatataaatctcaactatgatgaataagcacaacatctctcctctgtactggatattcttgatagaaaaaaatatgctagtaaataatttgagacatatttgaaaagaggggagtgtttgatttagaattttctaaacttgagggttattattatttttttggtttgatattactttttcctgctccttaaatttttgtttgtttggggggtttggggttttcttttccttaaacgtgtctgcttctagatgaaagttgaaaatgtttaaaagccttgccaatgtgtctaggtttttcaaatgtaatcagattttagcaagattttacttaactaaaagtattcagaacactgtgcaaaatcatctggagtcaaatagtaatggaggcaatgatttgcagagtagaaacagagagagagaaaaagatgagatagaccctcaaaatctagacccaaggaattaaatctgcttggaacatttaaacaaataaaggatgcctgtactatactagacgttttcttcttccacaattgattctaaggtcagaatctgaggggaaatggtgctgttccacattctaaaacaaactgccagcaatcgagaccagccacttccccatagggtttactctaaagcaacagggattattatctctattccaagcaatttccaatctcctctgtactccgtgtcccaggcaagattaaaaagactcaggtaggaaggggtagtaagctttgtggggagtgcagtttgtggtaagggacagttccttctctttcatctctctgagtcagaagtagagacttcgagagaatcactgagagtaagtatgtagactccaagaaggaaaaagcatcctctcacttcaatgaatgtttggaatctgcagacctccttcccaggtctgtgtagcttttggagaggccagaagagcaccgtaggcattcctttggctttccatggccaagcacatagagtagaagaagaggaggaaccgtaaggttaaccatacataagaaatcaacaaaaggctttgaaattgacttttcctatttttcaatttaaataagagagaattgtcaatgattaaaattcataaaacgaagaaagaatggactcagaaaatagcaaacatgaaatgttaattattagttcaaaagttagtttaccgtgttttctctgccaactgattgctaatgactaaagtccttatttccagctttcctctctccccgagctccagatctcttgatttattaaactagtagtttccccaaaatatatgagacaacaaaatatactctcagctgaagtaaatagcattcatcttcccagtcagataaggcagaagtacttctagatcagatgttatattcgggataggttaaaaacagaccctgctcccagtgtcccaggaatgaacagtggatgtgcttatttctcattgcatgcgtgtatcaaaatatctcacgtaccctacaagtacatacacttactatgtccctacaaaaattaaaaacaataaatcataaacatttgtaaaaataagcgaataaatgtataaatgaatttaaaagagaatagacagaggggagaatgtaactttacgtgtcccagaacagactttgaacaggctcttatcatataggaaaactgaatgaatatatgcaagcataagtccaataaccagattctgatttacagaatgatcgcaactgtagttctctcaaggccctgtctttgaacaggctgtgtcttattcctgcaacatgctgatctatcttcatgcttcaagactcagatcattatcttctctgggatgtctcccaagcactgccccagaaataacttctcctcctataatacttaatcataatccttggcttacatgcttgtttcttctcattgactatgaaatcctcaagacaaggtatataacgtatatatctttaatcctaatgcccaattgagctcttagaaggtagtaagctcccaatacacatttgttaatttgaagcaaaaaaaaaaaaatagctaatcattcaaaaaactgaattatcacaaatgtccatctaaagtactatatttacacaattaaatgctatacagccaggttaatgaacagactaaaattatatgcaacatggattatcgtaaacataattttgaatgaaaaaggcgagacacaaaggagtataaagccatacaattccattttcataatattcagtaccggcaaaataatcaaagttgacagggtactggttatacttggaggcagtgactgcaaagggataagaggagatttctgagattctgataatattctatttccttctctggttgtacagtgtgttcaatttttaaaacactattgggctatacagttaaattgtgcagtgtcctgtacgtatattacacttcagttaaaagcttccatggaagctacacatagttcccaaaagacaacaaaacaaaaaattttcaattattttaagcacaaacaattttgttcagctgtcttacaatcgaatatgtaagaataaatttatggctaattagcatagagttatatgcattttcataattaaaacttccacgagtacaacatatgttaagtattttaaatcagtttttctctttcctcaaataaggttgtgagtcataattcggaaaacagtttagcatgtaataatttagtgttttattttaaaccaagctgaagccacataaagcagaactgctcaactgagccctatccaaatccttgacccacagaataagaagcagataaaatggctgctacttaaacaaaacaaaaaccttgtttatatttttgtcctctcattttccataagtatactttaattaaacattttaaaacttgtaactttaggttatatacttactttagttggttctcaaccagggacaattttgtccccacccccaaccccccagcatatttggcagtgccttgaaacatatttggttgtcacagctcaggggcgaggtgttactactggtatccagtgtgttcaacaggccagggatactgctaaataccctacaatgcagaggatagctgctcacagcaaagaattttccaaacctaaatgttagtaatgctaaagttgagaaaccttgctcagatataatgacataatgttgttagaatttttattttattcattttaatgtatgtatgtatgtatgtatgtacgtacgtatgtatgtatgtatttgagatggagtctttctctgttgcccggggtggagtgcagtggcacgatctcggcttactgcagcctctgccttccacgttcaagtgattctcctgcctcagcctccctagtagctgggattacaggcgcctgccaccaaacctggcaaatttttgtatttttagtgtagacggggtttcaccatatttgccaggctggtcgcaaactcctgacctcaagtgatccgcccacatcggcctccctaagcgctagggttacaggcatgagccactgcgcctggccaggaatttttgaatcagaatttttcttgttcgattttaatctcttatcatttagagattcttgaaatattgaaattactttgttcaaagtgaatgaattttcttaaattatgtatggttaacatcttttaaattgcttatttttaaattgccatgtttgtgtcccagtttgcattaacaaatagtttgagaactatgttggaaaaaaaaataacaattttattcttctttctccaggctagaagaacaaaagaatatcttgtcagaatttcaaagagatttaaatgaatttgttttatggttggaggaagcagataacattgctagtatcccacttgaacctggaaaagagcagcaactaaaagaaaagcttgagcaagtcaaggtaattttattttctcaaatcccccagggcctgcttgcataaagaagtatatgaatctattttttaattcaatcattggttttctgcccattaggttattcatagttccttgctaaagtgtttttctcacaactttatttcttcttaaccctgcagttctgaaccagtgcacataagaacatatgtatatatgtgtgtgtgtgtatttatatatacacacacacatattgcatctatacatctacacatatagatgtatagattcaatatgtctaaatgtatataattcacagtttttatctttgatttgaaattaattttagattttacttgagaacttcacaacttcatataattttaaaaactgaagaccagattgtggaatcataaaatctaaatctaaatgggaatcacttttttaatctgtcctggttacctacctggagatttgagaagagtctttaaaaagaagaatccattttcttagggaagatctggattgccagatcagtctcaccacttcagcctctacttaaaggcattatattcccccgaagcaatgttttgttttagctgatttgtctgggggtgtgggacgtggtgttggttcacattccatttggttgaatagacatccagcttattccagtggcttttcataccgtcctactgtgatgtctgcttattactgattacttcccttggctgactgacatgctctgattgtgcaattggattaactttcatggttttagttttaggaaagcagctcttttggatctatttcattttagttgtcaagcagaaggtgaaaggggaagagaaattaatatttaatcattccctgttatgtgccaagtattagatacatttacagccactattttatttaatcttcatatcagattttgacaatggttgctattatcctcattttacacggtcacataatcaaagggaaatgaaattggtcctttatcaatgattcaggtgctttacacatgtaaattagagtccaatgtcaaacgtttatttctgtgaaacaagaggtttacacctgaacaagaaataaagtataaaaataaaatatggcgtaattcaataaacaaatatggagcactgactatacatccgatgttttactaggtatttgggattcaaaaatagaaaagagtgggaatcatttgaagatggttataccctagaacaatgaactcagtcttttcttggaaatttatctttcccaaatgtattgagtgtcatatatagtaatataattgataattcattcgaaacatatttagtggcattttcttattaattaatatgcatgagtctattttctcctgaaagaatctagatcagtgctttcaaatagaactcccgtgatgatgaaaatattctgcatcatccatttttgtaacgactagctatttgtgccttttgaatacctggagagttggtcgtgtgactgaggaacttgagattttattttagtgaattttgattaacttgaatgttaatagcgttgtatggctaatgggtactgtagcagacacagtaactttagttgacaaaaatgaagtgttaacaccatggtgattttggaggtcttgggaaagggcatacactatgtggtggtgaatgagttcgagaaatttagggatatgaagtaaaaaatgaggactccagaatgaaactacccaaatttgaaccacacctttgttgcttgctagatttgtgtcctgggagctggtatttaacccctttgtctcagtttccttccatataaaatgaagataattggatctacctgatataattattataatatgaagataaactaagataataaatgtgaaaaggttagcacagtgcctggcactgtgtatattgagagtcaatactctcaatgtcagttacctcttaagatgataatgcaatttctcagcagcaagctacggtatgctatggcatgctatgatacccaagaggctgatgaatttgttcacattgttctatttctgatagagagataggttttcagacactaactttatttggagtgttgctttaccatctcacatttttctcttaaaaaatttatgagggataatataatcgtttattttctacagagatttatctactgagggggtgagtgtttcagtcaatcagctctgtgctcagatagaaaactgttggtatttgaggtaccactgggccctcggtcaagtcgcttcattttgatagactaatcaatagaagcaaagacaaggtagttggaattgtgctgtaattcattttaaacgttgttgcatttgtctgtttcagttactggtggaagagttgcccctgcgccagggaattctcaaacaattaaatgaaactggaggacccgtgcttgtaagtgctcccataagcccagaagagcaagataaacttgaaaataagctcaagcagacaaatctccagtggataaaggttagacattaaccatctcttccgtcacatgtgttaaatgttgcaagtatttgtatgtattttgtttcctgggtgcttcattggtcggggaggaggctggtatgtggattgttgttttgttttgtttttttaacctgaccgtttgctttggctatatgttttgttgtggctagaaaaaatgatgatggtgaatggctttacattaatgaccaaatgccaaaatttataccacaattttttgcataaattattctgaagaatcagactgaagaaatggcgaagtatttaattcagtggccaggcatgtactgacagtatttaagctgaaaggacgtggtctggttctagttaaacaagtgtcataaatcaaaattaattattcacacctgtggtatggacttaataattaatgtacactaacgttcgccacaagtttatttatttacttacctactgatttattaacttgtgagttttcatctttccaccttgcatactatataaatctaacagtaatactatttattaaattaatacatatttattttatataaagcaagtggtacatatgaatttatagtaaaaagcaacatcaattgatccagcactattcattcaaagacaatcatttccccactgtattttcatggcatctttgtcataaatcaagagaacttgtatgtatgaatctgcttctggattctgtatcctcttccatttgattaaatctgtactttaacaacagtacttcactggcttaattacaatcttttttttaaaacaatcctaccgagctataattcacataccattaaactcatttaaagtgaacaattcaatcgtatttcggtgttacttttttaaggtgtgataaaatatataacataaaaaattgtcattttagtcatttcgtgtgtccagctcagtggcatttattacaaccatcaccacagtttatgccccacccccaatttttttttttcttttttggagacagagtctcgctgtgtcgctcaggctggagtgcagtggcgcgatctcggctcactgcaacttccgcctcccaggttcaagtggttctcctgcctcagcctccctagtagctgggattacaggcacctgccagcatgcccagctaagtttttgtatttttagtagagatggggttttgccatgttggccaggctggtctcaaactcctgacctcaggtgatccgcccaccttggactcccaaagtcctgggattacagcgtgagccaccgcgcccagcctccaaaattttttattactccaaccagacagtctgtaaccattaagcaatagttcccctttctctctcttcccatccgctagtagcctctggactactttctgtttctatgaatttggctattctagatcttttatataattggaattatatatttgccactttgtgtctgccttacttccctcagcataatattttcaaggttcatctatgttgtagcatgtgtcagaacttcattcctttttatgactgaataatattccattgtatgtatatacgcaatcattttatttaaacattttggatctggttgtgtaaaccttccactttgttcttcctattcaagattgccttggctacttttggttctttgaataaattttagaactatattgtctatttttacataaagccttccaggatattgattgaaattttgtgaatctggagctcagtcaacatctttacgatactgagtcatctaatttgtgaacattttgaattgtgtcaggttatttattgtattttttaaattggtgatgctgacattctaataacagatcatttacacgactgataaaatatttaggaactaaaataagtaccaattttatgacattaaaaccataatgtgcgcttaagtgtctctatttcaagcaggtagttatttgaaaaaaaaaaatcccttcttggtttctacctttaatgattgcaaaacatctgtgtaaagatacagacttttatgtatggagggaaggtggtgtcccagcaattaaattttatagctacataacaatacaaatgaaatcatccctcataaaaagagaacaaggaggaaggatacccaaaatgttctacaatatctcagtacatcttatgacaaaaagaagaacaaaaattataattgtaggaaatgtgagagaactatctaaaatatacaatagcagctttgtgggttgtgaaagagtcaaggttttatgtgtcctgcaacagaataaaaagtcaaatttttatgatagaaaattaaaactgaggttacgaacaccatcatgtatagacttatattactacagcatccataatatctgtttcctatgccaaaattataattttaatgcaatgtctttgccattaaatgccacaggatttggaattttattcattagtcatattaaaattatttaatcatcttttctccatccatatgcctctgtatccctgttagtttagatttagggatagaaagcaaatgatcagtaccagatttaggtaaataacacaagtttttttaaaagtaaaagaaaatggcttataacactggcagacagtcttgatcttcattaaatctcaagctcttacttattacaggagggtagaaataaagcggaccccctccctgtgtcctccagccctacccttcatccaaaggttagagtgggtgatataattggaactagtgggtcatagttactgtgacatgaatatgtcaattccttagtacatagtatctccaaacatatcctaatatcataatcagttggcaggtgactttctccacagctaactctaatatgctgcattctgcgtattgagccaactgaccccttactcttgtacctttattttatttttttttttatttattttttgagacagagtctcgctttgtcatccaggctgcagtgcagtggcacgatctcagctcactgcaacctccacctcccgggttcaagtgattcttctgcctcagcctctcgagtagctgggactacaggcgcgcaccaccacacccaactaatttttgtatttttagtagagatggagggttcgccatgtcggccaggctggtctcgaactcctgacctcatgatctgctcacctcagcctccgaaagtgcggggattacaggtgtgagccaccgcgcccggcctgtacatttatatttcattactgaagagagaaaacagcaggtgaagataatatagctatttctttaagggagtggtggacagggttgctttaaactgaatatagccattagcgtaaatttatgggtagcttcatgcaatgaaggctcatgaaatgatatcctcattcttgtctaatacataacttgaccttttacagcctttaacaatgatacccgtaagagccacaaagtggggatgttattaaagctagcctctgtgttcctctctctgatcatctcattctatgatcttcacccacacttctgactcaggtgtttttaatatttatccctcttcatatttctttgtattttctctgaacatgcatgtgggtgtaggaggctctctcgccatcatcatcactctcttcctctgtgtttctcacttttaggctaattttcatctatgaattgacacgtatattataggaatttatttttatatatttattaggaatcttctttttgttttttttttttttttgagacagagttttgctctgtcgcccaggctggagtgcaatggcacgatctccactcactgcaacctctgtctcctgggttcaagcgattctcctgcctcagcttcccgagtagctgggattacaggcatgcaccaccacgcctggctaatttttgtattttaagtagagacggggtttcaccacgttgatcaggctggtcttaaactcccgacctcaggtgatctgcccacctcggcctcccaaattgctgatattacaggcgtgagccaccgcacctggccatgaatctacttttctatttgcatatttgccactctttttctgccccagttgtttatgtaacacattctcttctgctctccttccctgaccccgttaatcccagtttcatctctttcatgtctttttattttgtgtcccctttcctcattcttcattgctctttgtatatgttatatgtgggtatttttttaactacccatttatttaaaaccaaaatatgctttatcattctttatttttgaacaccgagtcctagaaaggttatgtgacttatttgagaccatgtagctttctatttaaatataaaagtgattccaaaataaacagtaggggttttaaccttttggtgaagctcaagtgatttttatgtggataatatcctaatattaaaatggggatttattttcttttaaaaaaactatatgagtttttgctttggtttttgccctttttgagaactagatgctgtgttttaaaattactttctagaaccttctctgctgtggaacatttacagttgtgtaatatagcaaaacatgtttatgttgtttcagaattagttaaaatcctactatttttaatgtcaagtaattttacaggtggtgtacgttatgcattcctattagttttaataaatatgttgtcattttgttaaataagtttaaatttttcatcgcattttacatgtaaacagtaatttactatctacacataaaataccatttacaaataagatatactgtttatatgtaaatggtaaattactatttgaatttgttactgcccagacagtataaaatggtgcacataaagaaaaaagcattttggaaaacaattaagaaatttggctggaaagtgaattttagttaagtgcatcttattcactttaccgaggaaaaaggtaggtttacaaatacaacatatataacaaacctttaatatgggaataatttttgtaatattgataataatacaggtattattttcaaaaaatcaccaaataaaaattatgaaagtaaaaatacagtgcaactcctagcacaaactatcttccacaatatacagttggctgtatctaaatttccagaaatctggttcattttgtattaatctctaatcatgttgcttctaaatatgtatctgaggagtaaacatttcagatttattttcatttgtataaggtaaatgaatgtttagtctttttccagacgtatttgctatgtaatgacagtcattattagtcgtcagtataaatgtgaatagcaaaaaggagaaaattaaataaagctagagcttggctttccgactccttgctcaaaaatggacactttgtccaatcaatttcctatcacaagatgacgattaatagattgttctaatagttaccattcagtcctgcccttaacgtgatgttttttcaaccaaataatagaatcttcactggcattgttaccatattgactggtatttatggaaccccggaaaaaaaaatgctgtaaaatatatagtaggaagtataataatcattataggaaatcatttctctagctggaagtcttagcagggaccagatagttccactggagcttttatgtgctcatgattttctcccttgaagtgtatttgtaacacagttcacacagtttttaattttataaatctgtgtgctaaaacgctattatataagaaaacgggccgggtgtggtggctcacgcctgtaatcccagcactttgggaggcccaggcgggcagatcacaaggtcaggagatcgagaccatcccagccaacatggcaaaactccgtctctattaaaaatacaaaaattagctgagcgtggtggcatgtgtctgtaatcccagctatttgggaggctgaggcaggagaatcacttgaaccagggagtaggaggttgcagtgagccaagatcatgccgctatactccagcctggcgacagagcaagactctatctcaaaaaaaaaaaaaaaaaaaaaagggtgttcacctatttattgggcatatagtctgatagttcccagaaacccattatcttgaatgttttctttatgtaagttcctggaaatccattatttggatgttttctttatgtagttaataattacagcaaagctgtaattaaattatttattcaagagctatctattaaaggactactatgtgccacattctgttctaagcatatcataatcacttcccacccttcccttatttaaaggacatgcataattttatagggcttggcattataaatattcatatctctaatttatagttgctaaacagtttgaagctgagggttgggggaagggagtagtaatttaaagtttataacataagcatccttgactttgcctcctataatttcacactgacatgaggtttattactaggttgtgtgtcatgagtacatctcaatttgctctgactgttctggtttttgcctgttatcctatcataatttttaatagctccctctttcattgtcataagtattccactttagaagataaaatatatagagagggtcactctagttatgagaacaaacatcaggcttttagagctaggcttggtccagtgctcaataactattattatcatgattgcttttgttcttagtagcatcatcgtccttgtcatcatcatctaccttcctaatactttagttcagctgagaatttcggcctatccaagaaatctgattgccattattaccgaattaatcactctttaatgacaatagtatataagaatacgtgacatttaactttccaaattattgaaatgttacgctgtgtatggaaaattctttctaaccgtgttttttctctactctcaaatcgtaacaatcgtcaacacagaagaagacttttatgaccaaatttgtggaatttttttccccatacaccaaacagcaggcaccagctgggtgtctctaattcagtcctgacactatccacccagagatagtgtcagatcccatagattgagggctcagtaccgaggtctgcctcctctgcacccccctagcgcacgcgcgcgcacacacacacacacacacacacacacacaccagtctcaagtccaggcctctggaacttctgacccatgggcttcaagttggggttcccatgaccctctctttgggttcaactaacttgctggagcagctcacagaactcaggaaaacactcgctttcacctgtttatgataaaggatattgcaaaggacacagatgaagagatgcatagggtgaggtatggttggggtggagggacggaaaggggcatggagcttccatgccctccctgagtgcaccaccctctaggaatccccacctgttcagctacccggaagctcactggactctgtcctctttgttttttatggaagcttcatgacatcagcattccttccccaagggtatatggtgggaccctctaacaggaggtttttaagacctataatctgaaaggcgagggaacattaaagtgaaaggagagcaggagaaggtcagaggcctgcccctgagacccaacgcaaccaacattataacaaaaaactgtaacaagggctatgggtgttatgagccaggaacctggatagaaaccagtatgtactataataccatataggcaatgccaagaatatggatcagacactttacaaacaaggaaaaagtaaacaggagtgatgaggaggtaatttactgcaggcattaatgatgagattatgaattatggattccacttgctaccagctatgtgatcttatacctactctgtccatacctaagttataacatccataaaattcaaatactaaaagaagacacttccccaggttgtggtgaaaattcaatgaggtagtaaatgggaaatgtgtaacacagtatctggcatattgtaattgctcaaaaaatgttagattaaaaacagtaggagtaatactaaaatagaaaaatgcaaagagcaagcacaaaatcatctctgattctcacctccaaattctccaaaagtctcaccttcttaatcaaagttgtaaatatggctcttggggagaaagctgaactatgtgctactattatgaatgcaacaggtgaaggagaggagagttagaggcagcaagacaaccaaatggctctcgtggaaggcacagaggattttcagccactgctctcctattccgctgatattactttcattttctatgaccaactagcatttcagctaaaatgtgttggaaaatgatagatttttctcctcctattgcctaagaagcccaacaaagccagcattgttttcaaacaccagcattctcacttttaaagtatgaacataattcagaggacttttaattctgaacatcgtttttatcaatctattggcctgattgtaacccagaaatccaagcagaaagcaagtaaactttcacactgcttccccatcccttccccctacctttatttttgacatcagtttccctcattttggcaaagtaaaggaaaagcatttgtagaaggttacactgaagctagataattttctattaggaaacctcaccaaatacaagataatttgttcattccaatataataatgttttaaaaaatataacaaaaatccagcataaattgtgaagcactgatacttgtgtaacaactaatttccatagtgaaacttcattgttgccactatctacatactgaaaatgtatatcaagcatgtaaatgtgtcacttaagtatgctgtgccctagattttatttaaaagttaagctaattttcaactaaaaacaaattcgactattcttagcaatctctcctccccgttcatgatggatttaaaatgatgaagagtataaatgatgatgaaaagagaaaggaggagaaaaatttcataactctgcatcttcagtgtagcatttttaagtaactcctttattagcacaaaggtgtttgcctgaagcaatgacttctagaaaggagaagaaatgacataataaaaggggattttgctaatataaaatgttttttctttccttttgtttctgcaatgcttttacttacatagcaccaaccctgagactagagggagtttccttcctttctaataatttaataatcgtgaaatgatattaaatggaagttttcatatgccaactccttaaactgaggttaaataaggaacaaagattaaaggccatatttaagaccacatattgtaaattctaacccagtttcatttattatatcacctgcaaagccaatatgccatacaaaagtaaaataacagggtgatttttattaaagatcagaatcataccaaaaatgaacttttctgtcaaatctttatactcatacatcaagatgtgagtttatttatgtagctaaaataacttaatactaaatgctgactactatattcatgtcagctgacccctagtgcttcaaaccatagaaaagggataccaaatgctgggttggttgtgtattccatttttgccgtataccacctgccaaggcttataacagatctgtaatgggtttcttaccttttattgtgtagaaaatggattgttggattaggcctggggccagtgaaccatggaaccccaggtttgcaagaaagagtttatcaccctttgatgttatttctgtctcgtgtcagctgagaaggatgagctagattatctgaaagtaagctggatgccaaaatcagcattcccctcatttatccaccttatggttcggggcaagaccactgtatgggtaacaaaagggctgataagggcctgatggagaaatttggtttttctcccttttgattggcttgctgatattagaaccaattacaagacattgacgagagcatttcattgtttgttgctagagaaaatccatcaattttgttgtggaaatgaaagcatttgagctgaatgttgcacttataatttgtgaacattttcagttatcaccgggacaagtatagtccatctttggcatggttggccaagtgtggtgggaaaagagatggaccagcaaatgggccggaaaccaaagtcatcaaaagggtatttcaagaaaactctatttgttctgatggttacattctgcaggcaacctgtgactgatgactgatgcttatacctcaaatgcagtctaaaaatatttttttgtgaaagtgacacattctgactgtgatgtgggtgacatcaacagttttgaataggacagtacttcttggacttattgaaacttttataaaagaatgaacattctgaactcaattgcaatgtaaatgactatcatgaagattgcttctgttggtgctatgacttttgtgacaaattttagaccattgcagttatctcctagaggttgctttattgttttattttcatcagtgatgtgtattttatcagtgatgttagaatcactgagctgctggttaaggaagagaaaaaaattaatattcaggtgctatataggcccttattcattgagaacaaataaaggccaacacacaaaacaggaaaattaatagaaaagacactctatgggtaagatttcatatagtttgggagcagacaaaaactattttaattactaaaataattaagaaagatgttgaggctgggcacggtggctcacgcctgtaatcccagcactttgggaggccaaggagggcaggccacttgaggtcagagttcaagaccagcctggccaacattgtcaaaccctgtctctactaaaaatacaaaaattagctgggcgtggtggcacatgacttgaatcacagctacttgggaggctgaggcaggagaatcatttgaacccaggaggcggaggttgcagtgaaaggagatcacgccactgcattccagcctgggcaaccgagtgagactctgtctcaaacaaacaaaaaaaaaaagattaaaaaaaaagatgttgacattaacatgttcaagtctttatgctgaaactagaatgcagtatgattaaataatcatttctacttcgggtgaaggattagttttcttaaagatacccctttccagcttctcagttcgcgtgtggttaattcccaacgtggcctcaaatattctaatggtttgtgtaatgagtgccaccgttccaccttcttattctccatgcctcatctcagtcctggaaagatcactaaacttgcagttcataactcagtctagacccaggttcaacactcactaactcataactgtgggccacttatttaaatctcttagtgcctctagttcctcatttgtccaacagtgatgcattatgaagcatgtttgcccatctcccagcgtctagtgaggaactaaaaacacaatatatactatcatactttattacgaggagttaaattgtggttactattacaaagtaggttaccataaaattctaatagcagtggtaaggggtaaagatccacgtgccatcacgtagagcagaacttctcaaactttaatgtacggcaggtccttgaataatgttgtttcattgagcatcactgtgttataatattggcaagggaaaaaactgtatctcagctaggggggcactgtctatgtggggttttcttttgtctctgtgggttttcttctagtactctggtttcctcacatgtcccaaactgtgcacgttaggggaattggtgtgtctacattgtccccatgtgagtgtttatgtgtctacgactgtgccctgcgatagaatggcatccctgccagtgttggctcctgtctggtgctctgagttgccaggatgggctctggcctcccaagtccctgaactggaatacgtggcttggaaaatgaatgactgaattaatataaattactgtgaaataaaaattcatatagtattcaataatcataaagatgcgtgacaataattgatgctctacagaagtgctcagtgagctgccatattgattattgtttgtttttgaactttgtggtgagagaaggcaatcctggcagtttatgctttgcaaacatttattccttgaatgaaccaccgccactgcaaacactgtcactcactgattcaccaaaaactgggtaaataattttcctcctggtttttattaatctttctaaagtggatgtatatctcacatttatttctgagtttaatattagaagtgcttggggtctttatttagatgttggatcatgttttgtgaacacaggtatgcagtaggaacttaattcttgtttatcaattagcctatggtaagattggtttcattatatgtcattttgcctaagtcacagtttcccagaatctatcaacaacattaattgatgacttactgaaacaggaatcaccttgagatcttgttaaaatcaggttactgattcaatggctcttgcataggacctgaggttctgcatttccccccctaatttcaagatgctggttccctggtccccttgctctacttcttaaatggtagggaggtagagagtggctatcaagagtctgtgtaggagttgaccaccaatcccattcaatggaatgcatacagtgtgttctgagatactggaaaggcctttgcaaaaagattttgtctcttgatatttatgaagcacattcatccgaccacagaagatacatatcaactttgacagaaaatatgaacacattcaaatgatttatacctttgaaacatagatcgttgtggggttcataacccaagtataactttcccacagattcactcaatttccttcctctttctgtgcaatatattgtatattgcaagaagctcacctccactcaccttattcctcaggctttcttctcaactatcttctgtatagatttaaccagtgggaggcgttggcaggagattggagagcaggagaaggggagatttcagggtatttctttccctctttcactgctttgggcaacagctgatacagagtaagtggccaaaaaatactagctattattaggtcttctaataatgatcttctaaaatcactttttcagtggttacccccattgatttgccatgaatgtctcttcagacatctttgcaaagaattgagcctgactttagatactcattcaaaatcaaaatcagtaattttaggattgaggactctggtattatttaagaactcttaactgtaccaagcctcactcccatttctggctttcccctatatatcagttaagtaataactccaatagtgtaaaatttgcaatagtgttatgtaacaaatcaccctaaaacttattgacttaaaattatcaccatttataattgcacacagtctgtggggtcccgtgagctgttgtgttgttctggctcactcatacattttcagtcagctaatgggtgggctaggggctggcttatctagcataagcgcagctaggatgattcacctctgctccatatggtctctcatccttcggcaagcgctcctgggcttattctcatgcaagaaacaggattctaatagagaaggaaacaagacttcttgaagcttaagcttggagctggctcactcatttctaacacatttttttaaccaaagcaaatcacaaggcaggcccatattcagggattagggaaataggttacaactcctgatggtagcaactttaaaagtcacattgcaaaaagatgtgcatacagagaggtcaccagtgcaatctaccacaccttgcaatctattaagtttctcaccccctcacaagtaaggtattcagttaagatgcattcctatgtattcagatttctaatcaactaatcctgattctcacgtaatattgacacagtatcaatattctcaaaagccaatagtctagagggtcacaaagatcctcaaagatactttatgcaaaatcctaggagtatagaaacagtaccttggtttatgtatacattcagtatttattaagtgtttccaatatggtataatgttaaggaatgaggatagagttatgaacagacagacacttgtctttatggatcttacatttggagggggacaaacattaaaatggattatataattacaaatgcagccgttctcattgtcttttcagatttctcagggtgtagactgagctactataataaaaataccccaagtttccatgtttcaaacaatatagatatgtgtatctttcccacataaagtccagcctaggtacgtagtctctgctctaaaaaggaacacaggctagcaaggcagctatactattctcaatataatactgcatttcaaaatctccatgctggtcccacaaatatccatgcactctctttcttatcatcaagagaacacacagtgccttcccaagagagaccagtcaaagtctcattcacttactgcatccagctaaaagtccattgtctgtggatgatgcactgtcttctccatcagatcaagatatggttcctcatggtccagtgacctataaagtgaaagttatgctatctgctcctaccacaaccaattctctctttttaaaatttttttaaatttttgtgggtacatagtaggtgtatgtatttatggggtacttgagatgttttgacacaagcatgcaatgcataataatcacatcatggagaacgggggatccaccccctccagcattaatcttttgtgttacaaacaatccaattatactcttatttatttttaaatgtgcagttacattattttgacgatagtcaccctgttgtgctatcgaatactgggtattattcatttttcctaagtattttttgtacccattaaccatcccgctgccccctccccgactcctccactatccttcccagcctctggcaactacctttctactctctatgtccatgagttccattgttttgatttttagattctgcaaataagtgagaacatgagatgtttttctgtgcttggcttattttgcttaagataatgacctccatttccatccatgttgttgcaaatgacaggatctcaatcttttctatggcagaatagtactccatttgtgtatatgtaccacgttttctttatccattcatttgttgatggacacttaaattttttccaaaccttggctattgtgaatagagctgcaataaacatgggaatgcagatatttcgtcaatatactgatttcctttctttgggtatatacccagcagtgggattgctggatcatagggaagctctatttttacttttttgaggaacctccaaactgttctctatagtggttgtactaatttatattcctaccaacagtgtgcaaggttttccttttctccacattctctccagcccaggcacaaagacagcagtaagtgctggacgaccacctatgcaagacctagactataaatccagtacttctctccctctccacacccccatacccaccactccattctgagttttcaaatgtaagctaagctaaatgattcaataaagctttttgaagtcaaggatgagaaaaatcgttgctttttatgtaatcccaccatcaaagtaataattgcttagttcaaattgtggtgatgcaaacaaggaaagcaagagagcataaaacgggtggatctgacgcagtccagaagtggaggcaatggttgtttttagataattattagagaagatactgtgatttggtttgaaggcaaagctcactgaagttctctagttctagatacacctatcgaaaaattcttacccaaataaatgtctcagtgataagagcagcctttccccaaatgcctaagtgtttttgttttgtttttgttttgttttgttttgttttgttttgtttttgtttttgttttttttcaaaatcttcctctggaatggatgctgaccttgtcattgacttattcttcaccacaactcagtcatattaatcttgaaagagacagagaggccactatctctgctaataatttacataattgtttttctacaatttggtgctaattaaaatgtgaaaggggtagtgatgatataggtaaatgtaataaggtcattctttgttcctgagagcaaagataatgtcaccagaaaggattgtctgtatattcacataagagcaggaaacaggaagagagacacagtaaggtaaaatagcatactagtatatcacgtagtctggtatagccaatgtagaatatttatttcaaaaaacaaataaagataaagttctgcttcactttgagaagctgttttttttaatcctgtatagttagttcgacatgttactactctgcctggttcaaattttgatttcactctgttccagttatatatgctatgcaacaaaccactctaaaagttactggcttaaaataagatagttttacgatttctcataattctgagagttgactatgatattcatctgcttcacctgatatcaaccaagacactgggaaagctggaaagtccaaaatggcctcactcacatgactggcagttggtgctgcctaccagctgagaactcagctaaagctattggccatgagcctcagtttgtttccattgtcttctccatgtgtctcctttggcttccccacagcttggtggttgagttctgtgaagaagccttccaaaagaacaagcaccaatcttcaaagacttatcaagcttctgtttgtatcacacttgctactatcccattggccaaagccaggcatatggccaagttcagaatcaaaatgagaagggactacacaaaggcatgaatccaagaggcgtgattaattgtggggctgccaaataatcgccttccacaaattccttactagctgtgtcatctctctgtggtctcagttttctcacctggaaacaggaacaaaaatggccctacaaaaatggactgagatatattaggttggtgcaaaagaaattgcagtttgggaccgtgaattttaaatcattataactaggctcaagcacatctttattaatcaaagtaggaaccgttacagtcaacacatttttgccaagaagaaataagtgtgtttattcctgtagcataaaaattcatgctttgggattcaatgaactcttggaaagcattttcttcatcctgctagttgtggaagcattttccctgtaaaaagttgtcgagatgcttgaagaagtggtagtcagttggttgagaggtcaggtaaatatggcagatgaggcaaaacttcctagcccgattcattcaacttgtgaagcgttggttgtgcgacgtgcggtcgggcgttgtcacagagaagaattgggccctttctgttgaccactgctggctgcaggcatggcagtttttgatgtatctcatcaatttactgagcatacttctcaaatgtagtggtttcgccgggattcagaaagcggtagtgggtcaggccagcaggagaccagtgaacagtgaccatgacttttggtacaagtttggctttggaaagtgctttggagcttcttctcagtccagccactgaactgggcatcgccagttgtcgtttaaaatccactttttgttgcacgttacaatccgatcaagaaatggtttgttgttgttggcgtagaataagagaagatggcacttcaaaatgacgatacttttattttcgctctgcttatgaggcacccacttatcgagttttttcgcctttccaatttgcttcaaatgctgaacaactgtgaaatggttgacattgagttcctcggcaacttctcgtgtagttgtaagaggatcagcttcgatgattggtctcaatcggtcattgtcaacttctgatggccagccactacgcccctcatcttcaagactcttatctcctttgaaaaacttcttgaaccaccactgcactgtgcgtttgttagcagtaacttggccaaatgtgtttttgacattgcgagttgcctctgcttctttacaatccattttgaactcgaataagaaaaacgctcgaatttgctttttgtctaacatcatttccatagtctaaaataaacataaaataaacagcaagtaataagtcattagcaaaaaaaaaaaaagtgagaaatgctcattaaaatgatgtataacataatcacatttatttaagaatgtatttcaatatcaaatggcaagttccatgaatgtgaaaacaacacttacttttgtagtcacctaatgacacatttaagaagctgaaacctgagctcagcacatggtaagacatcagtaagtattagttatcataatttttttagtaattttcctacagagctataaataaaatgaaatactttccaaacagtgataaaactataaagcagcaatacattataagcttctatcctaatctgccttcccctcagggccttaaaatgtgtcatttctgtaaatgttacctctgacatgaaagcaccaacacactgttcagcaattacaagttgattgtgacaagagcctcactctccctatttctttttctcttcctgtcttgctttcccttttccccatcctttcactcactttgataaggcaaactgccatgtagtcacaaaatcctagacaaacaagtctgtacctatgtgggcgatgctgtggatttagtaagggaaacagttccttgataaatttctcctttagccctgggtttccaacccctgtgtcattcagctatagaaatcttctgatattttctcccactggtcattttcactcaggctgccatcaaaatgagactacccaatgttctttccatttgttctgttttcttcctcgcctctgattccctgcctggtccacttagaaagtctaccttttttccttctctcttaataccaccaatctctaaatctgacttctcctttctaatcccatagagcctgccttgtcatctccaaacaagatccatcttggcctcctgttatcctcagcccacagcagtatttcacttacaacgttcgttagtttctacctcagatgtgtcaggcatttagtttgtaccaatattttatttctttttatatctacaccaagcctgcactagacggtccaaggagaaatttaactgattcctgttttgaagtcctccccactccttgggagagttaaagattcctcagtgtgttaggtaatgatagttaatatttattaataacttactgtgtatcgactgtattctaagtgctttgcactgttagaaggagaataacctaagactgtgccaaacagcagtctagaacaaagctgaattccttgcttgcctggcaagggagaatgtggtacatactaaaggattaatacatgttcactattaaattgattgattgtggtggtggtgacagtggtgatgacttttcaagtgtgggtaaagtaattttttccaacaaatccacatccacatatttaagaaaagagagacatttcattctatctttttgtgtgcctttgagaggacacccctggcacccaactcccaggcaaatgccaccatctgtgtgattttccttcatttgccaacgaaggcacagcaggtactactaggttaacctttgctttcgcaagtcttctctcaaaatagtaaacacttcagctgttggaaagctctaatctcaaactgcaaatttaaaaatctctctctggagttcaaaaaatagaaagaaaaaataaaaatctctctcttctggaacataatgtttgaactgttacatattattcacactatttcacattatgggattatgaaatatggttttaggtgttagaaaaacgaaagaaaactattatttgttaacactaaccgagagatttttatgatattcaagtaaaatgatagaatgaattattttaaaaatgcatgaatcttcaccttctgtgaagtgtcatggaggattagttctaactaatatgcctgtaagtaactgacttaatgcgtctattggttctcttaatgctgtaagtgacagaaaactggtctcaaactgatttaaacaataaatatgatcaaggttccggttttttgtttcttgttttttttttttttttttcacatttctctgggttctatttttctgtgttgacctagcagcttcacctgacttccctcttggtgacaaaaatggcctgaagccgtttcagaacccacatctgcaaacttacttttgatgaaaatcatctctttagggaccttctttcccaaagcatccaggaaagactgctctgaaactgactggcctgaattaggtcacatgctcattcctgtactaaatcacacctcacttctacagctaaaagtcattaaatctcaaccaaactctacagctgcaccacaacaaaggtagagaagtaggtgcaaagttcctcaaaggaacgtaagggtgaaagatgattgactgataaacagacaggtagacagaatagatagatgaattaggaaaagataaccaaccaatatctgtcacattgctttgacttgattttttagtcaattaatgaaactgaatggtaattttgacattacaacaatactttccaaatgtaggcaggttgtggagatcatttaaggaaaaaatgtatgaggtgttgtagcagatactgtcggtgccccaccgatatccctttagcacttaccatttttatacgtgcttcttaatttccaacttcctgtacttgcatctctttgcttggggctatctctgctcattcttgggagagagcagaaatgtagcagttatgcccctgtagagcagcagttgatagatcaataccctgtcccccttgcccttcagatctaataactccaagcttaattccctacatctttcatataagtatatatataagtatatatatatacttgaagttctagggtacatgtgcacaacgtgcaggtttgttacataggtatgcgtgggccatgctggtgtgctgcacccattaactcgtcatttacattagctatttctcctaatgctatccctccccagccccccaccccacgacaggccccagtgtgtgatgttgcctgcgctgtgtccaagtgttttcattgttcaattcccacctatgagtgaggacatgcggtgtttggttttctgtccttgtgatagtttgctcagaatgttggtttccagcttcatccatgtcccttcaaaggacataaacaactcatccttttttatggttgcgtagtattccatggtgtgtatgtgccacattttcttaatccagtctatcactgatggacatttgggttggttccaagtctttgctattgtgaatagtgccgcaataaacatacgtgtgcatgtgtctttatagcagcatgatttataatcctttgggtatatacccagtaatgggatggccgggtcaaatggtatttctagttctagatccttgaggaatcgccacactgtcttccacaatggttgaactagtttacagtcccaccaacggtgtgaaagtgttcctgtttctccacatcctctccagcatctgttgtttcctgactttttaatgatcaccattctaactggagtgagatggtatctcattgtggttttgatttgcatttctctgatgaccagtgatgatgagcattttttcatgtgtctgttagctgcataaatgtcttcttttgagaagtgtctgttcctatccttggccgacttttcgatgaggttggtttttttcttgtaaatttgtttaagttctttgtagattctcgatattagccctttgtcagatgggtagattgcaaaaattttctcccattatgtaggttgcttgttcactctgatggtactttcttttgctgtgcagaagctctttcgtttaattagatcccatttgtcaattttggcttctgttgccattgcttttggtgttttcatcatgaagtccttgcccatgcctttgtcctgaatggtattgcctaggttttcttctagggttttatggttttaggtctaacatgtaagtctttaatccatcttgaattaattaatttttgtataaggtgtaaggaagggatccagtttcagctttctacatatggctagccagttttcccagcaccatttattaaatagggaatcctttccccatttcttgttttttgtcaggtttgtcaaagatcagatagttgtagatgtgtggtattatttctgaggcttccgttctgttccattggtctatatctctgttttggtaccagtaccatgctgttttggttacagtagccttagtttcctacatcttcttttagggataacagggagtattaagattcagttgttcacattgatgacttgcatgataatataccctttattggctatcttccctatttcacttcttctcaccctgttgatgtgtcctggaatcacatcccaaaactacttgagctcaaatttttatttctgggtttgctactgggagacccaaatcaagacagttggcttcagtactcaggtacttacaaggagatcatggatatcaattgaatcagaattccatgtcatagcttttcaaatttatatcacaataagttgaaaagatgttgattcttccttccacagtattttctgtttctgtgtgtcttacattctggtgtctcaaaacatggctgcaaccagggaaggaattgaaatttggagtaaatgtcctattttagtaggtctacatttaagacatggacctgaaattgagatcataaacaaaagtagatgtgagcataaagtagaaggtgaggttggagggggaaattgtttggatttactgtaaccaatggagctgcttagtctagtcaaggaatttcaatcatttctgtggagactagatgacttatgttatacaaggatatctctggaaaattcactgtacagttttactaaatctggctgataatatgttcactcaatgttatgatgtcaataatagaatggatattgcctttaaagacaattttaaagtaaatatctcacatattcctactcatttatcaagggctgtgtcattcatggcaatataagataattcttttcactttcaaaatcttccagatgcagaaactttccaatatttgctgtagatgaaagtgtacaatttcacaattcaatgggacaaaaagaattaggaaaaatatgtttcagagagtttatttggtatcatctacaagacctggtatgagacctggttggtgttgtatggaatgaaatatatcagtctgttctcacactgctaataaagacatacctgagactgggtaatttataaaggaaagtgatttaattgactcacagttcagcatggctggggaggcctcaggaaacttacaatcatggcagatggggaagcaaacaccttcttcttcacatggcagcaggaaggaggagaatgagcaaaagagggaaaagccccttataaaaccatcagacctcgtgagaactcactgtcacaagaacagcatgagggtaaccgcccgccgtgattcaattatctccacctgatccctcccaggacgtgtgggggttatgggaacaacagcttaagatgagcttttggtacagacacagccaaaccatatcatagagtttcgaatctgaaaaacaaaagaagctaatttagtttcagaaagctgagatttcatgaaccatttaaaaattcactttataatttttcatgcattttgaagcctttatcctttaaatggaaatggaatagaactattattcgtcatttctaaactgtgcattcatcaacaattttcagaagttaattccaacatgtcttcatcaactctatattacatgttagtacactacatctctattttcatgctataattttttactttttcctcacactttcatctcaccctctcaagatgtgttaatcccctttgctcttttccccatctcgtctctgttgcctttctccccccttcctttttttttaatttctgttctcttttacctgaaatctccctcttcatcttttgctaccaattatgttcttaattggttgaagtgagcaaggtaggaaattctccattttgattccattctctcacatggtttatctttaatatgttttaataaacagtttaacataaatcttacttccaatttaacatgtaaaatttagaaaattggtgaaaaatatgcctgctttttcacccccaaagaaccaagtttaaaaagttttgtgactttgaggcatccttttccctaaaagcaagcttaacagattcttagcattcgtctctgtgtgaaattgtggaaactttaaaaaaactatttgaagtaccaacaactcaaagataaattgtctgttttaaatgcaaggtgctaaaataaaactagaagattgacaatattattcatctttatcactgttctacttaaaatttgaaaattaatgttagaaatgtgagagggtgcatgaaaccttaatggttttatcatttcatctgagtatatatttgatttcttctttctgacattgaaactttaaaattcgccactatttttcagtaactcgttaaaatatggtccgttcttatatttgcaatactcctatactgaaaaccctacaacttcaccattatttaatttttatgttactatatttgtttcttaaaaagattataatattatgtattagttgtctattgctgcataacaattactacaaagataggggcttaaaactgtatctttagagtatcaggatacatatgggtcagaagtctaggcatagattatccatattctttgcttcggggtctctcacaaaggctgcacactaggtgttggccagggctagggtctcatttgaaagcttgccttggaaggacctgcttccaaactcacctgttgttggtaagtttcagttccatgtgggttattggactgtagtcttccttttcttgttggctgatggccacgtttagttccttcggtctctaacatggcaatttgcctcatcaaaatcagtgagagaaagtgggggaggggggaaagagacagagaaagagtgaaattgctagcaagacaaaagtcccaatcttatgtagcctaattggagaagtgatatccttttgtctttgacatattctgcttgtcagaagcaagtcaaaagtcttgaccactctcaaggggaggaaattattaaaggactcaaatactaggagacagagatcactgagtgccattttagagtcttcccaccacggattatttcccttcacctgctggcatttgaaaatgcagctaatactctgggattctccaaacctaatttttttgtataattagagaagtatttgtcataatctgttaagtgtagtaatatattaagaaattgaatttattccttcatatttcaaaaagtacatggggttgggggacagctatgttgtcataaactttaatacatacatgattggaatggattatgaaatatttttctctaagagatagtataaggctgcaaccactgaggctcccaaatacagatgattcatatgtatttagttttaatgcaaagcttctcatgctgatttaaactctcatattttcatatatggtgttttattttttatataatgaatgtctataaaattcctattattttttcaaaagtattgtggcaaatatttcctagtaaaatctaaagatatctttgacgtaatttttatgctctcatttatgttaagaactcaatattgaagtaatgttctttcttatttcctagtaactaaaatccttactatattcatgaagagctgtgcctctattaaaaagcttttattgcaaacagaaatgtcaaaatacagcaaaggtagagctatgtatgattcttcatctgtaatgtaattttaagtatacattttattgcataagcagagatttatacccacatttgctttcagtattcacagaagaattttcatatgtatttcttaaaataacaaaatggctgctttggtgtggggatagtatggtacagcatttattgtgaaaatgattcttatcttccatctttttcaaatggtgagttcagtatgtttaacattgctggttttataatattgcgaatatttttgagaggaagaaacaataagagactgataagaataattcatatttgctcaaagtttaatcagttttttatttgaacaaaaacttggacgaaatgtccaactttcctttgagatcagtgctctccaatgtggtaacaacagcctaccatatgagcatttgaaatatggctagtccccactgaaatgtgctgtaagtataaaacactcaccaaattacaaaacctaagtatgaaaaaaataaaatatctcattggtactttttatattgagtacaggttgaagtgacaacaatttggctatttaagttaaagaaaatataacattaaaattaatttgacctgttttttacttttgtaatgtgtagaaaattttaaattacatgtatcgctctcattataattttattggatgtcattgttctagataaacaatggcaatgttgagaggtgtcataatagggacaattgtctctgtgaagaagaaattatatgaaccctacaacatgtattagccgcagagttgcttagaattgacttactctgtcttgttgaaaataggttttcccttaaaatctctgcctgatgtagccaaccacgattcaatgagcaaacaaaaatcttaaaggggaaaaaatcattttttgagtctattttacacacccagtatcaaaaagaaaaatataaatccacaactaggattatacgggatgtaattcttggatttcttttggtcttataatgctttatacctaggagatgttcaacaaattattattgaatgattgtagtttaaccgtcagttacattttgcagcaatacatttattagtagcaaaatctgagtgtttactaattttcatcacctaatcagcaaattagtactgctcttatatcgctttgcctacgctctactcactggttcaatcagctaattttttcagaattttatggtttataaaccactatatgttgcacagtatttcctatacattagctcatttgagtcacagaagttataggaggtggatcttgtctttctttgttcagaaagagaaatccaggttcagcgaggttaactggccttgtttaagatcagcacgttgctaggtgacagaaggtgttcacttctcactgaactttgcatatcaaaagagatttaaagaattcactttggagagcgggagttatggggtgaatattttatcatgttgtccgtcttaataatcaccaatttgatactaaggctgctagtcatctctaacgaagagaagttactttgaagttggttgattgattgttgttgattgacagaagtattagttttcagaatgaactaattcattaaagaaataaaacattgggtttgttcattccataaataattgaacatttattatgtgtatgataccagcctaagcagatacctaaaaggaatggagattactatagttaataacaatgcattgtattcttgaaaattgccaagagattacattttaaacattctcaccataaaaaaatgataagaatgtggggtaatgcatatgttaattatctcaatttagccattccacagtgtatgcatatttcaaaacatgttgtacacaataaatacatacaatgttatgtgttaatttaaaaataaatacattagaaacggtaaaagtcactaggatcatggaaataaaaatgtttacatttatgtaaatattagtaatataatagagggcatatccaaaatatagtgtcatattaataagatgttgtatgattattatagactacaaaataataaaggaatagacagaatgtttctaaataaagaatagaaattacagtgaagcggaagagagagtaaccctaaacccttcataatcctccctttgcctcgtagtatagcttggaaagtaattatgtggaaagttgagattgcaacaaaggacggtagtacaggagttgcccaaggacagacaattattttctcaaataaactatagcagaagcaaaatggccttggaccacaaaagaaggccctcatgtagacattgttctattctgaagtagaatttgcagtactcaagagaagaggaaagattattataggtggagagactgtaaacaaaatattatggtaggattcctcctgaatagagcaaggtgattgtgtttgacattgaaaaggtatgtttgggcaagagtttgaaaacctttagccaccatgctaagagatcttaaatctttatctctgagtaagggcggtggttgtggttaatgatccttgagcacaactctgtcccattaaagacagtagattcaactgcttctagcattagtccatatcagggagtaaagtgatccgatacattattttcccccagtaaatggttcataaaggaaggccttggctctgccttgtatgtctacatgggagaatataccagaatgtctagaggagcatgggtagcgtaacctttccccatatgcacatacaacaaatactgataatccactcacaggggagggactcatttttaagaattaagttttattttagaagactcagtctgatggcaatgcaggggttgaattacagcaggtagagactggaggtctacaaactggtttgagatatatattttttccggtggcccagataataaggacttgaacagacttcttgctctgggaatgtaaaaggccaggctggatgtaagaggttaggaagttccaaactgtcccacattttcctttcttctgagccctccaaactgtaccagactctgcatgttacgcacttccaaagtcgcttccacattttcgggtgtcttttcagcagtgccccactctactggtaccaaattactgtattagtccattttcacactgcggataaagacatacccgagactgggcaatttacaaaagaaagaggtttaatggacttacggttccacttggctggggagacctcacaactatggcaccaggcaaggaggaacgagtcacatcttacgtggatgggcagcagtcaaagagagagcttttggagggaaactccgcttttcaaaaccatcagatctcatgagacttattcacaatcactagaacagcacaggaaagacctgcccccatgattaaattacctcccactgggtccctcccataacacatgggaattcaacatgagatttgggtggagacacagccaaaccgtatcagtgatgcaaaataaaagaagactgtggagtaaattacacatggagaaaaggaagaggaactaggaagtatagatactgtgagaattaactctctgttctacaaaagaagaaatgggcttaaagtggttccccccaaaactaaaatccaaaggcacataagtcataatgcacactgttacaccgagtccttccagctcttaacttacttgttttactgcactacacttgacttgagttttagacttagtaaatctgaggtaaatgcagattgagaatgagaacaaaatgttaaaaagagaagcagtctcattttcttactactaataggcattgcagtttgtgtgggctctagcagggatgtttgtaccactgggatctaagcatctatttctatattataaatagaaaaattaggttgagctatcgcgactccattacaaacttatggaattagattctctggtatggagcttggatatacatattaaaacaaaataaaacaaaaactcctacccaattgattctgctgtgtgctctagttaagactgttatggttaagaaaataaataatcgctgtatggaatgtatatcgtcctattttaaattaataaaaaaaattttgcaggccttcccaccttccaactcctagagacaacaaatccagatttgaaaatcagtcatattaaatagttgtatcgatatttaccctttgtttctacgttattattttcttcaattttcacacgtatttgttcatcagttggttatgatggacttcactttttttcagtcttacgaatgagatttctccctccaaaaatcaataggcacctgctgattttatttattccaacatgaagttgcagaaaatgaatatggccaaaaatggttaaaaaaaaaaaagcctgttcttcaaaagactagatcgtcagttgaagcagaaaattatattcagtgcactggatttatgcattgttttagccttctccaaccaatttagaaatgcattttcttataaaattgagattattacaaatcctgtgctaagcagctgaaataatgtgcctatgccaaggtcatatcttaaaagtttggaggagcacactgcaattgaatataagtttataaatgtattccacatacttttctgatatattttaataatttaatttttacattttacctatattgtcttcattttcactttacctttggtggtgtttcatacatattcattgtttggaagaaattaagcagacagtattctaaagtcaatactgagtctgctaatgaaaatggttaagttaattaactaaatggcaaccttcactgaacttattcaaagctatttcccctcatgatgtgttttcctgaagaaatgatgcataaaaactaaacccctgttattcgctattcttctgtatcagcctctaaattgtcactttacatgttacaacctgttgcatgatgattaattatgacaatttaatggcatgtaaagggtaaaaccctaaaggattactcaaaccatcattccttaagaaaagaaattgtaatgcctaggttatcttctagggtttttatggttttaggtctaacgtttaagtctttaatccatcttgaattgatttttgtataaggtgtaaggaagggatccagtttcagctttctacgtatggctagccaattttcccagcaccgtttattaaatagggaatcctttccccattgcttgtttttctcaggtttgtcaaagatcagatagttgtagatatgcggcgttacttctgagggctctgttctgttccattgatctatatctctgttttggtaccagtaccatgctgttttggttactgtagccttgtagtatagtttgaagtcaggtagtgtgatgcctccagctttgttcttttggctcaggattgacttggcgatgcgggctcttttttggttccatatgaactttaaagtagttttttccaattctgtgaagaaaggcattggtagcttgatggggatggcattgaatctgtaaattaccttgggcagtatgaccattttcacgatattgattcttcctacccatgagcatggaatgttcttccatttgtttgtatcctcttttatttccttgagcagtggtttgtagttctccttgaagaggtccttcacatcccttgtaagttggattcctaggcattttattctcttgaggcattaccattcaggacataggcatgggcaaggacttcatgtctaaaacaccaaaaccaatggcaacaaaagccaaaattgacaaatgggatctaattaaactaaggagcttctgcacagcaaaagaaactaccatcagagtgaacaggcaacctacaaaatgggagaaaattttcgcaacctactcatctgataaagggctaatatccagaatctacaatgaactccaacaaatttacaagaaaaaaacaaacaaccccatcaaaaagtgggcgaaggacatgaacagacacttctcaaaagaagacatttatgcagccaaaaaacacatgaaaaaatgctcaccatcactggccatcagagaaatgcaaatcaaaaccacaatgagataccatctcacaccagttagaatggcaatcattaaaaagtcaggaaacaacaggtgctggagaggatgtggagaaataggaacacttttacactgttggtgggactgtaaactagttcaaccattgtggaagtcggtgtggcgattcctcagggatctagaactagaaataccatttgacccagccatcccattactgggtatatacccaaaggactataaatcatgctgctataaagacacatgcacacgtatgtttattgcggcgctattcacaatagcaaagacttggaaccaacccaaatgtccaacaatgatagactggattaagaaaatgtggcacatatacaccatgcaatactatgcagccataaaaaaggatgagttcatgtcctttgtaggcacatgggtgaaattggaaatcatcgttctcagtaaactgtcgcaagaacaaaaaaccaaacaccgcatgttctcactcataggtgggaattgaacaatgagaacacatggacacaggaaggggaacatcacactctggggactgttgtggggtgggggaaggggggagggatagcattgggagatatacccaatgctagatgacaagttagtgggtgcagcgcgccagcatggcacatgtatacatatgtaactaacctgcacaatgtgcacatgtaccctaaaacttaaagtacaataataaaagaaaaaaaaaagaaaaaagcaaagaaattgtaaaatgttgttctatcagaaactcggctaattatttttaaattttagatcaaaaactcaactagttttaatgtactacttataagtcagataaaatcattttttatttttgttttctttttgtttttacatctgttagaaacgatggggtcttcaaagtaaaagaagagatttgcaatgcctataccaaattagttattttaggatactgaatgaaatggttttctatactcaataaaggtaaaagaataagcagaggtagatctggttttctgaaacttgaagcacattctaatttggcagttttctttaagtcaaagaatataacaggacaaatataaaattaggtatgaacatgattatagaaagaaaggaaatcataacaaattatacgtttttaaaaagatgacagataaccacatacatcacaaaaattgaaaaaaataagcagaatgttttcttaataatgaaccatctctgcaatactagaatatacagtgtctgaaataattttttctatctttctggatgcatcctctttcagcacctcttcatgtgagagcatcagaaaataatttactctttcccccagcattgttgattaaaatttgacttctatcattgatagtttagaaaagtttattttacattttcaacttattattggtgatgtcacataaattattacaatttattgtccaatttaggaagaccctgccaagtttctttcacatatgaactgtaaaatttaaaagatcattcaagttatcttgtacaataactaatacatatttttcttttagtcatactaaaccctgatgctaaggatcacccaaactttttcagggaaagaagtagcttgcaaataaatcaaggaccatttatccttactttttggaagaaatggaaaaggataaagtgttagtttaaatacactcaagaacagaatgtaagacaagaaattggaagcagagaagttcatcctcaaatgtaagagtgaaagaatagggttaatgaaacaggaaaggggaaatccaagaaaaattatgccgcgctttagagaatctcctaagcacagagatattggcaatgtgcagatgaaatagctgtcacaggtcagccatgtcagaggtgattccagccactaagtatctactgcagattagatatttggaaagcagaatgagctctgttcatgccattactggggcttgacttcttaatggtttcaagtccccctttgactctaatccttctaaagtcaactttgtataaactcttttcaaaagtgtttatccctgtagaataagttcaaaactccatgtcatggcacacaaaactcttcaaatcatattcagctggtattgttttcttccacattccagtcataactaggatcccaagaattagcaaataaaaatatgaaacatccagaattctaagcataactatgtcccaaatactacaacaaaaaatactgaaaagtatcgattgcttatacaaaatgtaaatggtatcctgtattttataaggcaaccctagtcataagatctctttcttcttcctcacacactgtcaagcttgagccaacagagtaccttttaatgggctgcgcagaatagctttcgatagtttacccattaattaacagaaaattcaaatgagatatcctctgtgaaatcatccttctctcctgcctcctgtctctccattctttctccaggagacagaggccctccagactccatgactttgtagtgtattgtgtctgtctttattagagtattcatcacttggtaattgaattctgtgtttaaatacattttttttcttccagaataagtgttcatagaagggagggatgatttacctagcatactgcctggcatataaaaggccctaaataatttttcttttaaccagtaaccaactaaccaattcaacagttttttaaatgagtgaaaccactttttaaatttttttttaaattcatgcttcacctgtaaaaatatatagatgaattgcaatctggaactctgagtaatttatataaaagtgatgaaaaagaccatggcttcagatttgttgttttaattccagcttcagttcatacaaacattacaaagtcgcagtatctactgtgtaaaaagtttcatcccaatgaagaaattaaaatgtctgtctaatagagatgctctaatggacagcgatgtgtagacttcagaagaatctcctcacacagccttggaggcataagttgggaacagagcaagttctgtgtttgcctttcaaaggaatgttcctttccctttcattgacaaatattataaagatgccccaaaacttctgtgagtttcccccgggacgtaaggtcctctgcattttcctaacttgtttctcaaagcggtggttcccaaggcctgagaatagctgtgtctcagctctctcctggaaaccagagcctaaaatgttgccacatcatcgggaatgtagctgcatacttagccagagccaagagatgagccccactcgcaaagcccatgggctggacaaaattgttagccatttggtgtaggtcattgcactaggtccattacacaggttatctggcaggagtcccggctttggaggaaagacgtttaaatcctgtaaataaatggctggaacaccatggcagttgattgtgttaagccctcatccaaaattgctttgttaggttctattctattgctcattatcttgctgtgaagaaaattaagcttacatctgcttagggtgacagggtatcctgttgtcacaggattttccacattttaggcctatgtcacaagctcccaataaaccctcagagaagatcttttgtgttcacaggcatccaggtgtcaggcagacacagtctttgtcttcttgaagctcagtgacacgttcagggctgtgtatactcctccattccctgccagagacaaaatgtttgtggaacagtcaagctagaagggacctcagaattaatctgatcaaatgtctgcatttttcagttccaaggatactcagggaaggccctcggattctataagtagcggtagaggtggtattagaagtcaggttgcctgacttccaaacctctgttagttactgtcccttcccctgcatgcagcactagtgtaatccctcaactctcacttccctttttcgccacatgcctctctctctttccttcccttgattaccctgcctatccctcctacaagggaaactaccaccaggcatcctcatctgagacccgggaatggaggccaggtcttttccctccctccctccctttcccctttttttgtgtgacagtaacattattcaagtacagctcttccttttttcagtaccttccccctcagaccagaagttaatgaaaaatagggttgcgtgatatgcagcctgggggccaaaaatgtaggacaagcagtgtgcttcagacaaaactgtagggttctggtttcatgcacaaccttggaggacggtggctagaggccctagtatgagagatcaattaaacatggaggccagaaattaaccacatgggattaacatacgtaaggttgcttcttttcaatgagtctaggaaacacactggggacaccttgttcaagacaagctactatttgatgctccttcatacgcttgcttaaaatatttgttcagcatttatttagtgggggcaagaaaaattgatgttatgttaataagaaaacctctttacctcttaccttttattaaaataatcaacttagaagatatactaaaactcacatgacttttgacatctatggatgatctttcatttaatatttttctgctattcctactatagaataaaagctgctattgcattattacagagcgtaatgtgagccacatatgttattttaatcttaatggccacattaaaatagtaaaaataaacaggtgaaatttatttggattatatgttttatttaacccagtgtatctaaaattgtatcattttgacgttgcaatcagtgcaaaaatacagtcatgctatgtgtaatgaggttttggtccatgataaactatatatacactggtgatctaataggattataatacagtaggtttaccatacctttttctatgtttaggtatgtttagatgcacgagtacttgccactatgttagaatttcctgtagtattcagtacagtcacgtgctgcacaaatttgcagcccaggagcattaggctatatcatgtagcctaggtgtgtagtaggctatatgtaccacctaggtttgtgtaggtacacactatgatgtttgcataaggataaaatcacctaatgacacatctctcagaatgtattcctgtcattaagtgatgcatggatgaattaaaatattttggattctttttttttttcagtactatgccttcggaatccaatatgtattttacagcatatgtctattccaaataggcatattctgggctgggtgctcaatagctacatgtggttagtggctaccatattaaccggtgaagttctatgcccatcaaggctacacgtaatttacagggtataatagtattttaaaaattaatttttttctggcttttatgttgacatatcgtttccattttttaaatttttgttttattttctttcactgctttggaaacgcacaacttcttggaatgcaaattaaaagatatcaaataatgatgtagataatttgttattgctaaatgtctaccacttgaaatattcaagtttcaaatttcagctaactgcgattgcaagcttcagctagctggtcccagatggatggcccagctaaatcagacatttgtacatactggctacaaagtgtcccaaaaacagaccaggagggtcgtggatttaaaaaaatttccaccaaaggatgctgtcttgtccattttccaatttgggtaaattaatggatactgcatttaaaagtttttttatttctcgtacattgaagccctgtactgcactcaccaactcacccgttaaagcggctctgaaatacaggcaggaccaagacttagatggactggaggttgggccacaactccttgaacacctagagcagaggtcagcaaactttctataacggtccagatggtaaatgttttaggctttgcaggccaataggtctctgccacgactacttaacaccgctattgtggatcaaaagcagccctaatacgtaactacacataaacgaatgggcatggctgtgtcccgtgacaatttacttggggacacaaatttgaatttcatataatattcatgtctcacccatttattaattattttcagtttcttcaaatgttaaaacaattgttagttctcaaactgtacaaagacatatggtggctgaatgtgacccataagccatagtttgctgccctctgcccaagtctcctgttgaaatggggttatggcaacaatcctcgcagaatataaaactattttggcacctgacttttgccctgatttttttattgtttccagagaaatcaagtatttttctttttcaaatttatatccatattctctttttttctttgctctcttctcttctggccagcaggaagagaccaacccatctttgaattgtattcactttcctcataccgtcacacagctagtaaagctacaacttcacatatgccaatgccaactcttcccgatgttgtgttcaaaacctttctaagcatcaccattcccaggagtagcaattctatatgatattattattttacttgttggtaaggttaaaagttccagggatactgattttcttctttgttagccatgtttcattgagtggataagcaatatgcatttgcttcatagtataaataacaataatgcatcaaattgcaacaatatgaatattacacatagaaaagataaatgtgagttatgtaggtcatgccatttgatagaaaattttttttatatttatatgtttaaacatgacaataaaatgattccattcagatgaaggcaaaggaataggatttcttttcagtgtggtggttttctatttttgttttgttttgttttgttttttagagaatgagttttggagaaaaacaagctttctagacagaaaatattgaaattaaaaccagcaattcatggtcatattattgaaactatcaaattggtatatatatttgaacactactgattattttctaaaatgttacgctttcaaaaaatcatgaagattggcaagttttttagatgcataagcaaatagtgtagtacggcttgtaacactgttcaagataacttttttataatgagtatggtctttctctgccctgtctaatacaatgtgggttttgagcattggaaatgtggtaagtgcaactaaggaactgatatttaaattgtatttaagtttaatacatttaaatttaaagttacattttgataaattgctttgtttttcttttttctttctttctttcttcttctttttttttttgttttgttttttttgaaacaacaatctcactatgttgcctcccaggctggtatccaactcctgggctcaagcagtcctccttcctcggcctcccaaagtgctaggattataggcaggcaccaccatccccagctaaattgtttcttaaatgaaacttctgaatttgaggatacgtgattatgtggtgtagttttccctttctttccccccctgaaatccatattctgaagtacagtgatttatataaaagtaaaaagaaggagactgttttttttttttaaattctattaagaaaccaaattttaacagacacctcagggcctaaataaatatcaagttattgttatttgttatggttcttgttgcttgggtaaaactgtacagatcatgacttagttttccttgaatttttatcaaacaaatgaacaaaatgagcaaacaaaaatattaaaaatgatatttcctacgaatccaagggacatttttctgtatcagccaggctgatgctaaggtccttcaagcaaataagatcaaagatttctgattggagagtgtgggaataaagtagcccttgtttagtgctactttgtagagcctttgtttagagtacggctgggagggagggagagagggagaaaaatacggggttaatttgtaacaacacattctgtggtgtgcgtgtgtgtgtgtgtgtgtgtgtgtgtgtgtgtgtgagagagagagagagagagagagagagacagagagagagattaaattacatttaacttctttaaattttattgtcctcagggtttaaacagtatgtgaccaaaatcacattatttagtgaagagtttgtgggtaggtggatagttagatgggtataaatccctataaaatccattttagaactattgaggtttgagcaaatcaatgtcacctattcacttcatttgtctaatgcctccaggagccattaaagggcttgttacctaactttagggtaggtttagatcaaggtgaacagtcagaaaatattatccatgtactcacgtatattattaagtattctttgaccatggagttagatgcttatactgcaaacaaataaattaatgaataacagtgctgctcatgaacaccaaagtttactgaaaagtcaatatggttttagtgtggtaataagggcagagttctccaaggactgccaacctatttattgtacatcaaattttactgactttgaaatcttgctagaaatgttcatttacctcgtaatgtattatatgtttgaggtcttgagaaaaataacaaaatccatgtgtggtaatgaagtggttatgcaataaaactaacatacactgtgatttgacacaggggacttcactgttatcagatacttaaaactggaaacaatgtaggaaatatagatgtataagcatcgtaagtaaaatccacatgctttaaaaaggaaatccacttacttttaaagtaatattccgagagctatgccactgggggctgaatgtcataaaaatgatttgtaattagtcacttttacattgtatatggatttatagttttaaaatatctggtggcatataaccacaatgtatttttcagtcatatattcatcattattttattaaatttccagagggaaagaaaataaatgacctcctagtgagggatattttaccacgagaccagttgtaaaaataatcgagttttgtgcctgggaagatatctttgctaagtctagttctccagtgacattaatttattgttgttaagaaatgtgtgaggcaaaatgaactctccaaatatttcatactacgtgcattttatccaaaagaagataatggtttacatgaattatttaattggtattactaatttgggggaggtgatttttggttgggggcaacagaatatttgcctaaaatgcattcagagtgcgctgttatttagctattttcaaggtagagggatattggcattggagacttacacgtagccatacaatggccaacttcagtcaactacagaagcaatacagggcagcggctggaacaaaatagctactaggtaaatattgattgaattaattacacggatattaccactagtcctgcaattaattaatacctagccctgtctccagccccagaatccatgacatcaagctaactaacagaaaacatatcaagaattttattccttagtcctcttgactgaccctcaagagggtctaccctcttctactctgtattcctcacatcaaatttcactagtccagccgccaagtaacacctgttctgactgtgctagtgaacttggatattcacacatagcctaaaatgggaaacagagttggaaatgtcatgtataaggacataagcgttttcaaagtgtacaagaacataagcgtttttaggagatttaccttctcttttctgttttattagcgaatgattgattgttttgtatgattgttcatttaacaaatgctatatcatgtaagaaaagttactaacggtatataaagatgtaaaattcaattgtggctgtgtgtatgtgtgagtattctagcttttggggagagacaagagaagaaagaagacataagttggaagagaacagtaaaataaagaaaaaagtaataactgacggtgtctaatgaagtagcccaggtaattaatgctagagtttattagatagaatcattatttccttccagagggattaagcaatcttctctgaggaggtggaacttttattacccaaaacatgaaggattgggaagagttttatatgtgtcgataaggaaaagagatattttattgagggaaaagaagacattttaatggcagagtacacaatgtcagaggaacagaccaaaagaagtgctttgttattaggaagatttgaagaatggaagatagcgtcagattgttaagaaccattttttagataaaggcaggctaaagaagttggaggctattggaaatcagtcacacaattttaagcaagagaatcaatgagtggcagttttgaaaactgaatttgatagtggcaaggaaaatagggctctatcatcccacttactttcaaagttatgaagaaattgtagtaagctccagtcagtacctaaaggaatttattttgtgaaattgtgtaaacaaaaagcaaaccttcttttgcactcatatagtatattttctcaaagtcatatagctaaagggaatgagaggtaaaatagtacagtggttaacaggataggcttcaaagcctaacttcttgggttcaaatcctagcttggttaccatttcacagctatctgaccttgtacaagtcacatgcgtacactgggaacaataatactacctgtattatagagttgttattagatgttgttgatagatatgttgggcacattttaggcactacatacataaacctctttctatagaagtatacatgtgtacctatatttaaaataatgattttcttttttaaaagaagcacatattcattgcagaaaatttttttgaaattttaaaagtaaaatctctggtctaagtgcactaaaatgttttagactttagatatgaactacaaaaacctacctcatcgacacccaaccccactcccagagatatttcattttatttgcttgctatcagtaatgagaagacccaattcaccacacaatttctgttgtatgagactattgtattgcagtgcaagatagtgttttaaatctttgttaaatcaataggtgcaatattacacctccctgtttgaattttcctagtgaagtcaaacaattttaataggcctatacataggtcagttatagttctttcctaaatggtctattcctcattatcctttttaattgagtatttgtctttttttctactgatttgtgagaatgtttttatcttaagagtgtcaaaaagatgaattgtttttgcctttttctttggcttgtttgattttttatgtaaagaaattttatactgctatgaatgtaagtcattactttatggcttttaaattaaaattataagaatagcctcccatattttcattacttttatagttcaatttttttacatgtaacatttcattcatctggtatttagttaggaattgtgtgagataggattttaaaattaagttaaaattcaatcaagtctttattttttaagtacagaagtttccgaattcagcatttacattaaattttttgaaaataatgctaaaatatcatgtaaattattacttattggaattgaaaattccctattattatttttaatctttataacaacttatgttatctatgcttctattataaaataaatgacaagccaaccaaaatagagaagatgcttatcacaattatatcatgataatttaaacatgattttggattaatcataatccaaaaatgcatttgataagcattctaactgttcttctagtccccataaaattaacaaatggcaaacagtaatgttttaattttcaaaatattcatattaatattcattttcaaaatatgtttacttgcatgcatttcatttatattatttcttattgaagttgacttctcaatgtatattgctttaatgatactaagtattaagggtatagattgtactcacacaaataactattgaaaagcataagtttaaatagatccatttatcaaatgatgtctttttttttcttttttttttttttttttttttttttgtgagacggagtctcgctctgtcgcccaggcaggagtgcagtggcgcgatctcggctcactgcaaactccacctcctaagttcacaccattctcctgcctcagcctccagagtagctgggactacaggtgcccaccaccatgcccggctaattttttgtatttttagtagagacggggtttcaccgtgttagccaggatggtctcgatctcctgaccttatgatccgcccgcctcggcctccccaaagtgctgggattacaggcgtgagccaccgcgcccggcccagatgatgtcaattttgaaagatactggaaagtatgttttgggagggaagagggaaggaaagagtagaatatgaagtcagtaaaacctggatatttagtgccatctttgttacttactagtaaccttatgaatattatttatattgttgatccttaatatcctcacttgataattttagaaaatgttatgtacttcataggatcatgggtagaataagaaagtgaatataagtaaaatccatcatgaagtacctgaaatatgttgtaaacctaagttataatagtaattttattgttgctaatatttcagaggaatagccaccaaaccagtactacttattatttatttctatttaacatataaaacatataatattctttctgagtggtaactttgaaaagggacaaaaatattaaaaattacattaaaatcatgtataatttataatactcctttcaaggttactaaagtgtgcatgtatttctaatcattcacaaatatgaaaatctatgtgtaaatttttaaattttctaaaaaattgacaaataaaaattgtattattgtcatggtgtacaatgtgatattgtgaaatatcacatattgtgaaataaacattgcggaatgactaaatcaagctatagaacatattcattaccttacatacttattattttttgtggtaagaacacttaaaatctacttttagtaatttccaagtatacgttattgttactaacagtagtcaccctgagttacaacagataactaggatttattcctcctgtcaaactgaaattgtgtatcttttcatcaatatctcccaaatcaccccacccccaggatctaataaccaccatttttctctgtttctctgagtttgacatttttagatttcacatataagtgaaatcatacagtatttgcctttctttgcctagcttatttcacttgacatcatgtcttccagttcaatccgtgttgttgcaaatgacaggatttctttctttcctaaggctgaatagagttccattgtgtttatataccgcaatttctttaaccgttcatttattgatggacatttaggttgattccatatcttggctattgcaaatagtgccgcagtaaacatgagagggcagatatctcttcaaaatactgatttcagttcttttggatatatgcccagagataagattgctaaatcatatggtagttctatttttaatgttttgtggatcttccatactgttttccacaataattatactaatttacattcccatcaacattgtacaagggttctcttttctccacattctggccaacacttttcttttgtctttttgataatagtcattctaacaggtataagatgatatcttattttggctttgatttgcatttccctgctgattagtgaggttgatcatttttttttttcatatgcttgttagccatttgtatgtttgctttagagaaatatctattcatgtcctttgctgtgtgtcgatactgatatgtaaaatatgcatacaaaatcaaaaccataatttatttttaatatatttttaatatgtcattaatatttttcagtgtaataggatgtttttcataatatttactttaatggacgcaacatatttcattatgtaaaagcagtttattctatttggggagatttcgtttcactttttcgccagagtgacataattgaacattcttgtcataggtctctgtgtttatctctgatattcccctaggaaaattcatagaagtagcattttggagttgaagggaatgagtaatcttaaggcttttaaagtagttttatcaaattttctaaactgaagtataaagacacatagaaaagtacacaaatcataagaatagaaattcagggatttttaaaaaaaacttagtgtatccatgctactaccaccaagttcaagaattagaacattacctcaggagcccctctcatgttccctcccagttatgagcctctcccctgccaccaccctctcccaaagataagcactcttttgacttctaacacctagattagttttgactttgaaattactataaacagaatcatccagtatatgcccttgtatttgacatgtcctgctcaacattatttttgtgatattattctatgctattgcctgtgccatagttagtttagtttttctatgtatggtattctattgtgtgaatatgccacagtttatccattctgctaatcaatggacattgggctgtgtctattatggggctattaggaaaaatgctggtgtgatgttcctgtcctttgctgcatatatgtatatatttatttttaatatacgtggaagtacaatggctaggtcataagatgtgtacatttggctttggaatcaccaaaaaacagtttttcagtgtggtcatttcagttcattttcaccagcagtatataagacttctagttgatccacatattcatcaagagtatgtattttcaacctttatccttttaaccatttaggtgaatgtgaaatggtatttcattgtgttttaatttgcaatcacctgacgattagtgccatttttatatcctcttatgtgaagtcattatgcaaatcttttgcccattaaaaataatagttgtctttttcttactgatgtagaagttatttggatacaagtcctttgtcagatctatgcattgcgaatatctttttccaacctaaactttgctttatttttttctcttaacaatctttcctgataaatggagtttgatttatcagtcttttcctttatggctaatgctttttatgtcttgtttaaaaaataatacattaacctaaaattgttgagatttttttctatattttcttttgaaaactttatttttttgccttttacattgaggtctgcaaacaatctagaatttatgttttgtgtatgatgtggagagtcaaggttcatgtttttcaaatgactaatcagttaacttggtgctatttactgaaaagatcatccttttccaacttaagtgacaccatcgtataaattaggaaacgctatatagatgatttgttctcacttcaatcccacacaggcttaattataataaatattcatgtctggtggcaaacattcttaaacttcgtcgttcttcaaagttgccttggatattcttagccctttgcacttacatataaatcttaggattggcatgtcaatttctactaagaaatggttgctgcaattttgattgagattgcattgaatttatagattatttgaagagagggcagatatctttacagtattggactttctaattcatgaagaaggtagtcctctatttgtttacattttcttcactgtctcagtagtgtttgtagtttccagggtagaagcttaacttttcggtctgaattaccaaattactagcaacatatatagtcatgcatttcttaacaaatgagatatgttctgaaaaatgtgtcattaggtgattttgttgttgtataatcatagagtgtacttacacaaagatagatggtatagcctactgcacatccaggctatatggtacagcatattgctcctaggctacaaacctgtactgcatgtgactttactgaatactgtagtcaattgtcacacaacaatatttgtgtatctagacacagaaaatgtaccgtaaaaatacagtatacaaatgataaaaaatagtacagctgcatacggtatttaccatgaatggagcttgcaggactcaaagttgctctgggtgagtcggtgagtgagtggtagtggtgagcaaatgtgaaatctaagacattattgtacggtaccatacagtttacaaacactgtatagttaggctgcactaaatttatgaggacacatttttatcttttttttttttttttgtatttttagtagagatggggtttcaccgtgttagccaggatggtcccgatctcctgaccttgtgatccacccgcctcggcctcccaaagtgctgggattacaggcgtgagccaccgcgcctggcccatttattttcattaatgataagttaaccttagcttatagtaacttttttactttataaactttttttttaagtttttgactctgtaataacacttagcttaaaacatgaacacgttgaacacccgtacaaaaatattttatatccttattgtagcagctttcttatttttaatatttttgctgtttaagcttttctgttaaaaagtaaaacacaaacacgcacatgagcctaggcctacatgggtcaggatcatcaatatcactgtcttccacttccacatgctgtcccccactggaaggtcttcatgggcaatgaaacattcatgaaactatcatctcataggataacaatgccttcttttgaactaattaagaatatagtaaatacataaaccaataacagttgtttattatcattatcaagtattgcatactgtacatacttgtctgtgctgtatttttatataactggcagtgcagtaggtttgcttacaccagcatcaccacaaacgtgagagtaattcattgcactgtgacatcactaggtaataggaatttttcagctccattgtaatctcataggatcacagtcagtctgttgactgaaatgtggtgaatgactgtataatagggctccaaggaagatcataaaattgcttgttttccagaactttgacaaagaccttttacagaaactaatataatagataaataatagtataacattgctgttttcctttgcatttcattgattactaactgtctggattttttcttgtttattggctgtttacatttttgtcaatttctttttatgttctttatccagttttccagtagatttttcctttttttactcattaaaagatttttttatatgctaaaattattaccctgtgtctgatatatgctgcaaatattcccagttgtcatttgttttaattttgattagtggctttaatttataagtgaatacgcatattatattcaatctttttatattctttttttgcttctaaaaggcttccccacgccaatattttattccagttcttcttactatttttatgcttaacactttaatttttctaaaatgttttgtgttatgaaatccatcttaatatgtttatttctaaaacagacacttttgcttatcttaatattaaaacatatacatttgaaattaacattcagagattgaaagaataaggaaagtaatcttgtgtgaaattaggtcaagatgtgcttagatactaaattaacacataagggaattgaatgtgtttgttttctttcaccacagggaacatgttatatgaagagcatggttttataatacataaaaggattattagaaaaatgatgtattttaccggtcaggtgtttgtgtctatactttgatgtgaatgcaaaatagtaaatataaatgtaaattaatttaaaacacatagaatctgatacaaaccttaatctttttccacgttatacattactcacacctgttatatttttccgtgaagtatttggaatactctcgattcctggaaactgttttaaagtgcagaagagcacaaaaaaaatatgtgttaaaagttcttgatttccacccaaccattaagtgatattgccaaagaaaactcttcagagcatttttcactgatggctttagatatgttataccagaataataatgattcattattaaaatatgcaaagtgtaatttctcaacaacattttgtggtaggaagatgagctggtacagtagttttccttattaaataattttttacaaaagtaattgacatggtttggctgtgtccccacccaaatctcaccttgaattatggtaatccccacatgtcaagggtggagccaggtgcagataattgaatcatggaagaggatcccccatactgttctcctgataatcagtaagtttcacaagatctgatagttttataaatgtgagttcccctgagcaagctctcttccctgctgccatgtagaatgtgtttttgcttctcctttgccttctgccatgattgtgaggcccccccccgccatgtagaatggtgagtccattaaacctctttcctttataaatcacccagtctcagatatgtctttgttaacagtgtgagagcagactaatacagtaatgcatttacattgttcaaaatataaaaggtacagtaaaaaatatctcaccctacccatcatctgctctaccctcactgcacattaaccttaattctagaaacaaatctacaaaataaattcctgggaataaaatttccaggtcaaagtttacatgctttttatagatatggccaaactgccttccacaagaggtacacaaatgtatacttcccaccagccacgtagaagagtctgcattttcccacagccttggcagcatagtgtacctgcagacttgaatttttgccagtgcaatagatgaagctctaattttcatttctctcattattaccaaggctaagcttctgttcatgcttttaaaatcctttgtattttcttttctgtgaactgtccttatcttttgtccaattttcttttgggttgttggcctttttcttattactttgcagaaggtctttcatgtgttaggaaaattagtcccttagacatgagtcacaagcatttatttttcataattgttcatttgtttttgattttgcctatggctcttttggtcgtgcagaagcttttgattttttatatagtccagtttactgatatttttgtctgttaattaaagttatttaacttgaggatacaatttacatttttttgtggttgactactatagacatatactgcttcttacattgaaaaaataataatcctgaatttggaaattgtttttaacaaacttttggtgaaggtccatcatatttaggaacagagcttgtttgacccagaaatcaaaggtcagtgagaaggagcaatgtaaatagaaagttaaatagcatgaggtaaatgttatgatggtgggaaagacaagatctgagaggataaacctaaagcaacatcataattaagctgaaaatttcgtctcatgataagctatcatttcattattccagatattagtcaaatctgacccattacactgttttctgtcaggaattgttttacctctattacaaggaagggatagtatgggaggatgataaggaaaccagcagtcttagttaaatgttatacagatttctgtgcttatatatgaagcctaaatgaaacgtgaacaatttcatgatcagataaaaaggagttcatcgctcagttttagagattttaggaaaatatgatggctattatctcagtagcttcagagtctagaggcatttagatgttgttagttgaagctgtaaaacgctttttacatctacttgtgagtagaaaatgatccaataaaaataaaatgtttagttacctcctttaaaatgcttgaaaaataagttgaggacatcattagatcatgtattacagacgtaggagtatatttgtaacatcacctacatcacacatacctgtgtgcgcgcgtgcgtgcacacacacacacacacacacacacacaagagttcagcaccacaggtgtagttatggatgtgaactcacaaaacacaaatcaagcaaagagaacaatatctcaattcatgattcatggacattctgtgctatctgaaacacaatgcttcttttgcccaactctcacccacacagggaaaggctgccaggaatgagaggcaagaagtgtgcaggtcaccttcaacaggagccaccacctgtatttcccatcagtcttttacaccattgtagtcacgtggatccaaggactgtattccaactgacagctcctgcgatgaggtgcagttccacacgacaaagccaggcccaacatttcccattcatcttaaagttagtgtttccaaggaaacagtgctgtgggagcctagggtcagtcccagactgacctgcaacagcccaggctggatgttaatcctttgcttatacagtctcatgaatttttcacaacatatatacatgcatttacaagacgtttcactgtacatattgtttacgtatacaatcttgtttaaaattcatttttctgtacattaattgatttttttctcgacaactttctctttttcatctcctaactcttgcatccaattaaacaatgtactgttcattagtgacttattttaaaagtatctaaaacaattgttccaaagcatgtgacattgtttatgtgacacactggtatattatctagtttatttttaaaatcttctctattattattcataatatattattatggaacagatgtatattataaaattttattcatattgcagtgtaatattttgtattacagtggtattgttaatagtctcgtaaagagctatcattacaagtttaaattctttattctgggatgccagttttaactcttgatattctgaagaaaatagctttactcttgtttattctggctctgtttttttgttttgttttgttttgttttttgttttttttgttttttttttgtagagatgggagtgttgctatgttgtccaggctggcctcgaactcctgggctcaagcaatcctcctgcctcagcctcccaaagtgctgggattacaggcaagagctacagtgctcagcctatcctggctctttatttacatgtaagcttgagcaataatcactgctacttaataactttattgtcattcattatcatgcagagtattgctctaaggtatgttcagggatgacgttactgagtcctaacagtaatcctatgaagcaggtgctatcattgtccccaatctacagaggaggcattgagagttagagaaaacttggctaaaatgttaggcaagaactagaaccagaattgaaatccaagtggcctaactctagacctcacaatgcttaataccatgtcatgctgcttcctaacctatttaatgtttttttcaaccccaacgtcatcacccatgtgtgatagtgggatcataataatatctatgtcgtagcattgttggatggattaaggaagtctacaaatgtgaaacttccaaggatgatggttggcatatactgatctcttaataaaaataacctataatcattctgttacagtctactctaatccaaatgttctttttacttctcatctcaaccacctgcttctgtttactaggactcacaaactatagctcacaaaaacgcataacttaccaattttccttgtacatgaagggacttccttttacaatcttccatgacataaaagaaagctagaagcaagtatagtagaagaaatgattgctatacaaacaaaattatagttggtttggttttaattttaggatgcgcattgaataaaaatcactcatttgggatttagaagacctgtgttatatatctggtgctaatgctgaataacttggcttattcatttttataactgcaaaggaagcgcgtatggcatataatacacaacacaccagtatatttagtaactgagtgaataaatgaaagatgtatttctttactttatcagttgcagttggctatgcctttgtgtaaggtgtgtgttttgaaattccaaaaaggtattagtttctttaaagcaaagaatttttgtagcaggttaatgaataattttgaatacattggttaaatcccaacatgtaatatatgtaaataatcaatattatgctgctaaaataacacaaatcagtaagattctgtaatatttcatgataaataacttttgaaaatatatttttaaacattttggcttatgccttgagaattatttacctttttaaaatgtattttcctttcaggtttccagagctttacctgagaaacaaggagaaattgaagctcaaataaaagaccttgggcagcttgaaaaaaagcttgaagaccttgaagagcagttaaatcatctgctgctgtggttatctcctattaggaatcagttggaaatttataaccaaccaaaccaagaaggaccatttgacgttcaggtagggaactttttgctttaaatatttttgtcttttttaagaaaaatggcaatatcactgaattttctcatttggtatcattattaaagacaaaatattacttgttaaagtgtggtaaggaagactttattcaggataaccacaataggcacagggaccactgcaatggagtattacaggaggttggatagagagagattgggctcaactctaaatacagcacagtggaagtaggaatttatagccaaggagcagtgtaggagtcagtagatggaaaattattaagaggaaacatcaggggtaagtgggattctggctaaaccaacctcacaggattcttgctgaagataggccagggttatcttatcagacaacccttggggaatggtggagaatactgagggtgatcaggtaccaaggataaagggttcttgtaaaactgacaggcttctttgctgaacctggattttacaggggagtgcaaagatgagcccaggcgaaggttcagaagcctgactaaagtttagtcaagcagggaatctttgtcatcatcatcattgttgtcataatgataataattattattattttactagaatatgttgctttttcctcagcatttactagaaataaggtcttcattaaacttatgttactagaatgcctgcatcatatttgttactgtgattcattttctatccctgttttaattgtgcttaatacatattcatagattccttatccaaaattgaagttgtttatgagattaggttcctaaaatataatgtctgggctcttttgtagacattgtaaagccctctcagactgactacactttacctttctatcttctcattctgccagcaatctccccgtatagtctggccacatcaaattacctggtacctttccatccatgtaatttcatgtcatacctgtgatcttggttttctctcttctttaaatgacttctttcagtttattttgatataatgaattttcttccattctttaagaatgaattcaaagtcattgcgtcttccaagttttcttccgtaccccaagtagagttagaatccctgttaggatttcttataaacctttttattcatctcccattgttcatatgttgatttacacttaaattttatacacctgagtatttcattacacatctgcactgttctttgagtgcagagggcattctcttatttatctctgcttctccactcatatcatacacactcagcctaggatccagtaaatgatgcttacttgtgagtgtttttaagtcaatgaataaagacagtaccaagacacccagaatacgaatgagatactgcaggtaagcgtaaggcttcagacaatcctgccaattgaacaccactatctccttcttctagtgtccttgtaaatgctgattgatcttcttttctccctttcaaggaatctattccaaagattctttcaatatgctgccccgttttgcgtctccttatttgccaaaatctttaagtagccaatcaaataaaccgaatcgttgaaattacaatctattaatgaatgtattgttgggcaacttcagagtaaaaaggataagtaacatttttgagtagttttttcttttatttaattgactttaattgttaaatttatttactgtccagtattgtaaaaacctaacattttaatctccatttagctgttgttttgctggaactgagagcaaagggaaaaggaagtttgagaatattctagtgaagaggaagtaaaagtttcgggaagatgggcatgagtaacaaggagatagagggaagtttgctacaactaaaatgagttagattagcaaaatgttctcgactatgtttaccttacttcctcctgacacttatgtctaccattctgatagctactcctcaagagcagatggcactgtggaagtcacaagtagacatcatttcactagcacaaaactcagcctgctcagccagtggcacagtcttgggttcagtctgatgattaaatttacgagacataataggctttacccagtaacaaatttagttagctttaagaaattatacaggatgggtaacaacagcctgcacattaaaggcacagtggaagtcttgataccaagacgtggcttctgatgtcccatcaccctgaattttagtcatacatgatcacaaggggcaagactgggtgcgtacaaaacacatcatcgtctcagggaagccatcagttctaggatcctgaccatttctccacttagctagtacatattgtactcagaggtgtttgactagctcctattcaccagtacaattacatctcatgaatactgatttttcactgctcaataaacaaccccaacaagaaagtacagttacttggcccaatacacaataaccttagccaaattctcaattatcttatatccagtatattcttaaaaagtaactggcgtaatattgcgaagaggaaaggtcataaagtctttcctcccaaccagaaatagctttttgtagctcacggtaaaagcacattctactcttttaaatgcaatctttggttaaaatgtgcctctttattataatagtttaaaaaatactcaatgctagctatctctcttcctggaacacatttaagaaaagatttttttttgaatcccttggtacaaatagatcctgtttactcaatcaaaatgacttttgtcccagtctgtgccccccggaatggttttcaaataatgaaaacctgcattgtgtcttcgattgtctatggcccatagggctctgccaaatgggtccctgcagtttgaagtgaaagccatactcggctgtgttaatcacttttctttatcaaagctacaagtcaccactcactgctgtgtgtagtttctgagagtcatgatatttgcctcctgcagcttgttttaaatcactgaggggagagggagctgcttttttcctggcagaaaactccttggcttcagtcctctgagcacattccgagtttcttatctctggagtgcagacttcaaaaatactcttttagcctttttcttctgcttgtggctgtgttcaaggtggggggaggggaaacataaaatcatagatttgatgacttgagagtttctcccaaaaattctcaaacccccagcttataattaggaaatggtgacctgtgtgaataataatttaccttgttttttatccctctttgtctagcttccattcctttcactaataaatgatttattaagattgcacagtttttctgatttaagatataggatattagtccttacagcctgctgtattcctctgcttaaaggaattaaactatttttccattaaagaaagatgggacactagactttgctttacttagtttcaaactactgaacaccaaaaataaaatttttaaggagttttgagcacatgcccttttttttaacacaaggtaaaaaaaaaaaaacacctttactaaaatcttaagaaagagttaatgcaaaggaagtagatatacgaacagccacgcccctagctccaaatcctaaatgtaaagaaacttgccttgtctggccatggtggccatagctgcctcggaaacaaagggtctgaggccttgccattcgggtagtttgttttctctagtcaaactctgagcacacctgttagaaaaatatgtaataccctctctctgtgagcctcagttttgtctgcttggtacttcactcttattgatgaaatgcagctagctgtgtagtgaaacccagataaaaaaaagctttaagggctgtgttctaatacattgtttatgctggagtgaaaattgactgcacattgcttggtttgtgcaatttactcccgaaatattcctattcaggaaatcctgcaaatagcaatattcatcttgaaaatcacctcacagaacccttagcaagctgagaaacataatcaatgagatcgtgatgtagagggtgaaaattaggcgtaatcacagccctttcccatcagtcagcccactagaaggcatgcctttgaattttgattttcaaatatactctcaatttagacataaaatatgttgatttcagatttcagaaatgataattgaatgctaagatcccgggaccagtttagaatttctataaagggtcttatgtttttaacctttaatgaatgctttcaataatgagctagaggtatactatttatctgacataagactgactactgctttccaaactttttattaaaatatgaggtgtggcgggacacataattttatgttaaggcttagtgactgaaatactttcatcttaatcacagggagggggttttttcctcccctcaagaatcactttccttctgtggtttataaataaacatgacatgtggctctgctggctcttccttgcagtataaggagcataattgcccataatgtcaaatccacactaaaaactaccaaaggactcaattgtagtgactgaccattaaagtcactgaacactgtgtgtgttcacattgctgtgagtgttgtcaaagaaaaatagcactagacaacagacaagaaagactgtgttcaaaacttttgcaatagaggagacagattgaactcaattctgctgaaataaaaggcaggagagcctctaagtgctgagatgagttagtgagaaagtactagatatcaggagggaggttagtcaatgtgcttatttaggccatctgtgtttgctgattggcacttatcaaagttagattcctatcctcccaacagaagactagcagattggggcactatcttttttgatgattctatatcaaagtgctagctcccaagtccttgagaaagtttattcctgaggtataaaagtggcaagaggctaggagaatatttttgtctcaaaaaagtagagaaataatatataaagttttctagagtaaatgctctaagaaaaggaaggtcaggtctaaagtcaggaagaaatctgtctcaaatgtagtcaaactcagggtatttttaaagctttctttgtcaaccctccattttgttcaagggaaaccagttttcccattgaaaaacttaggaacgccagttcatctagttcatttcagcaggtttctgttgttgaaggactagctgaacgaactctgacacttggtagtaatcagacatttcatgaaggagatttccatgaaagttagaaggaagacgaagattaatggttgaagcagactgcaaactcagtttttgagtccagagggcagcaagtcaaaaagattcctagaagctgggctgtaggcattctcagatggtagagtgaggatggcagtagcaatccgatggatttcttggagcatggcacggaagaggttggagtttactgaactttttgcatggcctacaaagcagcagctccaggcatgaaagttgtctatacataatttgctgtggtggtgagtcctttgtagtttatagcaagtcatccagcttctgcttgcagggcttctttagatattgtggggaaatggcagctataagacaacctagagaagagagtccttatctcagtaataatatgggcagtcacgttttagttctcagtgtcaccaagtcaggatggtgggagaaaaatttgaaatgttaatttggagaatcgcagccagattgtaaaggaaataaactgaaaattggtaaggacggacaaaatgtgtaagacagcaggatccagatcaatttacaggtaggtaaaaaaaaaaaaaaaaaaatcatgtcgtttacaaagaaatgcaaaatagatcaaagacaatgaacaggactagaatctgataaccccaagggttactgaaactctatctctaccatcacccttttgatcagtgttaatcaaagtaagactttccttgtttataaaataagactggcctatttatttatataggggtagcaaaaatggtaatttaccaaataggctattttaagtgtgattagctggaagttttcatgaagaatcacaagctgaataagtttcagagatatactgtacagcatagtgcctatagttaacgatactgtactgtacaattagaaatttgctgagggcagagtttaagtgttcttaccacaaaatactactactctcttttaggagcagtggtacataaggtgagaggaaacttttggaggtaacgcataggtttatggcatagattgtggtattggttttgtatatatactttatctccaaactcatcaagttctatgcattaaatatgtacagctttctgtttgtcaatcatacctcaataaagtagtttaaaaaatatgaaacctcagatttgattttttaaaagtctccaaagtttaggaaggcaagtcaagaacttgacatcagattttacctgaagtaaaatacctatagattcagctgaagtgttctgttttccaggttcctaaaatacccttggtttcctgggtctcctaagaatagaccttccttactcagttgtaagattgggaattctgtaagccaggtaccgggacagttttcccaaaaggggcttatattagctccatatagtcaagagtagctccttaaaactggtcacatctgactctatgcacttaattctcaaatatgacattccagtcaaagccttggttatatatttttttcaattatgtcttgttacctaaatatatttattgagcctatgcaaataattatattgccatgaaaataagaatactcggtaagaatttctgaattttacagggatcaggcagggataaaaagattaatgtttcattctgtttacaaaagcatactctaaattctcatgagttatagataacttaagagaaaaaggaaaggcgtttcttgtatttagcaaacagaacattaaaacatgaggaatattttaaacaaaagccataatcaaatcttttatcagttcattcaggcccatgtagttaattcttgtcttgcttgatcttgagttagtagtttcatgaactcatcagcttcttcacagagtttcataaatcctgactttgtccaatggtataatctcgaagttatttaagcaatggcatcagaagtctgtgtcccagagtacctgtcgtagtacttcctatgggtctcaaagatggtcctgttttactgaagatgatgcattctgacctctaactgattgtaagagcactcagggaagcatcagcataaaccaaaaactatctgtgaacgacaaaagacttaaaatggccataattaaagatctgattcattcgacaagaaattttttttttccctggtgccatgccacattttaaaataacaactggagttaggactgatgacataatattattatcggataaagtagcaccaggatgtgtcatggacacctagagcacctagagcactaacaaagttctaaggatttattataatttttcaagtatttatactaataatagttgacccatacaactataacctagtcaaggttcagcatctcttcttgtcaaagctttttatgcaactcaacataccaaatgaacctagttatttttaacatccttcattttacaagggtgcaggaacaaatcctttgaaatttttcaaaccaatctgagattaaaaaaaattttatttaagaattgacctgggaaaagcaaaatatcaaaggttgtaaaatgacaaaaggtttgaatacttggctgaataggatcattgctcactatgaaagaatgcatggctacctatgtaaccaagatgacaataaaagatttcaaaaataaatgtagaaggccacatgacggtaaaagtttttagttctttccaaagagaaaacactactttctaaaaaaattcaaggacatacaaaatcaacacaggtacttattctgataagaaacaatatttgtttcctatacagattacccaaaatataaaaaaaaaaacaaattttgcaatctcttattaagagaagaccaatagaaaagatgaaaatgttaattagtttgaccgaaataattgttttgcaattttgtgtgtgcgtatatatatatatatatatcaaaatatgttgcatacttaagtatattcaattttatttcaaaagagcagaccaataatccaagaatattttatcattttttaacaaaaagaaactacaactcatttttgatcaatacactgttgatactaagggtcatttgtaagagtttacatacacataaatccattccgttttagccagcattggctattaacataagactctccttccacaaatcttctgccatttccaatgttcattcagattttgtcctataccttcctcttcctcattttcacagtcattttaatttaggacaaagttattctctttttccttaacaaaaacacatccaacataccttgtatattttgcatacaaagttgtttccctttacccctaatgtttctggaagttttatttacatatattgattatatttttaaccattagtaagtcttattttatagagaaaactaggaattagctaagtgtgaactgtttgtcatataccagtatttcatagccaactagcaaagcttatgaatacaagttaaattcacctactcaatatgagggctaaaagtttacatcaatatttgtggaggagccttttaagattttcttttgccctgatatgtaatttatggaggctgtgttctaaaatttgagtaaatgactgaggagatacctagtggccatctgggtatctccaaatcccatctgaacgtacacggtatccagtctgtttccaattagctttttcaacctcaggtggttgcttctggggtttgagttttccagagcccccagtagtggcagggagcataacgctttagagaccatagagagttgagagactggagtaggaagagaaaggtctgtcatggatggacaaagagatggagcaggtacgggtttgaagaggaatatgctgaaggatttaagggagctaaagggaagatcaaaagtagtcaaaggaagaaggaggaatggtggtgatgggaagggagaggtcttagatgagccagcttagggagtgcttatgttttcggaagaggccattgaagttcatctttagtaaaaatcaaactaacaagaagagaagcctagtttgtgccatagaggtgaagcatctaatcagcagtagtcttcagaggaggagaaacagaatagtgagaatgtctcctggaggaaagaggcaccgaaggaacagcaacaacaaaaaaaggaaacatgaatgaggtctctacaaacgtgatctgtacagaaaatgatttctctaaatactgaaaatctgaagttgaaccaaatgagatttcaataagaattttccatgttctaaaccaatgatgcttttcaaacaaagaagcctgggactctagactcaagaatatactcagattactgagaatcaaaatctgatgttaccatgcttccacgctttcgtgggtaaggagtcagacttaccaatggattcccaattaatcagtcaggagtgtactcaacattcacaaaattagctttgcagaggttaatgtcattaaattcactttagaatggataattcaaattcaaatagtaactcccttagatagatgtgtactagctcaagttcacctgttatctgatttcatttttaaaaaaaattttttaaaagtggtgttcgggaggtaaggaacaaggaagagacctttagaaaaaagtttcagtgttttatattggatatgaaaatatcagtggaatgtgtcctgaaaaacactggatgacagttactggacaaaaagacaaattattcccttttaccatgcaactgaacacagatttattgaatgtttttctcctgagtttaggttgcctctgggcaagagtataattctggcttgataacaccttgaagcgtgtttgtttaagtttgtggatagtttcatctattagtggaattaggcatctgcttctctttatgaacactgggtaccataatcttcctcttactttttgttttttctactcaactccaaaaaccattgctgagttgaagtagaataataaggggaaagaaacaaaagactaagtttgaatcccagtgctgacacttactggctttacgatattgtttaactcacttaccctttttaacctgaccttcttcttcactaaaaatgaaaaattgagtgaatttccctgggactctgttagataaggcaaaactaagatgggaacacatttcctaaggcgtagaaaaagacagtgaatgggacctttcttgttgtatcaggagttatggtaagaggtactaacaataaaaattaggctttcagccaggcatggtagctcacgtctgtaaccctaggactttgggaggccaaagcaggtggattgcctgagcttgggagtttgagatcagcctgggcaatatagcaaaaccccatctctactaaaaatagaaaaaattagccaggcatggtggcacgcacctgtagtcccagctacctgggaggctgaggcatgagaattgcttgaacccaggaggcggaggttgcagtgagccaagatcacaccactgcactccggcatggggaatagagcaagacttctttaaaaaaaaaaaaaaaaaaaaaaaaggccttcaaaatacccctacagcagcaagttggtaccagaaaaacactccaaaaaagggagtagatggtcatgagattttcatcgttcaccaacctaacttgcccatataaggaaaaggataaacttgagaacagtttcttgaatgagaattcctggaacagatcattcaaataggactaacaatttgttggacatgagaaaacttctatgacttttactgttccctttcttatgagggaggggagaagagtgcttttcctctttgccaagccaaggaagagggcttcaaagaacctctattatagtggcattcagaccattgtatttataaaaaataaaaatattttagaaaattgaatatctgcttgcacattttaaagatgacatctattttctgcccttgggatacagtaaatattgacattttaaaagggtttatagtacagtttagaatgtatcccgtggaatccaaataccattgcaatataatgtctaccatcatatacttaaaaatacatgaaaaagctcatatttaataaatagaagttttatattattcctttttatttaaatcatatttttcaacttccccaatgaattgtattctaatgtgataaatatgtgatacatatttatgctataaagttttattagccactctatcataattctttataaaattatatttatgtggacttaaattcaatttttaaaaacaatttcctgtgactacaaggctctaagtatttttaaaattctctagattgagtagtatttaaagtattaataataaatacacttagtaataaccaaataacctaaatatatgtaccttttgataaataattattaaacatactcagtggatagttattgaaaatgaatctattatgagatggatgggtatttgatggtaccttgagtaaagaaggatttcagtcgctaatattttgaattgtacttttatttggcataaatgtatcttgactacaatgcaccagtgggataggtcagagaggtgtgcttttattttgtaaagcggaagaaagtctgtcattaaccaaaaagtgggcaagaaaattggaatgaagtgcctaccacaggaacaaatccagtcaaatcttttttttgtttgtttgtttgagacggagtcttgctcagtcgcccaggctggagtgcagtggcgtgatctcagctcactgcaagctccgcctcctgggttcacgccattctcctgcgtcatcctcccgagcagctgggactacaggcgcccgccaccacgcccggctaattttgtgtatttttagtagaggcggggtttcaccatgttagccaggatggtctcgatctcctgacctcatgatctgcccgcctcggcctcccagagtgctgggattacaggcgtgagccacctcacccggccgcaacatgctgttttaatgagcgcctgggtgcgggcagcctcaggcctaaaatggcgttagccccaagtgaggactggacaaaggttttatagtctcctgtaaacaggaagtctcctggcctgacgtaactgctgcattgtacccggatggcctctttctcgatcttcagaggtacttgtcttctggccggctctcttcctgcttctgctatttcgccggtgcatgctgctcaggcaagtagccttgtgccttaggaatgggcctgagaaaggaggagttactcatctccttaagctttcaggcccgggagagaatcttacaacccactgatgagttatgaaatccatttaatgggtaaaataaaatagaataagatagcatagggtaccaaagaatataacgcaggttattacattgtgttacgtgtggtatgcttaagtgttgttttctggaactgttgttatcatttgtattgtacttcatttttgtttcgaattttaagataatctgcacagttttatagaaaatgagttaattagtactgtatcagtgatgtcatactgggttaattattacaaagttgggggtaaatttatccctgtataacagactttaaagataatataaataggccaggcgcaatggctcacacctgtactcccagcactttgggaggctgaggcaggtggatcacgaggtcaggagttccagaccagcctggccaaggtgatgaaaccccgtctccactaaaaatacaaaaattagctgggcatggtggtgagtgcctctaatcccagctactcgggaggctgaggcaggagaatcccttgaacctggaggcggaggttgcagtgagccgagattgcaccactgcactctagcctgggtgacagagcaagactccatctttaataataataataataattttgtttatttattgaatagatactttcttccagtacaaaattcaaaagcattgaaatcctctgttgcattgttgtctttcagccacacagtttctctccccatgtgctgccaaggttttcagtttcctgggtagccttccaagaataggatgtaggtgtgtgtgtgtgtgtgtgtgtgtgtgtgtatattattttctactcttgtcctcttaaaataaagccagctgttagaatactataaatactgtttctgcatccttcaaaagatggttcttttgaagcccttttccttggcttggcgagggcagaaggaaaagcactcttcttcctccttcataagaaaggaaagactaaaatgcctgtgtgtgtgtgtgtgtgtgtgtgtgtgtgtgtgtatagcactcttctccctcccttataagaaagggaagagtaaaatgctgtgtgtgtgtgtgtatatatatacacacacacacacacacacacacacacaggtgattattttctgtattagtagttaaagaactgtctctttttttttttttttacagttgcatactattctgttctaaggatataccataattcacttaagcagcactccaattagtgagcctttagtttgtttcgacttttggctaagataagaaaatgtataactttgtgcacatcattttacacgttgcaaatatatctatgtgataaattcctagccgtcgaatggctgcgtcaaactggcatttgtcttgttagtacattttgccaaattgctcttcatagaacatctcgtcagtattaggaaaggtttcttttccccatacccgtgcccactcagtgtgttatcaacctttttgatcttctaaacaagaaaaatggtgatatctgtcattttaatttgaattctttattcattttgtgagtgaatttgaattttttcatgtgttgcagaatcatttttatttccttttctatgcactgtttgctacttttttgttttttgccaatgttctcttttgggttattggtctctttcttactaaggcaaatatagtttacaacttgaagtaaaaacatggttttctatgataaaggttttaatgaatgttttctacaacagacagattctagtcttaaggttataacctgaaaacatcaaaactaacctttgaattgcataggaatggtctttgctcttcttagccatcaatcctggacagaagttcaacatgatgacaaattgtagcacaagtagagatttaaaaaatttttaactaatatgtaaatatttgctttcattttcttatttatctaacaatacattgatggctagaacagggtttgtctttgcaaagagcctgtgtcaactgactcccattctttcaaaatacattacctaaagaaggtttgtggcttctctttgcattgcattttctagccaaatctgaaataactatctggaagcttaacattttattcccacacttatttttccttgtgaaaatcaaaactgcactttcccagtcttcatgagtaaccacaatggtttgccatttgacttgccagttgtattagcatactgagatgtaatttatctgcatcaagagagttaattctgagcagctgggggctttctaatctctttacccatcttggacaccagttccctctcactgctatttgttttattctttgcagttagaataccattcctcttgacatacaagaaacaaacccaatagaaattaaaaggttccaatttctattttccattcaccaatattataccattttctcctaaagcagttctactctctcctagatcattctcttgcttttgaaataaaccttaaaaagtcattttgtcaccctaaatatgtttatactttcttgaaataatgcttttactgcatattagaattttagtttttacttagcagtccttcactactcctttagaaggaaatttagataatactttgaaggaagttatgagagaacgtcagaagccatgctatcagttttttttttttatgtactctaaagaaaactctgctctgcccatgggtgtcatctctttctgattctgtgtggaggagaaaaatgggaacacttccaatcattttcaaacaatttctgcttaagtggatgaatggaccacctggtttactaactataatgcccaggggatggctttgattggcagacagaacgcggtgcagaaacaatggaagttaaatgaggaaggttttaaacttgcaagttacctcccttggtggcattgactgttggtagaaaataacacgttgggatttcagatacattcagacatgctctgcacttgcaatttgcaatacttaaaacaacacaattcttctaatcataactttttaaaaaatttggccacctttctccattgtctcataaagctatattcatgaagctgtttattcacaaagtcgtatcatttaaagataagtgttatatccataagtatgtaaatgaattaaaatctgggaggctaacacttatccattccttattctactatatcctatctagagccatgcttcttaaaatttaatgtgaaactgttatttctggtctgtggaaccacagtttgaaaagcactgtcatagattcttaagtagatacattttcatgcatacaataaatatgcaggagaagttaaatgggtatgtccgggagtcaaatattgattctcagaatgaaaacttcttcatttatttctcagtgatcttcataaccctttcccatactgggcagtgagaaaaaattatcatctcactctgaaatagtgatttcaccagtctctttttatgggttgggacctcatggataatgaccagtcttttagatttccttgctctcctcctgctcctctccaaaatggcagctgggttgacagatgaggaagcattatacatgacctgagatctctatgcaggtacttgcagtctcctctgaccctctgctctctggaacagtgcctcttgtctgcctgataagtctctaccctgctgaccttgtggctctgagcttgtattttcatcaggaaatacggttctctgctgactatatcagttactaaagggattcttaaatctctgagttactgctgaagaacacttagaattctaaatttgtaattatgatacctctaaaaacaagcgtgattatccattatgtataaggatgccttccaaaaagttggagcaacttgaagccacttgttacattgtcatttagtggaggagggagtgaacttggtgtttacaggtagaactctctatcaggtgctgtgaggaaaaacaaaagcaagataaactgtggccataatctttgttactttatttcccaatggggagaaaaagacaaatatatatatttgtcaaaactgaacagatgttatttgaacattatactgtatatgccattataactataatgtatataatacatatatataaattattgaacactaaaaagaacactttaagaattatctattttattttttttattatactttaagttttagcattaggagaagtatctattttaaataaagctatttcactcttcagtttccatctcaagaactcataccaatttaaacttccactcatatttgagagttgagaaaaattaccaaatgataataatatattatctaaaaaataatttaaagatgcatgtctctaacaaaactatgtaacattctgaagggttttaagtaatacttcatatatcctaattcagaataaacttagatgttatcagtatgaaaatatatcataaagtaacatgattctctccaatgaagatgtaatcatccaaactttatgcgttgaatttacggcttagaaatgccatagcaatatgtcctcttgaatatacaattctatatactgagatttcacttagtatattaagttctgtatcactgaagagtatattatgattctaattaacaaatacaattctattttatataagtacccctatcatctactaggcaaagttagctgatgttactatgcatttttttgtcagctgtactcaacttataataactttgtattccaaatacttcaaaattgccatatgcttactgttttcctattcacatcattttcccccctattcttcctgaccctcctttgagcaatagtgtcagtgggattagactcatgcattcacatactgaatgaatgaatcagtatgtgattcatgatatagaaaatttaaattccttatatatttcatatatcatatatatgatatatgtatctgtgcatataggggatattaaacacttctctgtatatatctgacatatattttgaaaaggaaacaccgtagggccaagttaactgcttcaattattacttagtgtaaatgcattcagtttgttctgtaatttcaaaatgatacatataaaaaagtagagtttgcatgtttaatacatctgaagctacagtttccaaattctgaacactttggtgacccccttgacacaatgaatatttggcagttaccgaacataacagggcacaaataatatagttaatgaaaacatccataattatttaaattaggctattttaagaaaagttttaatttgaacattaaacagcttaaaatcatttataataattgattatgtaacatgctggtcattaaaatgagattggtattctctttttttttttttttttttttttttttttccgaggtggagtcttgctccatcacccaggctggagtgcagtgctgcgatctcagctcactgcagcctccgcctcctgggttcaagggattctcctgcctcagactgccaagtagctaggattactggtgcccaccaccacacccggctaatttttgtatttttagtagagacagggtttcaccatgttgaccaggctggtctcaaactcctgacctcaagtgatccgtcagcctcagcatccgaaagtgctgggattacaggcgtgagccaccatgcctggccaagattggtattcttgacattaataattttggtaagcattaagaaggcaaaacatggaagcactcacaataatgtataggatccaagtaaaattctccttactgaaacatgaaactacaaagccatgtgcgcatacttttaatttttaagatttgtttgaaggaacttttgtgaatgacaagtagagaaagtgtggatagatagcatctctgtctttaaaattatttgatgaaataggtgataagaaacacaaaaattaataattcatgtgacctttattacaatacgtcttctggtattagcatagtaataagtattagtgatttacataattggagagataacacaaatacaaattatgcacacacacatacatacatacacgttcctgtgcttcactcaaaactgaacagatgttatttggacattgtactgtgtatgccattgtaactaaagtccaatttgttagagatagtattgttattttattatctttagtatcttcaatgagtccattatgaatagtagcattaactttgcttatgactagcttaaatagaactttggactccataaaaatacgaacaaagatttttaatggctttagaatacagaagtaatctggtaaaagtattcttgattttaatagaaaccaaacaatcaatgtgcccgttagattaacagtgaataatcagattgttccagctcttcactaatgaacaatgctgaaacaacattctctgtaggtctcctcagatagacatatgagaacacctagaagtggaattgttacctcattagagtattcacatttttaattttatcatatattgcaaattgcttttccaccagcagcaagaagtggcaggaatttattattttaatttgcatatccctggttgaacaagttttcaagtttgttggacagatttttccttctgtgagttgactcttcatatatttaccccaattttccgttggattgtttactttctcttaccgattaatatgagttgtctgtatattctagattctagtagagttctggattatatgcacctaatatataagtctacaattccttatccaaaatcttatcgttgacttttcaggagactagtgaaaatggctacttagtggaacatatggaaatcatgagttataagtgtataaaggctaagtgcaacagtctaaagacctggtatcacagatgaagactgacatattgagtaaaccaggaattggctttattacataatgtgtcctttttcttgatttcagaaacccatatatttgctgtttcctgtacatgtttaggaagagtattcagaagagagaatgcagatatattgttgctgtttttttttaaaaaaatacgagtttaattcaattacccatttgattgcttgagtttattagttatggtagcacttagaaagagttgttttagataatgactatgattttggtacagaacctaatagtaaaaacaaaacatctttaattttatttaaagtgcatgtcagtcatgaagtcagaattgaattgctcttttctttgcttttaatgaaaattagcctaatggctgttttatctttaaaaagcaacttctagtgtttaataataacagatttaagtaaatattctgttaagacttaaagaaccatgtccaattactatatggataataacttagagatgctctatattggtttaaaataatgcaaatatcactggccactattcagagatatgtcaaaatcacttttgtttaatatgtgcctttctagtccttagatctactgtattccctaatccttttggggtatataatccagagatattaggacccattcagccagaaactgaaacatgccatgatggttagaattcatcagaaccacactcaaatgaatgttaagagacatagcgtgataaaagtgcatctgaaagagtatatgaacagatgacattacatacaatgttgtatataagagaaaggaaggaaagacattcatatcatgtcatattaattcatgtacactgaaaatacagaccgtgaacagacattctttcatttgttccttcatgtattcaataatagaatgcttctctaccacagatgattccaggggaatttggcaattgctggagatatttgtggttgtcacacatgggggaggagaaagtgctactggcatcttgtgcatagtgaccaggcatgctgcaaaacaccctgcagtacacagggtagctcccgacaagaaataattatccagtcccaaatggcaatagggctgaagctgagaaaccctgattgaaactcacattacatcctaatcgaaactactttgttccgttctgagccgtaggattcatcaaataaaacctactttttattggtacaatatttaaatccagagaccctgtagcatagtaattatgtatgcaggatttgcctcagaaagactagggttcaaatctcagattcaccatatgttaggttgtgccctaggcaagtttctgacctttcgtgactctagttttttaatctgaaaaaatggtaatagtattgctgagaggctctgcaatggagattgagattaattaagatgatttatgttaagtgcatagcagagtgtttgcacttagtcagtttccaacaaatggtagcagtattacctttacatgtactaaatcatttcatcctgacctactatgaaaagcctgatcactttccatattttactgtttttaagataccattgattagagtatgcattgttattttatttttcaccaagaaaaatgtgctgccgttttagactatgacacgctatcatttataaaacgtgtcccaatttcagagcagctaacctgttgaaataaaatgtgagtcttataattgattattgtaaaacacaacagtaagtcttctttgattaggtgcaactgaacaatactatgaccacattcagtagcaaaggcacttagaaggatataggaatatagcttagcaggaaggtagcatcgggtatctctctttagtaggatgagtatgcgtagcaatctctgaagcacccagggagccatccaagagctattcactttgcagcacctgtccactctctcatgacatctcaggtgcacaggaaggaaacaaatcgagatgctgggtcaaccctggcctagaagccttatgcatcccagaggccaatgccttgtaacatagtttccaaggtcctcaaaaaggacatgcttagttacaagaattgttgtacttggggacgccccacaattatggttttccattaggtatttatagttcatatgtagaacacctaaccaaggtgtaatttaccagtccccatcatttttttttttaatctgaagcaatgttgcctgctcacacatttgacattccaactttatcagttttctagggagaagggagctagaaagttgatcaaagtacaaattctcatacagatggacaaagggtgtttttaaccctttactcacagtaatatctgttagtttcatttattttatatttaaagatactgaaacctgaaacttagagcagttaaatgacttgccccaactcatgggctaataagcctagaacccagatgttcttatttctagactgattatttccaacaacactgtaatatcctaaagcaagagtcagcaaactatggtccaagggccacatttagtcctccacctattttcagaaataaagagttattggaacacagccacatttatttgttcatgtattagacctgactactttcatgccacattggcagaatttgagtttggcccacaaagtctaaaatatttactatatggtgttttatagaaaatgtttgctaacctctgctctaaagtataattacaaattggccaggtgcagtggctcacacctgtaatcccagcactttgagaggccgaaatgggtggatcacttgaggccaggagttcgagacgagcctggccaacatggcaaaaccccgtctgtactaaaaacacaaaaattagccaggcttggtggtgcatgcctgtaatctcagctactctggaggctgaggcacaagaaccgcttgagctggggaggcagaggttgcagtgagccgagatcatgccactgcactccagcctgggcgacagagcgagactgtgtcaaaatagtaaataaataaacaaataaattctaattataaattgtttaactctttctatgagtctatataaggagtttatagaaaagcatttgtttctaatgtttgattattaaaaatacccctgtattttttattttattttaattgacaaataataagtacatatatttatgaggtacaatgtgatgttttgatatatgtttacattgtggaataattatgcatacttgaaggattttagagccacagagcctgaacctaaccgtttctctacatcagtgttggccaacttttttctttaaaaggccaaatagaaaaatttcagtcagtttttgaggcttcatgggccatttggtctctgttggaaatagtcaattcatgctaggattggaacctagataaccagactcaagagcccatactcttcaccagtaaggacttaggaaggcagcaagacctgggagtaccagtttaaatgaatgttcttctaagcagtgtcctgtgctgctattaaaccagaccagagctttggcccttagttaagaactgtatgtataaagttttccaaaataatggcttcaggttttcacaaagtccttccatccaaacaatgcagattgtacccccttaagaatctgttcttaactgccatctgttctctgcattcttaaagtctaatcttaatacagcagccagaatgatctgtttaaaaataagtcagatcacatcactcctctgctgaaaactctcctatgcttcctaatctcactcaggataacagccaagatccttccaaagatgcaggacctatcctcctccatccccaactctatgactatcattcctactactctccccttgctcactagattccactcaccctggtgtccttttttttttaattgaacatacacatacactcctgccccagggcctttgcacttgctgtctctgcacagattgttctttcctgagatagctacttgaatcgttccctcacttccttcagatctttatttaaataccacctactcagtgaggctttccctgcaggcactttctaaactctccacatgccacctccctttgccccatacctaagtctcttattcctatccagtgctttacattttgttctttagcacttttcactctccaaagcaccttaatttctcttttactacacattatcaccattagaatgtaagttttatgaggacacaaaaagtttgtctgttttattcgctgttacatatctagtacctcaaacaatgtttagcagacaataagtaatctgtcaatatttatggaatgactcaagtgattttttggaagagttttggtaatatttcatttgccaaaagaattctgccaaaaagactttgaaacccccactttaaggtggagagcttccatagaggcttctggatgttacttgatggtcacacctatgcccactctttcactggccttgaacatttcaagtatgcagcttagtagattatatcttcacagtttcacaacactttccagtttaaaaatcaatgctgcattatgctttgtatatttggacagattatttttgaaatccataaatctctaagttttttttttttaagtctccctttggtgagctgcccttgattagttcaaaatgggaagagagaacctgtcattctttgtcaatcaggttggcacgtacttgacagcatgcagttatagtgaaagagagctgtgttgcagtggtctagcaaacctaattgtagttaagtaaaagaacagtcacccaacatgagaggaaagacaaagaaactcaactgaacaatgttgtgtttttccatccatcagccttcatttgtcagagtctgactgacaatctggactgcagaaatcaggctctaacacaatattgattccatttcatattttgtttcttgctacactttttagcaaacagtttctgtatggaatgagagatagtgcagtcaatatatgcgaccagggcacatttatattaaaggcttactttggtttttttgtcccagaaatcacatattgtttgtttgttttactataatattgtaattgtcagctcttgctgcagtaacaaacaatgacaaaattccagtgacatataacaacaaacatttattactcactcatgtgtctgcagatcagctgcagctttactccacactatgaatcaagttaaggtcttttcattctagaatatggatctgctctaaatgtcttctcatcccaggaccctagcggaaagagcagcttttatatggcatattattctctcatgatggaagataagaacaaggggaaccagcaaatcttgaactgcctttaaagttccagctaagagctgccacacagtcccttctgtctgtccatggtctattggtcaaaggtacacagtcaagcccaaagtcaatgggaagggaagtatattcactgcagggcagccatattaagagaggaaatgaataataatgaactgacaaatcaaccatagtatccacaaatgtcttaggatttcattgattcccaaatgcattttttagtatttcaacacctctgaacttgagatatatcgtacaatagataatgtttacaaagtgtaggtttttttgttttttggctttcttagtttacataacaatagtggcccttatcatcaatgatagattagatagaaaaactgttaattgtggggttgacaaaatagccaaatggtagaaggcactccttataagtaagtaagttatgagtgggagctaagtgatgagaacacatggacacatacaggggaacaacacacaatggggcctatcagagggtggaggttgggcggagggagagaaccagaaaaaataactaatgggtactaggcttaatatctgggtgacaacataatctgtacaacaggccctcatgacacaagtttacctatgtaacaaacttgcacgtgtacttaaaataaaagttaaaaaaaattaagtgaatggacacttaatgtttacaaaaaagttgtcatttttatcttgaatttcttttttctgtagcaatatttatatctcattcagatcagcttatttgattagaaaaccaagcattaatagtagatcttatgtctatttattcacatattcatataccttcatttataaatatatattcatatatatttagaagatcaattggaaaacataagtgccattcccttatttaaaactcttgtagcttctccactacagttctgagggtggtatacaagatccttcttttctctggcttttgctttctatttctactccattacttcccattcccctacgtgatagctccgtacttcttctgcttcctgtctttgcatgttccatgttccctcttggaatacattctctctgccgtccatccccttataatgaggtgcatgagctgtttctgctcccagcctttctgtcctgaccttcttgtctatcaaacacaaaagtgatcagttcctgctctgtgctccattatacattgcactttactagttgttatacctgacctgctctaaatgtagtatatatttgtgtgtctgcactccccattcctaccccagtgaaacatagtaagcactgaataaatgtttgtcgaatgagcaaataaataaataaataaataaataaatgtttgaacatacatggaaaggttgtttatgtcctccttataatgtgctttgagatatatattcttaatatatatataatcatatattctaaggttattagtaggtaaaatgaaaatttaaagaaattgagtacaagaaaggaaaacaaggaagaattttttcctttttgtactatttctaagaacaccaaatttctagttaaacacacgcacacacaatcggcatgatgtagaattagaaatatgttgaataaatcaattattagaaaatgtaaatatatattaatttgcctctgacttgctacttttaccctcaagggttttttttttctacctcttttcatcactaatctttgcttcactgcttgtcagatcagcaactgcccattattagtaatgccatttaataagagataaataaaagtaaaggtgcttagagttactccatttcaaaaacctatcagggctggatttcagaagagaccatgaaattctcctactgttattgaaccattactccctattacctaattaatacaagttattttcttaaaattatacctgacattgtagtgaactatcaatactatgaagaaaatcaaactctcctcgtatcataaggatcttaacacctggtacacaatcttgcattggaggggacattaagaataaggcatggaggaaaaaaaaaccttaatggaaatgttctgttattagaaatgagactttttggtggaaatcccatgacgactttcttgtctgaatgttctttgaagttgaacactttctccttacacaagccggccactataattagctatgtttccattttagtggtggccttcttcaccttatctgaaatcatataaagatgtgaggccatttgcgagataaaaggtttgctcaaaccagttctctgacctggatatcagaggtttggcaatcataaacccactaagagaaaccctcagagctattacaaggctatgtaaaactttatttcattttttgtgagaagggacaggattttctctcatttatattctggaagaatattgtagaatgtatttgagttcaagaggaggagaaataattaacataatattaagaaacgtcaattttggaaagaaataataagcatatatgcacatgtgcgtgtatgcacacacacacacagtatacacaacagattcagaaagaaggaaatagagatttggtgacacatacttcctggatataatctcaactctgccatttgcaagccacatggtcttggataattgacctaatctctctcaattgcagcatctgtgaaattagataaaactttctttgtaggagtgtatgtgtgtatgaaaagcacagtgtttgacatataataaatgttttagcaactgtagcttgttaatattatcacagcagttaatatcactatagcagttagttgccattttcagcacagctaataattttagtagcattttctgatctttccatctcatgtggtttctttggagttgtttcttgctttgttttttagcttttctatgtcacattttatttgcatggagaaataacaaattttacaatttatttcacatattctttaatttttaggataattgtcagtttcttacagtttattttccttatactcactgaagaaaatatgtacgaaagaatattttcagtgaagttaattggatttactacagttgacccttcaagcaatagtatcttgcccttaataactgacctatctttgaactaataaattcaacctgcaaataaatgtagtgaggtaaattgtagaaatttatcttcaaaatggtctttctaaagtgatctatcaaaggtgcatttaattagaggtccagttctccaaaaatgtgccaaggaaaagtagccacaaagaatttagagctgaaatgaattctttcacccattgctctgtttctatagaactgagaataaatctcatatgggtacttaaaatctgtactatgtcattgaaggatgaaaagatgacaatagtgatgatagaaggacacggtaataggaaacatttcaatagagggaaatgatgtgagtatgcaatgttcattcaccagaggactaaatctagggctattttggtgacttgaacagggaatattctacttcctgcaagtgaaaaatatggacatttcatttggcatgccacctgctcttcagtccatcatgtagcaagcacccacttagtactttggagctctaagtaatacttggactactcaaatgccagccttgttgccatttctgtttattcgccaataacaattttattaattaaaatttgtatgtggatgtcttaaggaaattccttgtagttgtcaaagcagactcctgatcctatctatctgccagtgccttctgagtagtggtatctattcttcatgatttttggaactatttatgggtgattgaagaatatggagtggatagagaaggatgctagtcatttggctgcacacaagaaacacagatgaaatttttgactatttctgttcattttctaaaggtacagaattttcactggattgtacttgtaagcaattttaaaggaagaaatatccagccttttgaatttgttacagtgttgcaagacttttttaaaatgttaagaatttttatcatataggatgaattaatactctcataattttaggtttgtttcttccataattaataactatccttaaagattgtgtgtgtgtgtgtgtgtgtgtgtgtgtgtgtgtgtatttcttgattttccagagcaaacgttcccattcatttgttttactcaccttgttatagttgctcccattgtaagatatatctagtaagtttactgttgttacctaaatctgtttgctgaattttaaaaatgggaacatgtagtaaatttgggggaccacgagctagtatttacaaagtaaaccgagaacattggatataaaaccttatttcatttaacctccaatgaaggatatattcagtattattatttgtattatttcttgagcttccttgcttatctgtaatatgtaacatggtggcaccccttttcatataattctctcctcacttctattttgggtttttacatgttcttgtttcagtctcttctgctctttctatcttttcttggttcaactttcttctcttatcctgtggaggcgaatacctaattctggctctatcctcttcagtcactctacaagtatcactgggacaatattgtccaactactatttttacctccaaacctgtattcttagccttacccctaatctgcacactacgcttctttttgcaattactttctgtacatttgcatcagtgttaatcacaggcatcttgactcatgtctccaacctgaaaacattattccttccatatagggacaggctcctctgtcttccctgtacccctagacagtttctcccaagttataaaatcttggtgattctgaaaattttctttttccccatcaagtcctgccagtcctttatccacaacataggaataatacttcctgaacatccgtgctgctcctgtttgttcaataagtactcggacctctaaaggcatttcctatgtttcttccaccagccccttatccttaaaatcttgcctccaatctgccgctagagttatcatcttaaaagagtcaaatcagggttggtatccaagaaatattacaaagtactaagctcttggtatatacaatcaacttgagagaaagagagggacgggaggagagggagagagagagagagagagagagagagagagagagagagagagagagagactttattctgtcctctataacacctgaatgattctgtacatatttatgttaacagagcattgtactacttcaaatccttatacaagcaaaactcctcaccgccttttggcaatggaacttgcttttccctctgcctgaaatagtcttcagtatgttgacatgactcatttcttcacttcattccatttcctgaagagaggagcagtcttctgtgctcacattgcctaaaatagagcccactgtcactctctacttactctttttaatctttcttcatagcatacatatacatatatatacacacatatacatatatatacacacatatacatatatatatatatatgtatacacatatacaggcatacctctgagacactgaaggttcagttccagaccaccataataaagtgagtcacatgaactttttggtttcctggtacatatagaagtcaggtgtacactacactgtaatctattaagtatacaatagtgtatgcctaaaaactaatgtacatgccttaatttaaaaatatgttattgcagtgttcaagctgagagccaaatcaagaatgcaaactatttacaataaccacaaaaaataaaatatctaggaatacatctaaccaaagaagtgaaagatctctacagggctaactacaaaacactgctgaaagaaaccatagataacacaaacaaatggagaaacattccatgttaatggaaaggaagaatcaatatcattaaaatggacatactgcttaaagcaatctacagattcaatgctattcctatcaaactagcaatgtcatttttcacagaattataaaaaactatcctaaaattcatatgaatctaaaaaacagtctgaagagtaaaaacaatgctaagtgaaaagaataaagcatgatattaaccaacttcaaactatactataaggctacagttacccaaagagaatgggacttctacaaaaacagaaacttggaccagtagaacagaatagagaactcagaaataaagccgcatacctacagccatctgatctttaacaaagtaaacaaaaaaaaaaaaaatggggaaaggactccctactcaataaacggtgctgggatagctggctaaccgtatccagaggaatgaaactggactcctacctttcactatatacaaaaattaactcaagatggattaaagatttaaaaaaataaaatctcagccaggtgcggtggctcacgcctgtaatcccagcactttgggaggctgaagcaggtggatcacgaggtcaggagattgacaccatcctggccaacatggtgaaaccccgtctctactaaaaatacaaaaaaattagctgggcatgctggcgcatccctgtaatcccagctacttgggaggctgaggcaggagaaccgcttgagccagggagtcggaggttgcagtgagcccagattgcactgcgccactgcacttcagcctgacaacagagcgagactccgtccctaaataaatacaatacaatacaataaaatctcaaactagaagaatcgcagaagaaaacctaggaaatactattctggacatcagccttcagaaagaattcatgactaagtccttaaaagcaaatgtaacaaaaccaaaaattaacaagtgggatctaattaaactaaagagcttctacacagcaaaagaaactatcaacagagtaaacagacaacccacaagatgagagaaaatatacacaaactatccatcagacaaagatctaatatccataatctatagggaacttaacaagcaaaacgcagataaccccatgtaaaaagtgggcaaaagacatgaatatatagatacttctcaaaagaagacaaacgggtggctaacagatatgaaaaaatgctccacatcactcatcattagagaaatgcaaatcaaaaccacaatgagataccatctcacaccagtcagaatgcctattatcaaaaactcaaaacacaatagatgttggtgaggctgcagagaaaagggaacattatacgctgttggtgggagtgtacattagttcacccactgtggaaagcagtttggggatttctcaacttaaaatgcactgtcattcaacccagcaatcccattactgagtatatatccaaaagtaaataaatcattctaccaaaaagacacatgcacttgtatgttcactgcagcactattcacaatagaaaagccaaggaatcaacctagatgaccatcaatggtggactggatgaagaaaatgtggtacacatacaatatgaaatactacacaaccattaaaaagaatgaaattatgtcctttgtagcaacatgcatgcaactggaggccattatcgtaaatgaattagtaggaacagaaaaccaaataccactttgttctcacttataagtgggcctaaacattgggcactcatggacataaagatggcaacagtacatactggaaactagtaggggaagagataaggaaggggcaagagttgaaaaactaactattagatacggtgcgcactatctcagtgacaggatccatcatactccaaacctcagtatcacccaataaatatataaatgtaacaaacctgcacatgtaccccttaaatctaaaacaatagttgaaattatttaaaaaaatactttgttgctaaagcttgctagcagtcatctgagccttcaatgagtcttaatctttttgctgatggagggtcttgccttgacggagatagctgctgaccgatcagagtagtaactgttgaaaggttggagtgactatgccaatttcttagaataaaacaaccatgaggtttgctatgttggttgatttttttcacaaaagatttttatgtagtgtgtgatgttatttgataacattttacccacagtagatctttcaaaaatgaggtcaaggctctcataccctgctgctgctttaccaactaagtttacagaatattctaaaccctttgttgtcatttcaacattgtttacagcgtcttcaccaggagtagattctgtctcatgaaaacactttgttttgctcatctataagtagcaactcttcatccattgaagtttcattatgagatgacggccattcagttacaccttcaggctccactttattctagttctcttgcaattttctccacatccagtgacttcccctactaaagtcttggaccctcataggcattcatgagggttggaataaacttcttccaaacaccttgtaatgttgatatttacctctttctatgaatcacaaattttcttaatggcatctggaatggtgagtcctttccagaagattttcagtttacccagatccatcagaggaatcgctacctagggcagctatagccttacaaaatgtactttttaaagaataagacttgagagctgaaatgactcctttgtccaaggactgcagaatggatgttgtgttagcaggcataaaaacaaaatctcttggtacatcttcatcagacctcttggctgaccaggtgcattatcaacaagcagtaatatattgaaagagattttttcttctgtgcaataggtatggccagtgggcctaaaatattcagtaagtaaaccatgctgtaaagagatgtgctatcatccaggctttgttgttccctttatagagcataggcagagtctattagcataatcttaagggccctaggatttttggaatagtaaatgagcattgtcttcaattgaaagtcatcaattgcattagcccctcaaaagagagtcagcctgtcctttgaactttcgaagccaggcattgacttctctctagctatgaaagtcctagatggcatctttttccaatagaagactgcttcatctacactgaaaatctgttgtttagtgtagctaccttcatcatcttagatattagcttgatcttctggatagtttgctgcagcttctccatcagcacttgttgctccacctttcacttttatgttacggagagggcttcgtcctaaagcctcatgaacaaacctctgctggcttccaacttttcttctacaatttcctcacctctctcagcattcatacaactgaacagaattgggccttgctctggattaggctttggcttaggagaatgttgtggctgttttgatcttctgtccagaccactaagacattctccatattaacaataaggctgttctgctttgttatcatttgcatgttcactagactggcacttttaattttcttcaagaatttttcctttgcattcacaacttagctaacgggcacaagaggcctagcttccagcctctcttggctttcgacatgccttcctaaccaagcttaatcatttctagcttttgatttaaagtgagagacatgcaactcttgttttcccttgaacatttagaggccatagtacggttattaactggcataatttcaatattgttgtgtctcagaatagggaggcccaaggagaggaagagaggtagggggatgactggtcagtggagcgttcagaatacatacattaatggattaagtttgccatcctatatgggcactgtttgtggcaccctgaaactattaaaatagtaacatcaaagattactgattacccatcaccataacagttataaaaatattgaaaaagcttgaaatattgtgagaattatcaaattgtgacacagagacatgaagtaagcacatggtgttggaaatgttgctgatagacttgcttgatgcagggttgctacaaaccttcagtttgtaaaaaaaaaaaaaaaaaaaaagcagtatctgcagagccaataaggcaaaactcagtaaaatgaggtatacctgtacatatacatacatgtgtctatatatccactcacacatatgtgtatgtgtattatatgtgcatattatacatatatgttgatatgtgtatttatcatatctaatacacatatatgtatatacatgtatatcacacacatatattcatattgtaaattgaaaattttctagtgctgtatcccaatctctagcttataaatatattgaatagatgatgcagcaggtatcttttgaatacgcactccaattttagaaatataaatcttttttaaaggttggaataatataagtagtttggtgttcagtgcaaaaggttttaatgtataaatactatgaaaacaaaagttagatcaaatgtatcaaatacaaatgatctgtattgggggacagagggacacattaaatttaagggaatatgaggagaatattgacttcctatgctcgatgagtgaaaaagaaaagtgaagtgggagtgtttgaaaggaaagatgagcttttccatgctagtacatcacaggttttaatactcatagaagtttttagatttgtataggaaatatgatcctccagcctttccaagtttactcttctactggaattacaaatcaaaactaataaatgtttactatgcttcaagtgcaatagttataaagtacctgattagaggtcccacattcagatgttggttatataaaatattcatgctaaatcatataaatgctaaaacatttgtatttgtgatgttctcttggattgctagatggagattaaattatacaaattcagctaagaagaaaaatgtgggataaatggaattttagtttaaaggaagtcaatgaaaggattaattaagtataaaataatcccattttaatttgtcatagaaatgagttttctgagacattgttgtaatcaataacgtgaagatgtaaaattttgcaaaaaaaatcattacgggaaatccaaaagcagaagagtagactctgtatttaactctagcagattatttagaaagaaaatagtctatgccatgaacctttcgactgtctgcgtgaacaaatgtctctagtaatacacactcttaactcaattcccataggctcaaagttgcaacagtatttatttgcccgttcaacggttttttgtttagcacttactatgtgttaggcacttccagggatatgagtgaacaaggtagttatgggtcttactctcatagaggataattctttaggaatggtcaaaactatacatatacacataatgtgattaattgtgatgtgttttgaaggaggaagcaaaggagttggaacagtttaaataagactgtaggttggcagtgggaacaatggtctttgctatcatttttcaaaaattccaatgaatgggaatgacgactgttgcattaagttgcctgtctccctctgacccatagtgattctctattatcagagaggtagggcatgtttttcagcatatgtgataatatcaaacagattcagatggtgaaagtaaaatttcttaatgcttagaaataacataatttgatcaaatcatttggatatgttattaagttgttgtaagatatgaagacgtagctgttactactgccaatagtataaactttggattcagacctagctgtgtttgaatattaactctcccacatcccacgaggttgtgggcaagctattcacatcattgtcactaccgtcactactatcccacccacccttgcttcattttcttatctgtaaagtggcaatctgttggaatcagggttggggaaggcaaatagtagtcattatacgaatggtaactatgctatcatcaataatatagtctacagctatgatgaagctaatcagaaaacattgtctattaccagtaattagctatatcaataactatcacaagaaaagtcccagctgtcagtgaataaatagaaaatagtgctttgtcttagagaaacacatacaaaatgaatggtggtgacagtgctttaagttaacttgtcagtttatatgtgtaatgcatatataatttcaaatgtataatttagacattgtacatgtatatttggcctggtaatttatggtatacataaatgataaatgtataggttgaaaattcagttactttttttccttttcttaaatcatttttaccttgctgaagatatgctcttttctctacttccttagaataatatattttattttctcttaaagtattttgagaccatatcaccatttactacaccaaaatgtttttttgcaaatgcggtattcaagggtgaatttatagtggctggggacctatttggaattcagtaagtaaaactagattttccttattcctcatctgagatcagagctatttctacctctagcaaagacatacagtcattccgggtgctgcattttcagggaacaatgtgttttcttggcaaggggcagtaagaccatcaattaatagttcttcatgtaaagtagctaaactactgttataaaggaagtgaaatttgcatacataaccattaacacatgaggttagttatgtacaattttgaccaaagtgcctgtttgctgctggtatttattataataagaactggaaaaaaatagtctatctcaagagcatgtgctgagcacccgtaaattgcaagagactgtactgggcagtatgagattatagtaatttgggatttcctactaatgaactgagagggaacaggtacaaacacagtatacgaaggaaacagtggcacggagacacttaaacacagcagtgctgggaggctccggggtaggggagggaggaagagagatacgggttaatcaggagctgctctctggggaagattgcccaggccctgactgatgcctgacattgattaattgatactctatcctagtgtttaacaagtgttccatccaaaaagtcttctgtaatatttaacttcacttccttcagcttcaatttctgcacaattcttttgtcgtctcatcaagagagctagtcagcagacagtaacaaaatgcttatattcatatacctgaaggatttttttttgtcatgcttcagccttctccagactgaagaaaagcaaataataaacaaaattaatcgttcttcagaaggcctgtttgactcattaataaataataagctttgatactgtgctttaagtgtttaccctttggaaagaaaataattttgacagtgatgtagaaataattatttgatatttatttcaaaacaaaatttatatccaatactaaacacagaattttgtaaaacaataagtgtataaagtaaaatgaacattaggattattgagattattgtagctaaaactagtgtttattcatataaattatgttaataaattgtattgtcattattgcattttacttttttgaaaagtagttaatgcctgtgtttctatatgagtattatataattcaagaagatattggatgaattttttttaagtttaatgtgtttcacatctctgtttcttttctctgcaccaaaagctacatttttgtgcccttatgtaccaggcagaaattgatctgcaatacatgtggagtctccaagggtatatttaaatttagtaattttattgctaactgtgaagttaatctgcactatatgggttcttttccccaggaaactgaaatagcagttcaagctaaacaaccggatgtggaagagattttgtctaaagggcagcatttgtacaaggaaaaaccagccactcagccagtgaaggtaatgaagcaacctctagcaatatccattacctcataatgggttatgcttcccctgttgtacatttgccattgacgtggactatttataatcagtgaaataacttgtaaggaaatactggccatactgtaatagcagaggcaaagctgtctttttgatcagcatatcctatttatatattgtgatcttaaggctattaacgagtcattgctttaaaggactcatttctgtcctggtgtgctgccatcaatacaaaagtagtcccaccttcaaggtagattaaattctttggggctttattgctttgcttgccagccttgatgcttttcatattgtttggtttaattcaaatcaagctactgcatcatagtgtctgtctccaacagctgtaaagaatcacaatatggtccgtgacctttcttttctttgttgctctttcttataaaagagtaaaatcggcattgaggcttcagtattttattgggtcaagaatttttagtgaaatgtcatgtaattgcttatttctttggcaaaaagctggcctgggataaacctttctacttttttttcttctccatatccatgttgaagtctaggtcacatttattcacaggctattacataaggagggagatggaaagccaggtcagttttcaaaaaatagctaatcaatggcttccatttgcaaatgagagtccagtgctaaatatacgttagcagtaggttacctgattctctgtacctgaccagaattataatggctcccattatgatgaaggttcctgagatcctgtaatcatggctgtttattgatcagtcttggtttctcagttaatgttgcaggcttggatacaatgaacctcgtcctcatgtttaaaactgcttgaaaacagttcaggtcaataacctcattatacagaaccagtttgtccttgcaaacaacattaccatgacttagattctgtctctaaggtcgctgcttagtttcccttgcgcttggcccaagcttcatttctagaagattgtttgttttccttacagcttacaagagacttttccttaggtagagttgaagtttgcacctgagcttaatgtccaaacaccagacactgaaaatcacaggtttctctgtagatatcaacatacttttattcagaaatatattgcaaccactccaaaaatctagaaaagtagtttgtatccagttcaagcccagtataatcatttttcataagctaacaatgtgctcagtatttagttggaagagctaggcaaagtcctgaaagcagcaaatttcagagtttccgttgatgttctgaagaaagccagccctcagagcagttaatatggtgactttcattgtagcaagccatgcagtgcacaaatggacaattgcatacgtttctatctactctttgttgatcctcaaagactttatgccttatggtgtatgactatgaattaaggtttgtcactaattgttagagatcacaaaggtacatgtaatttggcttttacttttgtgcctttgtaaaagagagagagagagatcttaattaaaagccactgagaaaatttttgctttcattatgtataaaacaatccaaatgcttgatgctaacttatcgcacctccacccacacactcaactactgggccacttggagatcagaactgggatctgccatgcctgagcatatctgcttcctgctgatgcattagtgatgtaaaaggagaattacttttctgaaataaaaagaaagaaccaggagctgttgctttccttctctttcacaacccttaaaaccatttttgtagcagacagcactgtttttttccttcctttttttttttctccttccctgtttccctattttctctcaatttgacacattgggagaagctgaacttaagggaaaatttattcctgtcttcccatttctcccttggatttggagaaaaatcaacatatcaagttggctgggcatggtggctcatgcctataatcccagcactttgcgaggccgaggcaggcggatcacctgaggtcaggagttcgagacctgcctggccaacatggtgaaaccctgtctctactaaaaatatgaaaatgagccagctgtggtggcaggcgcctgtaatcccagctacttgggaggctgaggcaggagaatcacttgaacccgagaggcagaagttgcagtgagccgagatcgcgctgttgcactccagcctgggcgacacgagcgaaactccgtctcaaaatatatatatatcaagttgataggggcaaaaatgcaagaatgatttgagaattatggggtttaaaaaaatagttgactcacgcacaacttttgctgtggaccatgaccttggaaacatctgaagattagctggggtttgcggtagcctgaaacacctagaggctcaaaaaatgacctcacagttttgaacatgacacccagcaatacaaggcagaaagctgtgagggctgtttaaatctctgcatggatcaaaaatttatttttaaaggttagagatgatttttctgaaggacactccattgctctgatagaacgtgaacaaagcctttttaaactttgagtccatatatcaaaatttaaaatttgtcctatttataatgcctcttcttcactctgggtcttgttacctcttaatagaagaggaaatgagtctgagtagcctgcagcacattttcatgagagaattgtgtttctgtttttgttttttgggggaggtgcatttggaaactgtaataattatgaagaaaatgatattctttaaaaagaaaatgaaaatctctcacgatgtatatgcaagatctagtatttaaatgcataattagtgtgtccaccgcttacaaacattctaattaaagacacatcagggagcaattctgtttcttaggaaattgacttgtctattggcacctccgcattctgcatcagacagcctgtctgtccagctcctacgctcacctcccaagctgagttctgattggaagctgggttcatccctgctcagtttctttcctctttcttctttccttcacttcgtcaacttctttaagatttcttttattttcaaagatggtatatttctggtttcttttttaaaatctctgactaaccaacttctttattttctttgaggacttcctgtaaaaggtcaaatacatattatgaaatgataatactaatgacgtataggtagtactaatctctgctgcaaaataactggaaaaatcttaggatcgtatgatcaaatacctctccatctttgtttagcacttcaactctctttctctctctctgtctctctctctctctctctctctttccctccctccctctccactctctccctctctccctctctccctctctccctctctccctctctccctctctctctctctctctcccccttcctcccccatctacacacatacttttatttatttgtatgttatttcttcatcttaacttcagaaattactgaagactgactatatgagttatataaattgtttaaaattttgctaaagttatagttttggtataatatattacattaatgccatagatgaaatagtctttaatgtgttccatttttccacacagtaataactaggtcctcaatagcaccccatttagcagtttaaaagcagcaaaaacaactgctatcagtaacaacaatataaactacaaaagaagccatttgttatttgatttttattataaaattgtatttttaactgtcttgagcttaagcatttaggtgccattttcttgtattcatactcatttttaacttaagttggaaaactacactttcagttaacttttaaaaatatgtttatgtactttcaatgcttacatcacctgccatgtattagaactgagagcattaatggaattttaaatgtcttggttactttctaaagtgataaaatgaagccagctggtttgctttgctaactttttatattatcaaaaaatgttacttacacaaacctagtaatatgttttacttactgctcttgaattatttttcaatgtaacagaaaaaggtgtgaggaactttctgtatttggccaaagcgttccatcccaacctttaacacaaaataattgctgtagacaaatggtcaagagggcaattataatcttccaggcatcatttcctcagatatgaactgcaaaatgacagcatcattagtcattttcaattacagtcagtcacaaccagggatgattcattttcccagctgttttgttgttaattaactagatgaagctgtttttttttctcccaatgagtttgttctactgccaacatcaacatcttaacatttttaaaaacttccttagggtttattttttgcctaacaatctttaatatattactcacaaaagatgtgcatctcaagatttatccacggtatagcaggtcaaatggtatttcattggtcgaaatgttgccgaaataaatataattacacttaaaacaatacttggatttcataaatcatctgccatgcgtacaatctcatttacctggtgtaacttcacttgtagcaacagaaatcaatagagagataacagacaaaaattgtcccctgaaatgaacaagtctattttgactgactcatttattgagcacaatttccatgccaataacaccagaataagttgggagaggacttctagaaagaagataacaatattagaggcatttaataatttataagtaaatgcatagcaacattttatttttttaaattacaagtttgcgactgggcgcggtggctcgcgcctgtaataccagcactttgggaggccaaggtgggcggatcacaaagtcaggagatcgagaccatcctggctaacatggtgaaaccccatctctactaaaaatacaaaaacaaaattagccgggcttggtggcaggcatctgtagtcccagctactcgggaggctgaggcaggagaatggcatgaacccgggaggcagagcttgcagtgagctgagatcacgccactgcactccagcctgggtgacagagtgagactccatctcataaataaataaataaatacaagtttgctttacaactgaaaaaaaagtcttggagtataagaggttgaataaatgctaatcccaatgcataaacttgaggagagcttcactttcccaatgagaagagaaaaaatttataatagatttttgggcaacttgtaaacataaacatttagaaatatggatgagattgtcaaatgtctaattatattcaatttcttaattgagtagcatttccatatttgcagtcttacattttataaaataacacactcatttagaaatacctggcacatttatattttatgaaacaatttcattcaaacccttcgtatgtatattctagaattgtagagctcatcaccttgctaagttatttgtaatatggcattgtttgaatccctacataatactctgaaagccctctggccaagattacaagcaacatatctgtaatcaaaaaattaagaatatttaccttattgcagcaagagcgtaaaacacttcagagtgtgggcatctcagtaagagggcattggaaaaagcttcttacagagttcagctggctgcatgattctaaggaggaattcagaaagtagaagccatttctggattagatgctttcaagaaacagagtcaatgtagtgattaggtatcttagtgtttatctagaagatgagattaaagtagggctagacacgtcgttggtaaaggagcagcaatgcctcatattagtcatttctgtgatagcagaaaggccttgtctctgtcttgtttcaaacacggccatggggtggccttgtgtctgcctagtttatttctatgagtgttttttaacatccagctgggaccatcatggcctagctagctgccagctgccagctatcagcagagctatttttcacgttctcaatgctgtcgctgaaatttttatcccaaacttcaatacccattcacaaaatattaggaaaactgtttttttcatttttcttagatatgattttggttgtttgtttgtttttgagacggagtttcgctcttgttgcccaggctggagtgcggtggcgcgatctcggctcaccgcaacctacacctcccaggttcaagcgattctcctgcctcagccttccaagtagctgggattacaggcgcccaccaccatgcccagctaattttgtatttttagtagagatggggtttctccacgttggtcaagctggtctcgaactcccgacctcaggtgatcaggctgcctcggcctcccaaagtcctgggattacaggcgtgagccactgcacccagccagatgtgatcttttaaaaattcccaatagactaacatattctttctgctttttaagttgtttggctttttaacaaattctttgaaagactcgtttacaatgatctctgccacgagtgattgtgaagctatacattaggaatgattgctaaagatttatcaactttctttgcctccctttttaattaagcaaattctgtcagaatacttatgtaagcatcacatctcttgaggttatttcaggctaatatacaacattgtggttccgaataaaataattgagacataagagatagtataaagtcttgaatatgagccaactttcttttctgagagaatatttgagtgaaaagtctcatgtactcagtagctcatgctgaaattagggaagcattttagagatttgaatttcacctcttgtcctcagttgtattagttacacttaaagagagagacaaagagacatagatgtttcagttacaatattcgaatgtatgcctgtatatatacagccgtaggtagagtcctttatttattcagtagatattaattgcatgccaaccattgacacaagatatatttttaaattttgaaaatctcaaactcaaatagagtttaaaactatattctagtttacttttttaaacaaatgattttttatgattgtattaaacaaatacattatttttccttacttattctacatcaaataatatctatttctagaaggcttttttccttgtcttaatgatagaaaacataaaaatcatttaatattttttaaatatccaaaaaatatgaggcaagaaagcagccacaattgtagctaccttaggaaacttaattaaaaaatttttttttatttttaattttatatgtgtataattgtacatatttatttgtgcggtacaagttatattttgcttattttttataatttcagtagttttgggggtataggtggtttttggttacatggatgagttctatagtggcgaattctgaaattttttatgtatccatttcctgagtactatatactgtacccaataaatagtcttttatcccttacctcactcccaagctccccacttagagtccccaaagtccattgtatcactccgtatgtctttgtatcctcatagcttagctcccacttacgagtgagaacatatggtatttagttttccgttcctgagttactttacttggaatagtggctgccagctccattcaagttgctgcaaaagagattcttttttatggctgagtaatattccatggtatatagataccacattttctttatccattcattggtcgatggacacttgggttggttccatatcttgcaattgcaaattgtgctgctatttttgtgctgctgctttcttttttgttatttccttttctggttttggtattagggtgatactgacttcatagaatgatttagggaggattccctctttatcttttgaaatagtttcattataattggtaccaattcttctttgaatgtctggtagaattcagctgtgaatccatctggtcctggacttttttttggcaatttttaaattactgatattcaaccttgctgctcgttactggtatgttcagggtttctttcttttttttttttttttttgagatggagttttgctctttcacctaggctttagtgctgtggcatgatcttggctcactgcaacctccaccttccagtttcaagtaattctcctgcctcagcctcccaagtagctgagattacaggtgcccaccaccacgcccagctaatttttgtatttttagtagagtcggagtttcactgtgttggccaggcaggtctcgaactcctgacctagtgatccacctgcctcagcctcccaaagtgctaaaatcacagacgtgagccaccgcgcccagccaaagcgttcagggtttctatttcttcttgatttaaactaggagggttgtgtgtttccaggaatgtatccatttcctctagattttctagtttgtgtgcataaaggtgttcatagtagtagtgaatgatcttttgtatttttgtgatgtaggttgtagtgtttccagtttcatttctacttgagcttatttgaatcttctctcttctttccttggttaatcttgctaatggtctatcaattttgtttatcttttcaaagaactatttgtttcatttatattttgtatttttttgtttcaacttcatttagttctgctttgatctttgttatttcttttcttctgctggatttgagtttagtttgttcttgtttctctagttccttgaaatgtgacattaggttgtcaatttgtgctctttcagaatttttgatgtagtatttaacactatgaactttcctcttagcactgtttttgctgtatctcagaggttttgataaattgtgtcactattaatcatttcaaaaaatattttaatttccatctcaatttcattgttaaccccaaaatcattcaagagcagatttcttaatttccatgtgtttgtatagttttgagggttccttttggagttgatttttagttttattccactgtggtctgagaagatacttgatatgattttgattttcctaaatttattaagactttgtggtctcttgtatgacctgtcttggagaatggtccatctgctgataagaatgtatattctataattgttaggaagaatgttctgtaaatatctgttaagtccatttgttctagggtgtaatttaagtccattgtttctttgttaagtttttgtttcagtgacctgtctagtgctgtaaatggagtattgaagtcccccactattattgcattgctgtctatctcatttcttaggtctagtactattgttttataaagctaggagcaccagtgttaggtgcatataaattgagtactgtagtaaatatcttcttgttggactaatccttttatcattatacaatgtctttctttatcttttatttacggttattgctttaaagcccattttgtctgatataagaatagctactcctgcttgcttttggttcccatttgcatggagtatctttttccgtccttttaccacaagtgatattttgatacaagcatataatatataatgatcaaatcagagtgattgcagtatctatcaccttaaatatttatccattttaaattttaaaaggaaagctatattcagaaatcactttttcttgtaactaattcctgttcttcataaagcagaaatttcatagtttgatatagttgtcttaacatttaatgaatattttcaagcaaagtatatacaatggagaataatgctcagctgcaaaagtcacctataataaatctgatttttccatttacaaacaaaagaattcccaaagtttatccattttggtagaacacgaattcactctgttgagtttggagctcttgtgcggaaaaccttggacctgcaatttagttagcatattcaaagttttaaaattatggagatgtagtcaagaataggacttgataactattatcccactgatacgctatttaaataagttgggatttaagtacttatttgatttccttaaatttgcttatagatgattaacatgtattgcaaattgttaccttttacagatttctattgagcactgcttaaattttattatatgatgaacacctgactagttgctacagccaaacattttttgttatgcaaatgaattttacagcttaattggaatgatgagagaattgaaaatatgggcaaatgccagagaagtgaaaagcaaaatgaagcaaaacaaaaaagaacttgtataatatataaataatccatttcaactctacagtacaccaaactcttgaaaaagtagcaagattgtttttgtgaacagccaaatcaaaaactgtagtcatttcataagtatttgctaataattataaaagattggaaattatacagttctgagcttattgaacctttgacccattgcagtgtcctcagacatttgtgatacattggtagtgccatttaattttaaaaatccacctctacattagagattatagtaacccctcatttacctatctggaaataagagtgggaaagataatattagagtaaatggacagactatttagagtttatgtattaataaaagagaaattgcatgtacaaacatgttattttctaggtaactaaaacctagtcctttaataaagcactgaaaaaaattttatcgtaactattttaatgagaacttttcttgaatatcttctgttttgcttcattgagcagcgcataatatctaaccaacaaatttatagtgctttgtagttcacagcatttttaccatataaaatatctcgtttagtttctccaacaaagctatgagttaggtggtattattatatccatgtttcaaggatgataaatcttagtgacccatctcattttccaaggatcacacaaccagtagtagtgaattaggaacgaaacctaagacttctgattctaaatcacaatgtaaattaacttttcttaattttcaggggtgtcgttatcacatcaatttttgctctgtttagtgatacagtgttatatgaggaacatgaaattcaaagcaccctttcttcagttgagacccagttgaagtggttaatttgcttttagaagctagactgtaagataaatacatacctttaagtattaaagctaactcaaatcactgagatacttacaccatgagaagagagtggaacctaagtcaactggtagaaacatagaaacagcaaactttgatctctctttatcctcattctgaggggcaatatgcttactgagtggaaagatgggcatacccccagcagtatttaaatcaatccctaatctatcactatctctccttttctctctatctcagcacatataggtgatttcctataaattaaatggtgtaggatgagatttcatcccatgttgaaaggtcatttcattgataaatgactaagattaccacatttctcagttttaagtttttcatgttcattgtctcctattgctactttctgttatcagaatgattacttctcattgcttttagtattctgtctttgtagggttacagaaacttcacagggaaaccagaagatcaaatatattactcactagtctcttagaatatttaatttttagtgtttaggttctgatgtcaggacaggaaaatatcttccgtgagtgatgacttccaagggtggttttcctgactaatcagaggcattattttttgtttgcttttgggttcaagactgatttttaataaataaaaaagttacatttattgatatgctagtaaatatttacatcatgcattctggataaaaacattgaaagccttgatttgacttgatgtcagacacaatagacatagtctcaagagcactgatgatagttaaattaggaagtgatgaattcttactatatattatcttttgttcttagcacagtttattttatatttataaaatttaatttatattaatggttatgtttaataaccgattagcaaaattactgaaatgtgacaataatatctctattcctgtttctttcctgctttatccttttaaaatatattatttataagtatattttaaatttataaaagctacattgtgctataaatcttgtttcttagcttttctaacattcataattgtgttttaaagatccacccatggccgggcgcagtggctcatgcctgcaatcccagcacattgggaggccaagatgggcagatcatctgaggtcaggagttcaaggcagcctggccaacatggtgaaatacaaaatacaaaaattacccgggtgtggtggtgcgagcctgtaatcccagctaccgggaggctgaggcaggagaatcacttgaacccaggaggcaaaggttgcagtgagccaagatctcaccactgcattccagccagggcaacaacagtgaaactccatctaaaaaaaaaaaagaaaaaaatccatccacattgctctacatatacccttatccatttctttcacatacatacccatgttggcctcaattccccacaatgcagcaacaaactttcttgtacttccttatgaccttaagaatgtgagagaaacttctccggtatacactggtgagggaatatgatcagcagggttttttgtttgtttttctgtgttttgctttttaacttatgcccacctttctgttggcagtcagcagccacatctgaagttatagctctctgatttagacaaggcttattcttccctttgttacaacctagtccctatagggacctgaatttgtgaccctagtctatgagattactttttaaatacagtttggttcaggatttataaaagcctaataaggctgggtgtggtggctcacacctgtaattccagcgctttgggaggctgggatgggcagatcactggagtccaggagtttgagaccagcctgggcaacatggcaaaaccccgtctctacataaaaatgtatgtactcagtagtactactcagtagtagtactgagtagctactcaggaggctgaggtgggaggattgcctaggaagtcgaggctgcagtgagccgagatcttgccactgctctcccgcctgggtgacagagtgagaccctgtctcaaaagaaaaaataagcctaataaaatgattgcacgcctggaaaacctacataggctccttcaagtcccatatatatataaagtcatccatggtatgtagttcacattgaagtcaagttgggggaaaagaaacttatttatctctttctcttttcctttattcaagtagcaattttcatttaattttattcaattcagaaatatttactgaactcctcttattaggaagcactagactggatataaagaaaacatcgtacaaggcatagaggactcagtcctgccttgcgaagggcacatagtctgactggaaagacacatgctgacagggtagactgtgttaggaataatgctcaaaatcctgaggacattgaacactcgaacaaaggattcttagcaaagcaattttacttctgcacagaggggtgcctccttggccagttgccatgagagcacacctgaacaaaggggcatgagagcctttattcctgacgcaagtcctgcccctgtaccctttccccccattggctggggttgggtcgtacaatctaaactaatcccagttggctaaacatttgatttttttagatagggtgggcacgtaaaatcaagtggagaggaaggggaaggggcgtctgtaatgagctagaaagttagtcctctttccaaataaggaaatgaatgtgagctggtactgaggtgtgcctgggcatctaacaaaggtaaaaaggaaaaaggagaaaaatcagggggtactatgaattaaagaataaaagattgatcagattatttgaagagaaacctcatcatatcccacaactggaagaaacaatttgatggcaagtttctcttcgtcgtttaccagctcaaaatctcaactatcaaaggcaagaaaaatacacacacacacacacacacacacacacacacacacacacacacacacccctctgcctttttctgtatggccaaagccttcagtccagctgaccacttcccactccagttaccatgttagcctcccaacttgtatctctgcacccttctgataaagcctccacaatgcaaaacacgaatcgtatcatatggctcttcttctctaaacacttccatctactctgtggttttagaagagaatgtaatagtcccacattacaaggtcttaataaattgcattcttgcagctctgtatcattacttgtaaacactgtagtctagatagccaggacacactgcatttcttttttaaggctcgatacctcttgccattttgcacgtagttttccttctgtctgaaatgccctttttccacctggcgcttgaatggccccttctgaaaacttcctagtcgtctttcaaaataaattcaaatgttagcttttgtgggtaacctattgacctctccaggctgagttaagctgttcccccgaggtgtcttgttgaaatcattattttttcctaaaatctctgttctaatttacttacatgtctgtgaatgcttagaggttacgaacttcagttttgtaagcttagtaactggcacaaagtctggcacagagtagcacctgaacaattatttttctggaataaataaagtaatggtttcattgaaatgattcgcattaaattaatgattagcattaaactacaacgtgtatatgaaacattccagttaggttgggttcattccattcctatttaaagagtttgtagtttctggctcttttccaactctgattcttcagactagaaatgcaatttctgctaatgtatttattttaaccaaacccgacatcaatcaagttatttgtattcctcataaggtaagcataggaatttacagtgatacaaaaacgcagctattatctcttataggcactggtaaagcttttgtgactagtgctactatactggtaaggtattgctgcttgtaatgaactaaatatttcagtggcttaacacaataggagttcttttcttgctcacatgacaacccagcgtatgttttcctagtcaagcagctttcttacatatgttattgcagaaacctaggtcctgttcatcttcttcctctgcctgccattcccttggtagcttttctctgctcgggtttcgcaagaggatgaaatcctattgaaaatgatctgagggtctattatgttctcaagaatggtacatatctagtctatgataaatgctcaggtaactgattaggtgtaatagatatcttaggattttgtcatgaacaatcagcatcaacaccacctggaaaattgttaaaaatgcaaattattgggctccacccagtatctactaaatccagaactccggggctaccatgcagcaattagcaaggtctccaggtgattctgttgatcctaaagtatgagaacaactgccctagggcgttaggacttaattctctcctcagtaagttgtaaagatttgccgtaggacctaagagtcttctgcttccagcaatagaaaggaaaaaaaatgtggaaacctcactaaatttttcaaagcctcagccccaaactgacaaacaacacttctgctcacattctgctggctataaattatcgtatagctagctgcccagtgaagtggaaccagctcaggacggcctactgttatattgccaggcattttttgagccacttgatgttatcttcttggtaatttaaatttaaccgtggtaggaatatttacaccacagaaattggcaaacactaaaaacaaggtgtttttaaacaccctgagatcagagatccagttgatatacatctaccagcacaccactggccatatacaggcttgccttatgccacggggagctctgcagctgaagtagcccttcaaacttgtcctgctttgagccaaattaggcctctatactttcaccttcatcagtcactgaatgagggctgcctggggaaaggcatgaacttggacaaggcagctctctgcagctcaggcagtccctgaagggactgacagttgaagaatgtctactgacatcatttccatcatctagaacaagagtctttctttgaagggggctctgagtagcatattcccgtgtccactgcagcccctccctttaagagactctgatataattgactgggggtgagccagtacattaggattttcctaaagttatctggataattttagtatgcaaccacaatagatactcttcaagaattaagctagttgctgagagggaactgttttttgttggtttgttttcactaatgtttgcactctacttcctttaaataaaattatgcctggagaaagggtttttgtatggagcaattgataaatatttgtagggtggttggctaaaataattataattcctttaaaagaaattctacccactaaagttaatttagaagtaaaatataatagaaatccaataatatattcaccaaatggattaagatgttcatgaattatcttcaaagtgttaatcgaataagtaatgtgtatgcttttctgttaaagaggaagttagaagatctgagctctgagtggaaggcggtaaaccgtttacttcaagagctgagggcaaagcagcctgacctagctcctggactgaccactattggagcctgtaagtatactggatcccattctctttggctctagctatttgttcaaaagtgcaactatgaagtgatgactgggtgagagagaaaatttgtttcaattctaaagatagagataaacctttgtgttattgactgtgcaaaaagtcttagagtacattccttggaaattgactctgattcaaagtgttgcatgacaacgggatatggggagtgttctctggagatacacccacaaggaagagaagagcacaagggagattgtgggagagtctgaaatgtgatttgtctgcagcagaggcctaagccagtctcgcaggagccctacatctgggctggctgtgcagagctgtcctgaattgcaggcagtgggcctggcccttgtattcctgatccagccagccattggccaggggctggctgctgcctgagagtggaaggacaacttggacaagttttctgaggccgaaggcaattcttagtaaggaacaccattaacaaccaatattcctagcatccagggatgtgtgcattgttcctgaagagggacaagtatgtctacaaaaatcacagaaaccacagaaacacacacagtcctactagcacctctccctgtcccatttgcaaacaatttaagagctctcccatttttagttcaagaaaaagaaaaatggattgggaggaccacaagctgacttgggggaggaatatttcctcatttagctgtagttttaacttttgttttcactgcatattttcagtctattttattttctttcctcttcagttgttgatagaaggtattcataaattctcatggcaatgttaatgctggctttgactctcaggggaaagaggccagaaaacttctttgctgtaccattccataattaggcagaactaaaaacatctttgggtgttgttttttgtttttgtttttttttttgccttgtctgcttttcaaagatcaaatgattgaagcattaaagcatggtgactggttcttcaggtaaagttgatttttattttatgtcaagtagaaaaatactgaactggaagaatcacagctggggtagcacaatcataattcattagaaggcataaatagtgcttggattaaaagaagccctacaatctggggacagtgcatctcatgtgccctctgggattactcggcagtcatcagagttagatttaacgactttggagacttaagcattatggttttttttttttgtcaatctgggacactgaaattgctgtatcagggttatactcaactgtgtcaggtttatttgtttttatgagctgtaatttttggttccctcagcgcatatgcatagtttgttcctatgttatcatttattggtgtctgttttctggctgtctctggtaggttcagcctcagactctgtaactccatgaagagattatgttccaatgatgttttataagtttgttaaactctgaactcatgagtttatgtcccatataagccacgttacacatggtaggaaggctccaaaaccagggcgccgaaatccatttaacgtgtaacttacctaaatgtaacaatgtttataagaaaaatacattggaagttccagttttgacttccagcaacatatataattcatccactttatttattaacttccatgtgttgagcatcatactggtgctgcgagtacagcatagaataaaagtctctcctttcataaaacatatattgtaattgaaagagaaagacaataaactaatgaagaaaatatatactgtctcaataattataagtgctgtagagtgtagtctacagattgatgtcaatgggtatttgttagacacacagaatctgaggcccctatcctagacccactgaatcacaatctgcattttaatagaatccccaggtgaatcctgtgcacactgacatttgagaaacaccattacagagaacaactaagcagggagatgggatgagggtattattgtctatagtgtggtcagggaagcttgtctgttaagagaacatcagaaaactgatgtaagtgaggaagtgagcctggtgtatttctgggaaaattattccaggcagggagagaaaagactgagcaacgatactgaagtaggaacaagatgacggaatattaaggagatcagtgagactagaggagtgggtcaggggaagtgtgatggaagccatgagagatactcatctttcatagcactgccctacttccttctccccaacatgagggtctcatcaccccccaccactcttgtcttctcctatgtcctccacattgctgccagtatggagagtctgggaatgccctcagctcaaagctgtttggtgatagctggcagagttgtggtagtagctaaaaaagaattaagggaaagaggaattttctcaaaagcaggtgcttttcatcctctttagcaaaccgaaacagatctgagcattaagtcaagatgttaaatacacaaatgttgaatgaaaaaaaaaacaaaaggtagtcatttaaattcagagctgcttttattaaaataagattttcttttttctttactgtggtagttcaaatatcagaataaagaattgtttctattcccgacttcctgacttgcaggaagttaatcagaaataaatgcaatataaaaaaagaaaatctaatttgtattatgcttcttgtatatgtttattatttcatgtactgtattacaatgtaatagaatttataattcattatagcagattgtttccattgcattcctactattaaatatgtagaagctacacatatacttgtagctttaacatatatgtctttatcctcaaaataactgcaaagaacatatagataatttttaaagattaaggagcctgaggtttagaggggagatagctagattaaggccacacagctagaaagcaagcaagcaagggtttcagtccacatgtcaagctccacagcctgtgttttgttttgtggctgtgctttacactatctctctgtccaagaacctaatggaaaattacagatacagatgcagctggccagcagttaatataatttaactcaatcttaaatttatctggagtaaaagtgatacaagtttccgtgttttttcttttctttctttcttttttctttgtgtgtgtgtgtgtgtgtgtgtgtgtgacagaatcttgctctgttgcccaggctggagtgcagtggtgcgatctcggtttactacaacctctgcctttcaggttcaagcgattctcctgcctcagcctcccaagtagctgggatacaggtgcgcaccaccatgcccagctaatttttgtagttttagtaaagacggggttgctccatgttgatcaggctggtcttaaactcctgacctcaagtgatccgcctgcctcagcctctcaaagtgctgggattacaggcatgagccaccttgactggcctgtttctgtgttttttctacttaagaagtagaaaaaattggttcactctatttgaatttcttagaaccatagaaatccaaacttggaataattattgcaattattatctagttgagtattcttcttttatagatgtagaagctgaggcctaaagttgcttgttttgttttatgaacactaaaccaaactaccttgtggctgcttacttaaattataaattataatggggtggccttgcctgagctgtataaattgttttaattatcaggacaaatcaacatactggaaaaaaaaagcaaaacttgcaattgttgttgcttagacacctgtccatatcagtttctattgttgcatagaagcaccccaaaacttaacagttcaaaacgagtgatttattgctcataattctgtgtgtctgaagtttgctctgtgattagctggatagttattctgatggtcttgcttggtgttacttatgtggatgcagttatctagcaagtgaacaggagctagatggtctaaaatgcactctctcagatatctgacagctggctgttggttgcagaaccttgattcttcataaggccactcatcatcctgtaggctagattaggcttcattacatggtattctcagggcagttttccaagagagggcgggtggaagctacaagaccttctgatgcctaggctttgaaacgtgtaggttacttctgctaagttatattggtcaaagcacctcaaaagatcagcccagattcaagagatgaggaaattacttcatctcgtgaaaggaggagatgccacatcgcatatcaaaggggtatgcatattggggatagaaggttttattgtcaccgtatttatacacaaatcactacattggggaaaaggagggaaactggagatcaaaagtgttggtcttaatccaacttaattctcaaaaattaccatgcgttagaaccacccagttcttcgcaaagtatagattactgggcttcaaccccagagtttctgatttactagctctggggtgagacctgcatctctctctctctctttttttttgagactgagtcttgctctgtcacccaggctggagtgcagtggtgcaatctcggctcacagcaacctctgcctcctgggttgaagcggttctcctgcctcagcctcctgagtagctaggattataggcacccgccaccacgcctggctaatttttgtatttttagtagagacagggtttcaccatgttggtcaggctggtctcgaactcctgacctcaggtgatccacctgcctcagcctcccatagtgctgggattacaggcgtgagccactgtgcccagccaagacttgcatctctgaaaagttcctaggttatgctgatgctggcctatgctttgagaactactaccacagacatacagtgagtggggaagaataaattcatcccttctgctgtgtgcagcaaggagtgggattccaatgagatccagtgctgtgaatgctaaagggaaatccatcttattttagcacctctactccccatctccccaccccgaggatgttatagcttagaagttcaaggagatggacaacacactaaaccaggcagtatttgccctgcagagctgttcagtgttcctggatgagacctctgagaagaaaagccataagttcctctagagactttcacaatcatttaggtagacaggactttgcatgggtctgaaggcttgcatggcagatggaggcaaagagccagcaaatctggttgtaaatgtcaatgtgaatcctttcttatccacaagctgctgggcctgagaacattaatgttctacaatacccgatttagcatttttgaaagaaattgcatatagacatgcttaatgtgaagactccaaatcaggatatttgattcaaatgtctcttggtaataactatggaatgaataacccattgtatatggacatatagaagagccagttaacagagttttctttttttttttttttttttttttttttttttttgagacggagtctcactctgtcgcccaggctggagtgcagtggcgcgatctcggctcactgcaagctccgcctcccgggttcacgccattctcctgcctcagcctcccccgtagctgggactacaggcgcccgccaccacgcccggctaatttttttgtgttttttagtagagacggggtttcactgtgttagccaggatggtctcgatctcctgacctcgtgatccgcccgcctcggccttccaaagtgctgggattacaggcgtgagccaccgcgcccggcccagagttttctagttgattaaacactggtaaaatcatctcttcctgtaattaagtttggagagagcaagtctcaagtgtaattaggaaagcacagtattggaggtcaagaagcctaaattctgatatctcagttgtgctaccaactatataagggatcaacagactgtttctgcaaaggaccgatactagatattttctgctttatgggtcatgtggtcaactctgtcattgtatactaaaagccacagacaatacctaaataaagggacatggctgtgctccagtgacactttatttacagaaacgaggcaggtaagatagatttgacccttagtgggctacccatttccccttagcactcagccttcctataaaccatgaagcgtctaactacaagtacctgtgagtcttcctgagtcctttctctgcctgtaggagtagctctcccacttgcagagcaggctggaagctggggaggagattatctctggaatagcacttaaccaatggacaaaagctgggggataaaggtgttggtcttcatagttttcatactgctatgaagaaatacccgagactggataatttatacaggaaaaagaagtttaatggactcacagttccacatggctggagaggcctcacaatcatggcagaaggcgaaggaagagcagaggcacttcttacatgacagcaggcaagagagcatgtgcagggaaactgctctttataaaaccatcagatctcatgagacttattcactatcaggagaacagcacaggaaaaccccacccccatgattcagttacctcccacatggtccctcccacaacacgtggggattattggagttacaattcaagatgagatttgggtgagaacacagccaaaccatatcaataaatatcccaccttcttctccccttgggtaggacacctccaatgcatgttccacactaaaaatctccagtgaattgggcagttgaccacaatgataagcatacttattagcatgcctcgtataggcttccttccgatgtgtaggctttcttcccattttggcagaatctggacccaaccccacatctcctgagtttgatttcagtcctcttcagtattctcatatatctcaactttgttccctgctgagatacaactgacagatatatatgtatcttcagctctgcagctctatcttctcttctaccatggctttctgggatcagctcccaattgaattatttgtatttaaatccttgtctcagggtctacttctgagcaaacctaaattaatacaagtcttagaattagtgccacagttataccttttgagtaagttatgttgcaattcccattttatagatgagataaccaagggtcagaaaggttaaataatttgtccaaggttacagagctagtcagtgacagagtgggtattcaaaaataagtctctatgattccagagcttatgctattaatcagtgcaccatgtatcaagcagtgatttagttatcttcatttgaattttttgaagtctctatttaaattgaatatcaaatcctcacatataaggttatttatacctttttatttgttttatttatttatttatttttgcttaacttttttttattatactttaagttttagggtacatgtgcacaatgtgcaggtctgttacatatatatacatgtgccatgttggtgtgctgcacccattaactcgtcattgaacattaggtatatctcctaatgctatccctcccccctccccccaccccacagcaggccccagtgtgtgatgttccccttcctgtgaccatgtgttctcattgttcaattcccacctgtgagtgagaatatgcggtgtttggttttttgtccttgcgatagtttgctgagaatgatggtttacagcttcatccatatccctacaaaggacatgaactcatcattttttatggctgcatagtattccatggtgatttatacattttaatttgaacttcactcacctctacaaagttaaataaagcattccatttccatttcaataatactttaaatatctaggcagttaaagcatgaggttacttggcacttaaatgtactcttgtcatactacttttgttggcttaaattgcaaaaaaaaaaaatggttaatttattgtgacaataccctacatttatctgcagtgatcattttttttgtgaaaatggccttcgtttatctgcagcaaaggaaaaagaggatggcaattagttcttgcattcttattcctctcttgggtcctgatccttctcattaatagaaacatggcaggggaggggtatataacccacaccctttcctgttgtggttatgtttccactgttgattctgcttcaggtgaacctttaggattaggcaaataaatttccgtgaggccaaatctttttcttcctcattaacagatgatttctctgctaaaaacacttacgacatggctatactattgccggttttatagttacaggctctaaaccttgaaaacttcctcaaagtctaatacgtcaggagcaagcttttgtacaaaaaatgtgaagacccttaatcagttccaataacaaaataaatccattttaaaccctatcccaagatactgcaaggccttggagcagctggagagactccttaactcttgacattaattaattaatttaaaaattcatatttgtatgtatcagtgaggtaagagtgcttgaaatataatgagatgtgtcacactgtagaaaggggagtgacaacagaaagccctggctggtgaggccccagcacttctcacactcatcagaaggaagtctttccatgaaggcagtagggggtccctggtcccaggccaggtccttcaacaatgctcactggttaacaggaaaggcactacagtggcatcattgttaacatccaagacagtgatagaatgtgaaacttctactgtttagtatttagtattcagcatttagatgttaattatccattttgtgatgaagttccctttcttctccctctcttaaccttttggtagttttattgcatggttaccatttccagttagggttgtgctttggggtctgaactgatgaaggaagagaaactctagttcatcatttctaggaaaaagagaaggctaacatcaattctgatgattagagattttttgattacctatgtcctgcattttaacagaaataaaatgttaattacagtaaacttactttaaccttcttatgctatttaacactcttcaagaaaggacttttgcttgaaatcactacagagtataccataatcttgactgtcatactctgaccaagaaaccagaactatttaggcatatttatgagagtaagtaccctaccgctcaaaatggaaggcttcaacatgtattcctaatatttcctaaaacttcactgaatagttttaaaattgaatataactttaccttcagagagaaacaagatttcgaaaggaaattgtagcagttttgtacttcaattgtcgattttaagattgtggtctgaaaagtatttgaacagtcattctttcttttccactatctcaggaaaggctctcattctattagaagcaatcttagaagcgtaactgccaactctcttcttaaaaagtgaagagcagatggagttctaccaatctgctatacttgacagtttttcaactacctaacctaagttccagttactgtctaaattatttttattcgaataggaaaaatacatttatgcttactgtacatttcgacagtgttcattctttgaggtctgttatttaatctccttcccacttttcttttctatcttaaatcagatgagtccccatggtctggcaacaaaacagctgtttctcaaatttttaacgtctctgtggccctcctcctacccttccaagtgttttccatactatttttctgttgtgggcttcagaattggatgctgttccataattactggtcttcccatgactctgtcacatcataaagtctatatatacccttttcctacgtttacatgccaaataccaggtgtgtctagctttaattcaatgactagcatatggtaggtattgcactaatattttttggtcaagtgaacatatattttacagatagatcaaatacatcaaccttcccatgtaataataataataccaagaagattaaatgatcgcgtgcttgaccagctgtttagtggcagaatctggacccaaccccacatctcctgagtttaatttcagtgctcttcagcattcttatatatctcaactttgttccctgctgagacacagctgacagatatatatatatatcttcacaatctcagtagtaagccctatttttttaagattacagtgctgatcaaagagggatattctatggcattgatgcaaatcttccaggccagatataacccctatctccttaaaccctcattcttgactgtgtcttgaaatcaaatttgagaacctctgctttacatgctaccttcctcttaaaattcataaggtttattccttctctcatcttcagtatttttatgaaaatatgttttactcttatttccaaagtgcttgccagcccatgctgagttcattagacaaacaatctaggtatcctaatatttaggtaaaattgctagcagcactaactataccagtacccacttaaattgcaatataaacctacaataggaaaaaaaaagtcaaaattatactactttcaattcctacttctggaataattatcacaccttcaaaaaaactcataattgttctccaatattaaaaaccaggaactaaattacatcactatatatatatagctatatagacatataactgtatatagtttatatatatattacatgtcactatatatggttatatatacagatagctatatctctatatagtttttatataggaaactatatatataaactcatatatatttatatataaactcatatatatataaactcatatatatttatatataaactcatatatatttatatataaactcatatatatataagagattttatatgtatatatgagagacaatattgaaataaaacaaactagccaatctccaatgtcccttcattttcccaggactcttctttattctcaaagaaatgtatgaatacacaatataaataaatgttctataatgttcattatggattataatagttttcttgtcatactgaagtgaatgggaattgtttcttcgattattagcatacttttcataactatgtgatttggtgataggcacttttgcttactaagttcagcatgatcaaaacagaactcctattatttttattgttgattcttatttctttaaggtaaaatatgcccttttcctttgaacctgcacactgtttaacaaataagcacataactcaggattgaattgtacacttcgatttgagcttttttttcaaggtcaggacccagtttcacaagaagttttattttttccaatacaactgacatccactcccaccagctgaaagacaagaaaaacttgtctaataaagctttcagattcaatttgctgcctgcatacagcttgaggaatctctggaggtcactcacagcatgtgttgcaaccccaacagggagaagtaatgaaaagattctagttaaaaagctgacactgccccttccaacctctttgaatgtgaatataataagccagtttacagacgcaaatctctatgattctggggatttccatcttgatctctgactccaaggaacatttgaatgcatggatttgtatccattatctgggtgaataaatgcttcatattgaaaaaaggggtgctttaacaacataagtctgatgtaaatcaggcaaaacaacattgtcacttcatgtttaactctcctggagggtctctaaggtctcacagtttggttctattccagtaatatataggcctatcatagccattttcaaaaataatacctgctttcatttcgattattccccctagcttttgcattgacccgaacatacctaatatttatcttagggctaacacgcattaatgccttgctctgtaccaggcattttgccaagtattctttgtgcatttttctgtttaatcttacagcagccttatgaaataggtactacattattattatttttcaccatgagaggaaatgaaagcctagagagaatggttatccaaaaacacccagctactaagtgggcacagcatggccttgaacctgagtctttataaagttcatgcctgtcttttacctttatgttaaacatactgaatcttggtcatgcagtctatgaatgaagactccatatactctaggaccaattctaccatattgtgcatgcttttgtacatattttccaaatgaaattaaacaacaatactctctcttcccctttcttttccgttttgcatgacatctaaatcttttattaaatctccgtgggtggaattgggccttaagtagtagtacctttgaagcttaatactataacctcagagttacggaagtggtttcaatatgaagaaatatatacgttcttttcttttcttttcttttctttttttggctcctctagaatagaaggcaatcaggagagaaaaagacattaagatgataggcttgattctcccacagtgttactacttagctttatttattctcccacatctgtaactgtcaattcaaggtcaaaaagccagtacagcagcagaattacaaaaagtagatctggaaaatctatagggtaccatagtccagcaccctgctgcaagtcaaaatcaattaaataaatatgtttaaacagcacttcatttaatcttaagggcaccacgactcccttggaaaattcttttttgtgttcagacctgattctctgaaagtattttctagtgttttctttgttcggtggctgtggtgaataagtggacccaattgcctacagcatgaaatcgtagaaatgaatatgggctggaacttcaatcaatcacacaaaccagaaacatagagttcatcacctcttctggaaagcgtccccttcggccgtcaaaagggtagagtttcctccaacatatgttcatacttccctttgcctcccatctgcaatttcaaccagtctgttgctctcgccctttttaggcttcacataccggatttcttcttaggagctcacttgaaaaaagggttgtatgctttaaaaatactaaaagtcactggactagatgataataaaatttctgtaaaataaaaagggagttaacagaggtgttaccacttatcataatggatattgttgacctttcctctagccagtgtcccacttaagcatgcttcttggctggaatttatttttctcatctggataaatctgaagcattatagtaaaacccagtgtgagcaaggccatggatgcaagtggattgagatgaatgagtggatagacctgcgtgggcagaaataatgaggtcagcaataagccataccaagggatgcacactcaaggaataaattggaggtagcagaataactgaacaaatgatacatttgatcagactgtcacatgaatatcaactgaaacaagttatgactgtagttagtgaaccctagagtgaagaaaacaaaatattgaaatccatctgatcaaaaaataataaaattgtttacatgtatatattatctaaaatttcccttaagaatgaagattataaattcccgcagttgaggaaactgaataagaggagaatcaggacagaatcttttctcttcgtattcctagtccatttttcttctaactacagtagtgagaacaagaatttattcaccaaatcataatacattgcaattaggggatgccatttgaatcttggaagacacgatttgaggcaaataaaaaatccatatttataaagtcaattattggtttatataatttactgtttcagcgggaggtataggttagtaatgtaagtcacttcaagaaggttttggtcgaagttttgccaattttttctgtaaaaagccagatagtaaatattttgggttttacaagccagaagatctttgttgaagttactcaactctgctaatgaggtgcaaagcagccataggcagtttgtaaatgcataagtgtggctgtgttccaataaaagtgtgtttgcaagaacaggcagttggttggatttggcccacaagccgtagttcactgacccctgttttagataaatactagtcaatagattccttgtagctaataaagggaatatagattgtttaatgtgtttccctaatcttcttaaggcttcctccaggggaaaaaatatttcttatcatcagcagtgttattaatgcttactcagaacaaagaataccacttacttagcatagaatggacatttataaagccactcatggaaagaataaagagatgtgaaatacctggtacaactcttaagagtgttccactatcatttgaaaaaatgatgagtagtagttatataaaaggactcgagcctaaaacatttgttctcactttggataacgttttcctatctcagcatcaaaaaatacaaagaaaggggataactaggtcttagattttctaaattctcatgactataagtcccatatatttagatattgaagtacccttaaatatacctaagtagaagtaataatttcgatattatgggaaatctaattactgctcatagttctcgagattaaaatgttatacaccacatctcagctttctttgaaacttgaaatggcatacttgtacaaaggtagaatggtctcccaaagcagcgtcatagattagcagaaaagagctatgataatgccacttcaactgactatcatttaaataatgaattagttaggaagagttaaattatatagttacaggcagcaggagatgtcaccatcagggggataagaagccattttccagtacactatttgacttaactggtgcagttccttctttaactgtaggttactcatttgtatccttaatttatcaatatactaatctgacaaataatttattaaggattactgtgtgccctcctgtgtgttagattctagggatacaatatggatcaagataagcgtgattcctagactcctagaaagtaagaaaactaaataactgtacgtgacaaatactaggatgtagaatactagggaagaatcaggaagaatcacctcacccagtctggagtattgcaacagagcgatgtcagaggaaaaattctggaaaaaaaaaaaaaaaaggaaatttgaagatgagacttgaaggataagtaggtgtacctaggcaaacaagtaggggagagtgttccaggcaagagaaacaagtaacagttggaggcaaaatggagcctagcacgttttaaaaatatcagtatggctgaagcactgagttggggttgggaatgggtgaggagcgatgtgtcagggaggacattccagatgatgctggaaatgcatgcatgttcgcaaactgcattttaagacatgttagagaaatcaaacacattttatttgaagggtaattgaaagccactgaagcattgtagagagactagtgacatgagcatatttgggttttagagggattactctggctgaagaataggtaactgattggataagagcaactttggaggctattccagtggttcaggtgatagataataatgacctaaactaaagaagtaataaagggaatggagacaaagtagacagattcaagtgatacttggcacgtggaaacaacaggccctggtaactgattggacataaaatggagagatacagagaacgcgaatagaacacccaggcatttggcttgataaaccgagtagaccgtggtagaaattactaaactatggagtattttagggttcaggggaactgtgagttcaattttagacatctagttttgcaaggccactgaggtaactgagcatatgagtcaggagagaagtttaggctaaaaatatggatgccagagttaaccagcgttatgataaaacaaagctgaagtctcgagggtaagaacacctaaacatctaggctggagaaggcagcaggtaaaaagtaaaaggagaggccaggcacggtggctcacgcctgtaatcccaacactttggggggccgaggtgggtggatcacctgaggtcgggagtttgagaccagcctgaccaacatggagaaaccgtgtctctactaaaaatacaaaatcagccaggcatggtggcgcatgcctgtaatcccagctactcgggaggctgaggcaggagaatcgcttgaacccaggaggtggaggttgcggtgagccaagattgtgccattgcgctccagcctgggcaacaagagtgaaactccgtctcaaaaaataaaaagaaagagagagagagagagagagagagaaacagagaaagagagagaggaagacaaagaaaggaaggaagggagggagggagggagggagggagggaaagaaaagaaaaggagaaaaattcaggagaatggttacttccagggagatggaggcgattgtgctgtggggaacacaagggtggggtcaaggtattagcagtattctatttcttgattggggttgtatttacataaagtgttgctttataattattcttcacactttatgtgtacgttctatgtaatcatctatagataagacagatttcactgtaaaagaaaataaaagcttccaaaagattatcatcacaattgtaacagattcccctggtgcctggagtcacacgccattttcctgcactgcagttgcagctgcagtggacagccctgtgtgagttcagacttgcctttagctgacagcatcccatgtcaagggaatggctcccatttttctactttctatctaagggacttctctgacatcccaggagcccacagattttgtgagctttctcacccttgaagttttagtgagtgagcaaccttcaaccaatggagatgggagcccatggatatatttttaaccactattccttccgggggcaaggggaattctctgtgattctcaggaacatacaaaagttctgtcaaaatacagtccccatggtccataagcattaccttgatgataatacatttgattggcatttcctccccctctgtctcactcttttggtttttcattcttgcttcctagggatcagcttccaaatgagctatctgtacccaagtcctcatccaggccctgttttcaggggacccaaagacaacaataagaaaaatggaactgaaagaggagaagactttaaggcatgaaaaaagttcctctgtattccatactgcatatttaactgcctactcaacagttccacttagatgtctcaaaaataatctcatgatcttttactgctatgaaatgcatgaccttcccctgatatattcctttcttcaggttttgtagcaccacttagctatccagtaacaaaatcttgggggtcattcttaaaaccttcccacctcacccctgctggacatccaccactaagttcagttgatttttttgctcctaaatatttcttggttcagctttcatttttagatttatcctgcatacccctgtacaatctcatcatctctttcctggactgttacagtagtcttatattaggatgatcatagtcttgatttgcctagagaaaacatgctttatgtcattgcctcagagtgactaatagtcccacctttcacttgtaacactatgcaggttattgggttaaataatactgtcatccaaacctaatctctcctcattcatttcttctctcctatgcatcttagctgtgtgaaaattcaaaatataaatttgatgacagacagaactctgtttaaaatgctccagtaccttaccatttatctcaaaataaaaatttcaaaaaaagaaatgatatcccacaggatcttgtatagtgtgaccctttccatttcatcatccttataccagatactgtgaactacttactctcttatctccacattgacctccctcctagttttgttttgcttatgaaagtgcttattttctgttttttaaagccattgcacatattggtctctctgattgagacactatccttttgaatttttgacctcatacctactcacttttcaggtctcagctcaaatgttatactcaggaaagacgctccttacctcccaaactaggttagtgtaaatggcactatttatactcctcttccagagcacacaccaaatcttatatttatttgtgggacaatttgaattcatgttgttccccctactcaattgtgagcttcttgaggacatactctgcctcctccttacctagctttattgaagtataattgagaaataaaaactgtatgtattcaaggtatacaacatgatgattttatatgactatattgtgagatgattaccacaatcaaattaattaatacatctagcacaagaaatagttactattgtgtgtgtgttgggggggggggatgaggacacttaagatccagtcttgtagcaaatttcaagtaaacagtaaagtattattaactatagtaaccataatgtacattagatccccagacatcttataactgaaagtttgtgccctttgaccaatgatatggtttggctgtgtccccacccaaatctcaccttgaattgtaatccctgtaattcccatgtgttgtgggagggacccagggggaagtaattgaatcatgggtttgtttccccccatgctgttgtcgtgatagtgaatgagttctcatgagatctgatggttttataagcatctggcatttcccttgctggcactcattctctctcctatcaccctgtgaaaaggtgccttcctccatgattgtaagtttccggaggcctctgaagccatgcggaactgtgagtctattaaacctcttttctttataaattacccggtcttgggtatttcttcatagcagcatgagaacggactaatacagtaaattggtactgcagagagtggggtattgctgtaaatatacctgaaaatgtggaagtgacttggaactgggtaagaggcacaggttggaacagtttggagggctagaagatgacaggaaaatgtgggaaaatttgaaacttcctagagacttgttgaatggttttgaccaaaatgccgatggtgatgtggacgatgaagtccaggctgaggtggtctcagatggagattaggaacttcttgggaactggagcaaaggacactgttgctaagctttagcaaagagactggcagcattttcccctggcctagagatctgtggaaatttgaacttgagagagatgatctgaaattggaactttgttttaaagggaagcagagcatcaaagtttggaaaatctgcagcctaacaatgtgatagaaaagaaaaacccattttctgagaaatacaagctggctgcagaactttgcttaagtaaaggagccaaatgttaagcgccaagacaatggggaagatgtctccagggcatgtcagaggtcttaatggcagcccctcccatcacaagcccagaggcctaaaaggaaaacatggtttcacgggccaggcacagggccgtgctgctttgtggagtctcaggacttcgtgccctgcataccagctgtggctcaaagaagccaaagtacagctcaggctgttgcttcagagggtgcaggccttagtggcttacatgtggtgttgggcctggggttggacagaagtcaagaattgaggtttgcaacctctgcctagaattcagaggatgtatggaaaagcctaggtgtccaggcagaagtttgctgcaggggcagggccctcatggaaaacctctctgctgggacagtgcagaaggaaaatgtggggtcggagctccacacagagtccccactggggcactgcctagtggagctgtgagaagaggaccaccatcatccaaaccccagaatagtcagaaatgctgatagtttgaaccatgcatctagaaaagctgcagatactcagtgctagccatgatagcagctgggagggggctgtaccctgcaaagccacaagggcagagctgcccaaggccatgggagcccacctcttgcatcagcatgacctggatgtgagacatgtagtcaaaggagatcatttgggcagttcaaagtgtaatgactgccctattggatttaagacttgcatgtggcctgtaacccctttattttggccaatttctcccattcggaacaggtgtatttacccaatgcctgtaccccccattgtatcctggaagtaactaacttgttttggattttcaggctcataggcggatgggacttgctttgccttagatgaaactttggacttggacttttgggttaatgttggaatgagttaagactttgggtgactgttgggaaggcattattgtgttttgaaatgtgatgacatgagatttgggaggggccaggagcagaatgatatgttttggctgtgtccccacccaaatctcaccttgaattgtaatctccaaaatccccaggtgtcatgggagggacccagtgagaggtaattgaatcatggaggcagtttcccccatgctattctcatgatagtgggtgatttcacatgagatctgatggttttataagtgtctggcgtttcccctgctggcactcattctccctcctgccaccctgtgaagaggtgccttctgccatgattgtaagtttcctgaggcctccccagccatgcagaatggtgaatcaattaaaactgttttcttcataaattacccagtctcgggtatttcttcatagcagcatgagaacagactaatacaaccaacatcccctcttgtcgattttcattgaatccccattacctgggaatgaatgaggaaggcagaaatagaaatcagcgtattgttcaatatagaaatcctgaagttacacaagataattacgagcaagactcagtacagagaaggaacccttgagctggggatcagagtcttctggaaacaaggagtaccaaaggggagtgaaaaagagaagtggagaatgagtagtagcagtaaaagaggaagtatgtaaagaaatggaaataaagatgaaataaactgtcatcttgttccagagacaaagctagctaggggagctaaggaaatttagagggataaaaagtctcatccaaaccttcataatgagctaagggctagtttttcatagaccctagcccaacttgcaaccctctcactctcttacttttttcctggctctgttttgctttactgcctttcatataatctaaaatgatgttaaatgtatatttcctgtctcttttctatatcacaatataaattccatgaggccattgcctgtgccacatttaccactgtactcccagtgcctagaatggtgcccagatcaagtagactcccagagtgtctgttgtcaaatgattctcagtccagtgatgtttgcactacatggtgctgccacttttttttttttttttacttcattccatttggaatttggatcattttgccaactttagggtttattcctctttatttcccctgtgtttgctgaatatctgactatctatttttctcagctctcttctcctcacactttgcctccaacttcctctctgctacaaattatacttagcacaagactggagccacttttcattgattttgatgtcagtgcttgagtgacaactccatgtggagaactttcaacctcctgctgtctcgttgtttgctttgaaaaaaaaaaatactcatcttcttcctgaacccactgggtaaatttatgctcacaaaaaagacaaaacttctagaacaaaaactgtatgagcttcaaaagtattagttttcccttgattttgagactcaaaagtaccatagaaattttaaaagggggatgaagtaattttgtcattcaacccgatatattttacaatttgaatgtcagaaccatgaaatgtcttttcagtgtactatcatcctcactatttccacctataaaagaaaagcaaaaatattgtttgagaacaaaaaaatattgcagtagcggaaaaattcactttaagtctttttttggaggttgccacatcacgcctgtcttcagctcctctcactgaagattctttgttttcttgaaaccagttggtcacttccaattcttaccacctataaatcttcctggttctttatatttcactttatatgtcccttatctcctctgatttttgttccagtctttcattttttacattctttgtcatcctatatgtcagaaagaatctgccactccaaattccttaatatatttatctaccagtgtttatttgcctgtcacatgtactcttcagtaatccattgacttgaaaactttctactctgtctttcttactatagtttgcttcttgagttcaaattattaatatattaggtcaagtaattctatttttatgcacattttacctaacattcttggtaaatataattgttttttaaattgcatcacatggtgagtattaatttaagacgtaattagtattaatctactggacaagattttatttattaactgttttgccctttgctagggttctgtaatctcaccctcagtgcctttaaatagtcttacccaaggatcacctatccctcttcaatttaaattctctattgtgttagtttctgagattgcacattctctggtttggtttggtttttcagtgatctctgtggtcacttccaaccatttctacttagtttacttttttccctgttagccctcttcagtgttaatatcacctggaagttaacccattcctagtctgcattgctctatggccagcatcttggctgattggccatcacctatcctgtacttattgtcaatttttttaaattttttattgtggcaaacagcacataacggaaaatttaccatctgtctttgttcatgtatgttgctataaaggaatgccagagactgggcaatttataaagaatggaaggtttatttggctcatggttctgcaggctgtacaaaaaagcatggcaccactaccaacttctcatgagggcctcaggcttcttccattcatggtgaagggcaaaggggagctggtgtgtagagatcacatggttagagagcataaacaagagagagaggggaagtgccaggctgttatttggcaactagctcttgcagaacctaacagaatgagcagtcactcaacctgcccccaggaagggcattaagccattcaagaaggatccacccccatgaccccacacttcccgttaagccccacctccaatattgaggatcaaatttcaacatgagatttggaggggacaacatctgaactatagcattatcttaattcaaataattttactaccaattccatttattagagaatctaagattaagactactgaaactatgccaatgattatctctagttcaggcttctctcttcaattccaaactcatattttcacctgctgacaagctaccacgtagatgttccacaggtatttctaactcaggatatgtaaaattgatgttatcattattttctgaaaatctattcctcttactatattccctatttttgtgaatgacacaatctaatggactggccatgttaaaaatcaggaagtttttctggcactttctttattccttaatattaagccccacgataaattaccaatcctttcgatcttgttaagacaaataagcttgaaatttcttatctcttatttagcactgcaattttgttttctcattcattcagatagcatcttctacaaaacctcttcactagtttttctgtctctcagctcatcttgtacactgcaaatccattaaaactacactttttaacatgccaatcataatgtattagtaaaggttgtataatagttctctttctcttctaggataaaagctaaatttttcagcttggtacacaaggccgttcatggatttggtacctactagtctatctagggtatttcctacatcttccctcctctctcttgaaaaatcaagtaatactaaactatttgtaactccctaatcaccaattgctgcctttatactttaacatatattcttccttttgctagaaatacatttgtcataataggctctttggtaaacttaccattacattctcagtttataatattatttgtgtaagtaccttttttcctacttagtcctccaggggaatgcatgtgcttctctctccatattatcattttaaaatttactcctatttcagcaagtatcataatattttactgagattaattgttggcatatttatgttaccctggtgacatatttaatagttaagatgctttgggctgcaagaaagagaatgcactttcaaagtggcttcaaaaataagaataattcaactcacataactggaagttcagaggttaaagctggctccagatgaagtacaagcagagctctgtcactctttctctatgactttctttgtcctgatttttttctctgcgtcagctttgacctcctcactagttgccctccaggttccaagatgactgccagcaacaaatgggtaacataatttcttgttacagtgagagacataaacacttacctcacagattcagagatttcaccctcagataagaacaatcaaaattttaattgtgtatctactgtatcattagtatatgtattaggtattcatatatatctactattgtactaaagatgattcagaatggtttcataagctggttgatttaaacttttcttcctgaaccaagaggatgagattatcttgactggcttagaatcgaagatttaggtgaatctaaatccatctccagaactgaggatggattccgtagaaacttgaagacaattggaattctcctagaaagcagaatttcagagtgggtgtagggatatctttgaatggaagttgtttaagccaccaacaatattcactccattggggtgacactgggcccaaaggtacccagttaatatttgttcaacgaacctataggaagacaatattatctgcaagctatttataaactaaatgacaacgagaagtatttttagaaaagttaatcatatacaatttagtcattcacattgggaggctcttcctaaatttcgtttctgatccttatcttgatctttgacgcaatcatatcttggcctccatctaaaagccagtagaagcctctggccattttttaaacaattggtttaacaacattaattggaatctatatagctcaacttaaaaaaaaaaaaaagaggaactagcttatcataatacaatattgtcaaggcaagtgatacttccatgcagctattcagcatttggtgtattcttggtttctgcagacctaataaaaagagattatctcagcgtcctctaggtttaattttaaaaaacaagaaaccatgaacaatgaaaatgatttcaaaacatcttcactcacatctaaaatatgaaatagctagatcagaggttcttaataatttaatcggtgaagcataactgaaggatttagaaaaagtgcctaaactattaaaagattcttcagctgctgcttaatgttgatatcaagttattttttacactggcaaacagctaagccattccctggtcacatccacttttcagcatttagcgctcctctcaatcatcccgatcacagccccaggaatgtttcatggcatctccgcaataatagtatattactattgggtcctgaattttgaggtagtttatctttcagaaaggatatgaatagagcaataagtccaagtagagtgggctttattaatgatgcccaagattttagacgtatactataatcttcaatcaattttaacaccacttcccttaccctagttttagtctaaaccagtccaactgtgctgtagtctcagataatacaatgttagattttttttttcaagatatagaattgtcgggaaaacttgtatgtaacctataccaatctaaatttcttagcatttaactctaaagagtaaagcttttagcacttcctgtgtaatacaagggcaagtgctgatttctctgaatataattttcctttgttagcacatatgttcactgtttaataaaaataagaatgcttcaattatctccttttgtcaagggcctgagaaataaagaaatatacagagggtcccaatctaaaaatgttttgatttacaatggttcggcttaggatatttttattttacaatggtgtgaaagtaatatgcactcagtagaaatcatacttcaagtactcatacaactgttctgcttttcatgttcaatacagtattcaataaattacatgagatgttcaacacctttaataaaataggctttgtgttagatgattttgcccaactgtaggctaatgtaagtgttctgaccatgttgaaggtaggctaggctaagcaatgatgttcagtaggttaggtttattaaatgcatttttcaatttatgatgttttcaacttatgatgggtttttcaatttatgatgttttcaacgtatgatgggtttatcaggaaataatcccattgtacgttgaggagcacctgtatcaatataggcatttacacaactctcgtactgatagcggcaggaggcagagaagctctaggcagaaaagggatggtccccagcgaaaaccccaccctcaagccaaaaagcctgaaaccgcagctcaaagtgggaacttatatcccagttttcctgctcgaatgttgcctttttctaaaccacccatggccccaccccaccccatcctgtgcctataaaaaccccagactcagctggtagacaggactacagctggacatcagagagaagcagcttgacttcagagggacaacttgatggcataactttagagaagaatccggctggacttcaggggaagattacttgccacccccatccccttttcagctccccttcccactgagagccactttcatcggcagtacaatccctcacatttacaatccttcaatttgttcatgtgacctcattttccctagatgctggacaagagctcaggagccacaagtgtgaatacaaaaggccctttgcccttgctggtggagggcagctgcctcctgtgaaaagacaaatggcccactgagctgttaacgcctaagctgtccgtggatggcagagctaacagagcactgtaacacaccctctggggcttcaggggtcgcagacgcctccacctagatgctgctccagtgctcatgcactccagttcccacctcgtttgcttgcacactccctccagtgaggagttgagagcagtgggctaagtaaataaggcacccctgttgcgagttccacaaaggggtcagggaaatatcctgcttcgttactaagtaggtataaaccctttactaagttagtaattattcagtaataatacttaaatgaaagctattctgttagactaaattcagattatcaaagacacgacagaaaacagctttctcattcatgaacctattatttccttttgtaaaatatgttaaatgaaaatacagccgtcatgctaatttctaatggtagaacatattttgaaaactcctttatgtttggaagattttgctttagtgcagataatcagaatgatgtgatatactaagaaataatttttaaaatgagatgtgacatttctcataatctaaataagaaatggcaaaacattgtcctaagctaaataactcatatgaagtgataaaatattgctttctaaaggtccatgatatgtagtgatttctaatgtgtttaatagcattgatcctattgggtaattgggtggttctaacatgtaaggaaggcctccagtactaatttcatgtactgggaaactactgggcagggatgaatcccttaactcctaagtaagactatcagatcatataaatctgctttttgatttgcaaagactcttaggcatacctcttgagaatattaaacatctactaaattatatgtaaagcatttcagtctaagatttacaatgctcaaaggagaaagattttaaagttcagcattggaatttccataatttccttccaattgtagaattttacaattgagatagcaaataataatataaataaatatgtaagactgaaatcaacataggagtttggaaagaagactgtatgggttaactagagttgtcaacaaagacttcacagaagattgtgatcgtagacattagtaaggaataaaatgggtgcaaaaaaaagtctaagaaacaacaaggataaatttattttgtaaagagtgaaagcatattgggtattacataaagagactggctagtttgacacaatgtgtacttttggggtaagcagtgggaaatcactttctgtaagtaaagtggaagagaattcaggtattggatatggtcatataggatttttcaacctttgttttgcccccatccctatcctaccagtatcatcacagatgttggcaatattcactcacttgcctgaagatagatattcatgtcaggggctacagatatgtaaaggtgaatgaagttaaatagcaaaattcaagcacactagttctgactgtgcaccctctctcactcagaaaagcactttggaatgcgagagtactcttatattgacaacctttagttggttctaatttataaaaaaatataaaaatatttagacaatttggatattttatatctatgccacaacccattgtcaaatgattgagatatcattgtttggcaacaatgaaactgaaatcaactctaagagtaaagagtacgacttttaaagatatttggttaagagtaatgttgcaaggcagagaccaacattatagaagttctcaacctgtgtgctggatatagctaaaatttcccaggaccattgaaagaaattctcaaatccacaaccacctcaagtgttgtctgtgaatcaaaggagtgatgcattacccacaaacatgtagtagacattttttaagtgatgtagatgctactgcaattaataaatgcaaaattatattacaatattactgaattcagaataagttgattttgtcactatttttctcaatctacgcatgctagatataaagttattatatagagacgtaacatttttaatatttcagaagcatgctcatgatattgtaaaccaggcactgttaaaagatcactggattgggaattaataaacctgggatctagtcctcatttgatctcttgttggctatggtttgggggttttgggcaaactattcaaccttttctgccttggtttaattgataaatgatggtgttttcccagataaatcccttcccaacttaatattaccagatgtagcatctatggtttagaatgtacagtataaattaaccttcctgaagatcttcacaagttactataacctatattttcatggcactgaaaactaagtttttgatagcttacgtttttataaataatttacttactcatttttatcataataataaatctgattcactaatcaccaaaatatcatttttgaaaatagatgcatgaaaggatccgaacttgttatggttttatctgttcaagtcacctaattttggtagccacaggcccccattgtcaataggggaagattatccattttagcaatacagtctctgataacttcagcccatatgcccttcaattccacttttacgtcagattgaatgggaatgtgaggcccccagtagtaaactaaccctactttctctttggaaattggtctttctacctagctctttgcctctgttcacgttcttgtattccacagaaaatatatacattaggtgttaaaatcacaatgattaacaatttttaagtagaaatagttattaagtatagcataatcatgcctttgaattagtacaaaagtaggaaacagagctttagtgacttttttcattctttccaccatttacagggcaaaaatgaagaattttaccaattcaaaactatgcacatgtatagtttccaccagtatttagtagttatgtttctcaagatgtataattcctttcctttctgttttctgtagtttgataaaccctagataggagttaatgttgtttcagttaggtttattatttcttttatgtggtttaatttcatgcaataagctagagattttgtaacataacttgataaaaattttctcccttcgtatctttttgttttaaaataatggattaatatagattgtaattttacagtagaggaaatacattttacttttagttcttatctagatatcttaggaaaaaagaaacatcatttttaaggattattatttttctactaatgaaaaaaatagcatgattttccattctggactttgtaattaactttaccttggaataattgaatcttaaatataacttcattgaaaattttattttcaagtaacattttaaaatgcaaaatttgtgtgatctctactaaaaagaactctcacatcccaatgtgcttatagctacaataattggttaaaagagacaaattataaagaagatataggttgtgacattgaaattacaaaatgtggattagggaagtaagcgtgtagagttttgtatgcaatcaaagttaagttattaccagcttaaaaaacccttacgtaagatgtaaagaaaagcaaaaacctatagtagcaaaagcaaaaacctatagtagatatacaaaaggtaaaaagtaaggaatcaaagtatactactgagcaaaacagtcaaaccataaaagaagacaacaaaaaaaggcatatagaacaaaggatctacaaaacaattagaaaacaactttttaaatggcagtagtaaattcctacctatcaatatttactttgaatgtaaatggattaaattcaccagtctaaagatagagtggccaaatggattaaaacaacaagactcaactacatgctgcccataagagactcacgtcatcttttaggacacatgttgactgaaatagaagagatagaaaaagatattttggtttccatgcaaatggaaaccaaaagagaatggggatagccatacttctattagacaaaataggctttaaaaatcaaaaactaaaaagacacaaagaaggtcattaaataatgataaaaggatcaattcatcaagaaggtataacaattgtaaatatatatgcacccaacattggagtacctaaatatataaagcaaatataaagtgataaaaagaaagagacaaactacagtacaataatagtaggggacttctaccccaaattcaacaatagacagaaaatccacattaaaaaatcaataagaatgcattggactttatgctttagatcaaatagacctagcagacatatacagtacatctcatctaacagcaggagaatatacattcttatcaagtgcacaagaaacaattcttcagggtagatcatatgttaggccacaaaatgagtcctaacaaatttaacaagattgaaagcatgtattttatgtaaaacaacgccatcatggaaaaagtactagtgtaaacaaggtttaaatatgatttactgattgtttaaaaaggaattatcttagccctgatctgatgggatttcccctttgtaagcagcaaaaataagttcataatgaagcaactgtaataatacagcttcacagatctttctgaataaacagagttggatatgtttctacttcagaaaccatttactgtgggctcacagcttttccatacactctttacactcttaattttaaacccattcatcaaaaggattaagacaatgagattcaagtccaagacaataggaagtatgtgcatcaaaactgtcatgctaatgctctgaggaacattgttatttcaatagcataatttaaaaccactgaaaccatgttttatttatgattacctttcatacgttcaaaaagaatttgagatggtttggcagggatgtcttaaagaaacaaacaccaaatttttatttgttgtgcttctaacaagcaatttttcctacgtaagtgttacctgttttctccccttgattttgatctcttttgtatggttggtagttgtcgcacttctgggcatagtatggttttctacaagttaaataaaaacataaattgattttgatgtagctagttccactatttcagttagtgtgttttccatacctgcaattcataacatgtttactgacccagaacgttaaaactcaagtttagttcaatacagtcacttcaaaccaacttaagatagcagttacatttccaaggtcattatgaagacggagttcaagacttcagcagttgaatttgtcaagctcatgggtcttttagttacaggaagtgtgcatatttcacataagaaacagcaactctgatgatacattgaaactcaaatatacccaaggagtgtaaaactactttataagcccttaaacaataaatatgccaacaatcctctgcatactttttgtcattttttagagcattcaattgaattatataacatgtgataccaataaataattaactttttatttatttatttagagaatgattcttgctttgtctcccaggctggagtgcaatggcatgatctcagctcactgcaacctccacctcttagtttcaagtgattctcctgcctcagcctcccaagtagctgggattacagccatgcaccaccacgcctggctaattttgtacttttagtagagacagggtttcaccataatgatcaggctggccttgaactccggacctcaggtgttctaccacctcagcctcccaaagtgctggtattacaggcatgagccacagcgcctggcttataattaactttaaaaaatattctactatcgaatgcctgaaaaaatcatattacttctatgtattaaaaacaaactattacgtaaatagaccagagatacggtgtcagagatgagattccttggcaacagtctctgagacaaaaagttgcacacagaaagtattttgagaagtattgttgctatttataaggaagtgaaggaggcagtattgggcagagagaaaagctcatccacactgcagttgctactgaggcttcagcccatgtgacagggacactggagctgggatggtctttcagagttctaccaaattgaggcaaatgggcgagacttttgtatctttgcactagccaagagcaggcaccagggagaaatgcagctgtgatccttttgtagatattattattctggagtcaatgcaaccacaccacaaatactaggaataatattggtagtgtgggtgcatcgactccagaagaggatcttgatgaagcattacagtatccactacagagaggcactggcatattctgcttaccccacaaatattgcaatgaggatgcaagtaggagtagtgaggacataaaataaatcgattattttccactgggccttaatatatcagaaccattggaatttacaggatgatatttattatagtactcaaaaaaatctcttttaaatctccttaactcagaagggaattttaaaaagtccacaattcacctggtctatgaattcccttttaaaataaaatgtggtttaatcaaatttacaagaaaaaaacaaacaaccccatcaaaaagtgggggaaggatataaacagactcttctcaaaagaagacatttatgtggccaaaagacacatgaaaaaaagctcatcatcactggtcattagagaaatgcaaatcaaaaccgcaatgagataccatctcacatcagttagaaaggcgatcattaaaaagtcaggaaacaacagatgctggagaggatgtggagaaataggaacgcttttacactgttggtgggagtgtgaattacttcaaccattgtggaagaccgtgtggcgattcctcaaggatctacaaccagaaataccatttaactcagccatcccattactgggtatatacccaaaggattataaatcattctactgtaaagacacatgcacacgtacgtttgttgcagcactgtttacaatagcaaagacttggaaccaacccaaatgtccatcaataatagactggatacagaaaatgtggcacatatacaccatagaatactatgcagccataaaaaaggatgcgttcgtgtcctttgtaaggacatggatgaagctggaaaccatcattctcagcaaactaacacaggaacagaaaaccaaacaccgcatgttctcactcataagtgggagttgaacgatgagaacacatggagatgggggaggggaacatcacacaccagttgggggattggggggcagagggagggataacgttaggagaaatacctaatgtagatgaagggttgatgggtacagcaaaccaccatggcacgtgtatacctacgtagcaaacctgtacattctgcacatgtatcccagaacttaaagtataatttaaaaaatgtggttgaaaaacaaaacccacataatacaaactttgccagcttaactgttttatgtgtacaaaccagtagtgttaactatacatacattgttattcaacagatctctagaatgttttcatctctcaaatccgaaactccaaacccactgaagagctcccattgctccctgtaccccagcactggcaatatgaccactctactttctgtctctaaagagtttaactactttagatacatcatataaaaggaagcatgcagtatttgtcattttatgactggcttatttcacttagcataatgtcttcaaggtacacccatgttgtagcataggaaaggatttccttctttttttgtggccgagtaataatattccgttgtgtcctataccacattttttaatccgtttatcaatcaatggacattttagttacttcaatttttggctattgtgaattatgccgcagttaatatgagtgtgcaaatatctctttaagatcctgtttttaattcttttggatatacagatgctcattgatttacactgggattacatcccaatcagcccatcataagttgaaaatatcatgtcaaaaattaatttaatatgcctaagctaccaaacatcattgcttagtctagcatactttaaatgttatcagaacatgtagattacagtacatctgggcaaaatcatcttgcaacacagtacatagtagagtatcaattatttatcctcatgataaatatcatgctgcaacccaatatgtcagaagagagtatcatactgcatatttactagccctagaaaagatcaaaattcaaaatttgaagtatggtttcttaatgaatgcatatcgctttcacaccattgtaaagtccaaaaattacaagttagaccttagtaagttggggactaaccgtacacccagaaatgggattgctggattatatgataattctatttttattttttgaggactggattatatgataattctatttttatgttttgaggaacttccatacggttttccatagtggctacaccttttcacattcccaccaacaatgcagaagtgtttcagtttctccacatccttgccagcacatgttattttctgtttatgatcgtggtcatcctcatggttgtgaggtaatatctcattgtggttttcgttcttcatttgcatttccccgatgattgacgatgttgagtatgttttcagatgcttgttggctgtgtatatattttctttggagaaatgtctatttaaatccttgcccattttaaaatcaggttaattgtttttggtgaattccttattaattactcacctcagagcctttcttcttaaaatacagatttctcagaacctttcatctaatttactaaatgttgatcttgaagaagtattttaatttatctgaatttagtttcccgttctataaattgatagtaatcatgttttccctatccacaccagagtggtatgatgaggaaccaatgcagaaaatgactaaaaaggcatttttatgctgtccagatcttgtgcaaatatattataattgatttgaaccaaaagaatctacattttaagactatttaatattgtcgcatttacattgcactaatggttcctcttttttctcactgatgaagttctagattgaaactctgaggaaactgtaaatcacagttacataactctgttatattaatttatataacttctctgtctctctctaaatatatatatttagactatatatacatatgcatatatatatttagagagagaacgagattacacttaaggactctgcttagtacattgcaacttgcacctcattctaattgtgaaaacaacaacaaattttgattgagaccctgttatttttcagacctttggtcttgtgaggaaggaaaagatgattctgatacttatctcaaatagcttatcatctcctctggtggatgaggcttgtgagggcctgacacatggtagaggatcttattcattatataacaactttcaaaacacatcactaattatttttctgcttaaggtgaaaacgtagctctcccaaacaaataagagatttagactgaattctgtagaaaacactgcttacctcattttgcttagttttcactgcagagtcttgtctctaacattcaggtaggaggaactctattttaaaaaattgaataaacaaacccaaatcagaataaattatttaattcaggagttttttaaggtgctcagaattttggtagaatagcagtgtattttctgtaataagaactacacaatgttctctagctggttatactcaaatggttatatggattttattctgatatcagttttgcaattgatgaccacccttcatcaatagcgtggtctttattatggtttcatctggctttttcttcccttgtcttctgcactgggctgcctacttcttggctcttattattacatactctacttttttcatatacaaaggtcttagtgcattaatagtgagtttctgctaaaagtgttactttcttcaaatatcctgtcaaatgctggctgcctgatttattgacctcatagagtgactatgtgaatcttccattctctgtggaattccattccacattttaacttaaagactccgtcttttccagctgtgttctctctgctggataagcatttttcttttaatttctgtggtaatgggaagggaattttaaatcctgttttgcgtacaagtgtttaacaggtaaaaatggatgctgtgtcagctatctattgctgtgtaacaagctaccccaaatgtagagacttaaaataagaatcattttttttttttagctcatgattcttgattctgcttggggcttggttcatcgaggcgattcttttgctagactcagctgtgctcattcatgcactcgtggtcagctggtagttgatgaccacatgtggcattcatatgtctggtataactttttggttataagttgagacggtgtgggtgacaggatcacttgcctgtaattattcatcaggctagcatagttccatagcggtggaagagttccaagcatagcccaacacccaagcattgttaagcctctgcttatgtcatgtttgctgatacctcattagccgaaacaagtgacttgaccaatccatattcaaggagtggagaaacagactatggctcttaatgggagaatctggaatatctcttgacaaaagtgtagatgcaagaggagaatctgtggacatttactctccagcagagatgttgtcatttttgtcactaagacagttcctgtgtaatattatttattattccttggcagccataagtttgtggtttacttatggatacttcagtgcctgcccaatatcatgttggaaagagaagcccttaacaatttctcttaatttctacttctgaggaatgagaaaaaaaaaattggataggcataaatgatttccagcacaaattctaagcagctatttgagaggtgggtgggtagggagagatggaaaatccttttaattgagacatgctcaaccataagcaatttttctttcctcaggagacatttggtaatgtcaggagacatttttggttgtacatctaggagggagctctggccagagatactgacaagcaattctgatcctacaatgcacaggacagccactcacgacaaaaaattatctgggacaaaaatgtcaatagtgctgagattgagaaaccctgcttttcactgagcgcatgtagatgaattcatataatgttagttatagaagggcacttagatgatgccaactaaaacaggaaaaggcaatgattatttctctattcaagttagtgaaggaaggatatgtttaaagtcaggttggagatatttctcaagggtaatatttaagttgtgagtggatgccagatgcgcttgattgttacaatccatatttttatagctatatcaaatgatcttctctcccaaattaaaatggatattagatatatttcatggataccatatattataagctatagctcttagaagtatttgagtgattaataattcttgcatattgaatgagacatgtaagaaagatacctgatgtcctatgattcttagaaatatgtgcagtggttaagcacattgtcttggaaacatcacttgttaatgtgagatcctgaacaagtttcgttaccttggtaaaagggggatgataacatctaccctgaagatggtttggtaaaggtgaaataaaagagggtttatgaagaaccttgcctagcacataagaatcactgagtaaatgatgggggtgatggcagtgttggtggcaattatcttacttgtaagtagtagcaaatatttatttggattatatttttaatagcaagaaagaatctattaaaatgtaagcaaatagcaccattaagctttaaaaatccatagctcccaaacttaacatttttttttcttaaatccagaaatacaaatggttatcatgaatccttgagttccagtactccggccttgcctatgtagagtacaagcatttatttttctaaaatgagaattattgatgttaggtgtgtcatatattttatttactctttagagtgacagaaaagaaagcagacaaaaataagtgtttatgtgttcatagtgtttgtttctaattttccaacttgtatgtgcagactgtaaatatttagagggaagacatgaaattcttccttacctacacaatagattgtctttcttagaatctagacatgatttcaaattttcttcagaagttctcttgaattcttacggaattcattaatccaaatgccatcctttcaaatattcaaaaagaaaatattctccaatgttgcttacatggaggagagttattttatctactagtgagatggaagtcgctaacaatctttcttataccccatagtattaaatagtaatgcaatttgatcacatataacattgctctcctgttgacatggaatgataaggaggaagggaatatctaacagcactttttagatattctctcatagaattgttaatgtgagcccaataacttattttgtaagttgagtgatttttcaaatataaaagtgaagcaaacaaaaaaagttacccacattcattcaacaaagctagaaatagagtatgtgcttcttgctttcttatcaaccaaaggagacctgtgaattacaggaaaaccatgtgtgaatacttcaaaggaaatatgccaaacacattgtgtgtgtgttttaaaagatttagtagctcctttaaagctctaagtaaagctgttagtctgactaatcatgtacccctgaaaccaattaaattttcagactagagaagtgttcttcaaacacttgaaaaaaataagagttccttcctaaagccaacaccttttaattaacaaaatactcagagcaaagctgtggtttgcaatagtatattacacctactgttattcatgctaccattctggtgtgccaaactcaattcatttcaactattttgagcttgattttctgtctgcttaactatggagggaaaaccacaattttagtagagtcattttaattttctaatgaatgcatgagaaaggtattatgctacatagtatgtcctcagactattcagatgccctctctctctcttgctctgtctctgtctgtctctctttacacacacacacacacacacacacacacacacaatgtgtgtatctatctgtctacctagatatacagtttaattttgtacattgtaatacatctggttctggcataaggtgattgagcaaaaaacaaacaaacaaaacccacccaaatctgttactggaggaacctttaatagcataacatcagaaagactattttcagtaaggaccctaggcaggaaaagacaattcctccaatggacttgagaagaatacccttagtctctgaggtggttagagaggctgagatctgaaccagctaataccagagccagcttcttgtaacccaagataggggcataagaaacggggtgaatgcccaggcatgaacagacttggggttaagattaaatagggtacacgggaaaggatttccgccagctggaggggaagccatttcccatgctccttagggatgacaacaggagacccagcccagaacatcattgaaaattctatgtaataatttatatatcctaactctttacccgttcgttctagattatggattcaggcactcttagcaaaacaaatcctctttcagtcttttaaaatattgacttaacaggaaatatccttggcacaacaatacgaccctgcctgacccttagaactgtgaacaggttgctcagactgtacaaaaccactaacaaatctgaccagcctacacttcactgaaaaaggtgatttgcatatatttctagtactatgacatggtggaaaagaaagaaccgcatatgtgttagataaaggtaaacgcatctgaaagtgcagtaagaatcaatgtgatatatacaataaaataagataaataggccgggcatggtggctcatgcctgtaatcccagcactttgggaggccgaggcaggcagatcacgaggtcaggagatcgagaccatcctggccaacatggtgaaaccccgtctccactaaagtacaaaaaattagttgggcatggtggcaaatgcctgtagtcccagatactcaggaggctgaggcaggggaatcgcttgaacccgcgaggcagagattgcagtgagctgagatcacgccactgcactccagcctggcaacagagcaacactctgtctcaaaaaaaaaaaaaaaaaaaaaaaatttcaggacttcaaaacttctgtcctttgaaacactttgattaaaaaatgaaaaaaatatatacatgcctgaatccagaggcaagtctttttagaaaacataaaatattttaagtaatgtttttctgaacagaaatggctctaatgtgagaggtcgatgaagattagcctcttgcttctttatgttttaaagtatattccttgagacccaaagtttctgactttagaatccaactctcaactactatcagctatcctctagacactttcaaaatcctccaaaacctaatagtggtgcaagattttgtccttcctagtgataactagatttaagtaagaaaacgttaaagactaaaaagtgtttaggacccacaagaaaggtgtaattctgttcctcatggagatattttagttacacacttcttattctggtcctccccaaaacacagaaatctagagttgacatttaaagagaaaatgagatttttgtctggaaacaggagagaaaaagttttcaagaagtatagaaagcgtatgaaaggacacaggtttgaaatggcctgtgctcatgagagaatgcacaatagacatgggtgtggaggagcctggaaagaatggagagaggtaagtctggagggtcaaatctggttcagagtacagagcataaaatcccatacgaatgtagaacatgaggagccaataaccattgtgtgagaaatgcaggaaaaagaggaagaaaaaaatccacatagtgtacttacagtcagaacaatcctaggaggtgacttacatgtatgatgtcataaaatccgtaacacaattccattagattggtactgttttcatagttacacaggtgaaaacttttgagggtcaagatgttcattgtagcaggcatagtataattccttacctcaagatgcctccaatgtcagtgaacattacttttccaagattgtctatttaggaaaaagtaaggccagttgtctatgaaggaagtactattataatcgccactttacagaggagtaaatggagattcagagaggttaagtcatctgactatagttacacagctaaaaaaaaaaaaaattatagagcaaggattcaaatacaacaatctggtcctagaaagcctaaatattctacaccctgctttctgattcagagctatttcctgcttttctcccttcgataggaaaaaaaatgtatgtgtgtggggttgggggcaaataaattgactggctgtattttctctctttaatatttgatctttcattgtctgctccaagcagtgggtcttcctccattatcttctcgtgaaaatagctaaaatcacctaactagtaaaaacctaggcatgttttgtgttctagcctccattcttccattctaatgggtggctgttaaattttagtactcattgtatgtagaagacctctaagttcactaaagagcttactgcacattgacttttctttagattcaaagggaatcaattgagcacctcctatactccaggacatgtgcaagatgcaagagatagagcagtgagaaagtctgataaggtttcccctccctttcccagcagtgtacagatagatgttcttcaggtggtgcatgctggagaagagaagaccagaaatactggcctgacgggtctatagatgagattatctgcccatgactggcgcagggatggccgcattgctagacctctccatcatcctctgaatatgcttcagctaatttatcatcccaatggcatatttagtcatcatgaaccattctctctttttgagtctcaggccctggccttgcttttcaatagacttccaatagattccttcctccttccttcccttactgcctggcttcctgacttccttccttcctgccttcctgccttgtcttgccttgcttttcaatagattccctccctccctccctccctccttcctccctccctccctccctgactttcttctttccttcttcctttctgtctttttccaaacgtgcttttcaggaaacagtggtctgcttgttgaagtctgataattctctagttcctcatccttcactttattgaaatttagtgtgacatgatcatttccacctcattaggtacttctttcatggtcagaagtaagtctggagaaaaaaaaaaaatctcttgtctctgctcttatttgagggtcaaattttcaataagtcactttttaaaaaagcattttctgacacttcccataagcttgaaatcctcctaaattgctgtatattgcctcagtataccttgtgtatctattttaggaacactccatccacatttgccagtcagcctggtgttctgcagttagttcctacagtgatattttaatttagctctcttttcatcctcacacatgcatcctctctggatatttagctcctttcctggaatcccttttaagatttctagatctttttgcttccatgatttcttctcctggactgtgacacaaaatgctatttcttctttacattacatttaattctttctagaaagagcctcagagtagtcagatagctttgagaaacaaaactttttctttattgcctcactgttactgcctttcaatcattgtttcgtgacacaaatttttttattctctctgacaattaaaacactatttttttctgtctgcattgatcaaaattagttccttcattcatagaaaactcttggtgtccctgagaagcttgagagacaagaaacattcttccattctactcatcttcttctctaatgaggagacaaccttaaaagcacagttacatagccataaaaattaatgattggctacctcagaatgaaaattcaatgtctcatttttttttaatattcttagaatcgttcactggttgtccagtgtgagtctcctgttgagatgtcttttgcagctttccttgaaacctttcattccaaactacatagtccaataattttgccaccaatcttctggttatattatgctcttgagtctgttgtctataaacttgattaggcattccttcccctcaccactcacctctgataacccagctgtgtgttggtatttagtatcaattcacaccagcaagttcagccctcttcaatcaatatagggccacacacggacttttgactgactactccccaagtatttcacattttggggccttatctccagtttctcaccacagttgttcatcactgtgtttcttactagccaggcgtttataaaaacagtaatacctaacactattgatcacctactatagtgtcaggcgctgtaataatattattgtgatgatgatgattatgctgctctttctggcattgtcatacgtgtattgcttgtactactcactgaatctacacaactgcccttatgacatttaccctgttattattcctcttttaaggtaaatacatgaaaaatgcttcccactttgccttgcttactgcttattgctagtactgaacaaatgttagaactgaaacttagagaggttatgtggctttaccaaggtcccagagttcctagggcagagaacaggattgtctaccagacattttaattctagtactatgcatcttaaccattaccataggctgacttactctacagtgtccaacactattcatattaagatttatttaatgactttgaaacagtatttcatgtctaaatagaaaaactactaactcgcatttttaagaaaatattgtatcttggtttttcttcactgctggccagtttactaacaatctgaaataaaaagaaaaaaatatgataaactgctcccagtataaaatacagagctaagacaagaacgtttcattggctttgatttccctagggtccagcttcaaattaatttacttcctattcaagggaattttaaatcagaaagaagatcttatcccatcttgttttgcctttgttttttcttgaataaaaaaaaaataagtaaaatttatttccctggcaaggtctgaaaacttttgttttctttaccacttccacaatgtatatgattgttactgagaaggcttatttaacttaagttacttgtccaggcatgagaatgagcaaaatcgttttttaaaaaattgttaaatgtatattaatgaaaaggttgaatcttttcattttctaccatgtattgctaaacaaagtatccacattgttagaaaaagatatataatgtcatgaataagagtttggctcaaattgttactcttcaattaaatttgacttattgttattgaaattggctctttagcttgtgtttctaatttttctttttcttcttttttcctttttgcaaaaacccaaaatattttagctcctactcagactgttactctggtgacacaacctgtggttactaaggaaactgccatctccaaactagaaatgccatcttccttgatgttggaggtacctgctctggcagatttcaaccgggcttggacagaacttaccgactggctttctctgcttgatcaagttataaaatcacagagggtgatggtgggtgaccttgaggatatcaacgagatgatcatcaagcagaaggtatgagaaaaaatgataaaagttggcagaagtttttctttaaaatgaagattttccaccaatcactttactctcctagaccatttcccaccagttcttaggcaactgtttctctctcagcaaacacattactctcactattcagcctaagtataatcaaggatataaattaatgcaaataacaaaagtagccatacattaaaaaggaaatatacaaaaaaaaaaaaaaaaaaaagcagaaaccttacaagaatagttgtctcagttaaatttactaaacaacctggtattttaaaaatctattttataccaaataagtcactcaactgagctatttacatttaaactgtttgttttggcactacgcagcccaacatattgcagaatcaaatataatagtctgggaattgattattatccactcttctaagttgtctgtgccaatttgccttctccaatgataaggataattgaaagagagctataacttaaaaagagaaaagtaacaaaacataagatatttaaaattaccctagatcttaaagttggcatttatgcaatgccatgttcaaatgaacatgtttttaatacaaatagtgcatttttcagcctcagtgtaatccatttggtaaaattatgacatcaactagaaacattagaatacattgatgtaaatatggtttacctagctagatcaaatatactatatatcttttatatttgtgaatgattaagaaaaataatgttggaattgttatacattaaagttttttcacttgtaacagctttcaagcctttctaaagaaatacaaagttgtgctgaaggtatttaggtattaaagtactaccttttgaaaaaacaagaagtgaggcagacagagtaaggggaatttctttgtaaaataaacttcaccaattccataggaataaaagtaatttgatagtaaacaacctgcatttaaaggccttgagcttgaatacagaagacctgaattcagtgccatttgcaaatgatgattgtggtcaagccatctctggatcttcgtttcctattctgagtacagagcatacagagtacacattcacattcacaatatagttatggatatggatgtatataaatatatgtaaatactacatatatgtacctaaaatttgttttacttctgctttaaaaaaagtaattatagccacatttttcagaaaaagtaactgaggctcatagatgtcaaattcccagtaagtagcagaacaaggattcaaatccaagtccatttgattcctaagcttgtgttattacttgctactgcagagagtatacgtagcaagtaatatatgtactgcaagcaatacatactattgctgcggtaataactgtaactgcagttactatttagtgatttgtatgtagatgtagatgtagtctatgtcagacactatgctgagcattttatggttgctatgtactgatacatacagaaacaagaggtacgttcttttacaataccatattgagttatataatactcccaggacttttatttaccaaaggaaacaatattttataatgtttaaagcccaggttttgaagttacattgtctgggttcaaagcttggctcccaagctgtgtgaccttgagtaagttattctgcctacctgagcccaagtttatctagctataaaatggggatagttgtactatctgccttgcagtttgtcatcaggattaagttggttggtacatgaaaaatgcttcccactttgccttgcttactgcttactgctagtattgaacaaatgttagtaattatatttggttccaccacgaactctagaaatctaaccaatgatggcatttgtattatgcaaactgtatatcacatcataatattatatggaaatgagagcttgtttccgcttctgtagcctagtctaccattgacatagcttcctgcagaagttaccagataatagattgggagagaaagtccacacttccttgtgacgggtttgtgagtccagcatttagggaagccattgatgtgctcagtagtctccagagttctctaaataaatgtgtccttttcagaaaggactactgatttgatgccccctcacagagatcgtctttaaatataggtcaaaaactaatgtagagggccaggtgcaatgtttcacgcctgcactcccagcgctttgggaggctgaggcaggtggatcacttgaggtcaggagtttgagaccagcctggtcaacatggccaaaccccatctctactgaaaataaaaaaattagctggtgtggtggcccatgcctataatcccagctactagggaggctgaggcaggagaatcacttgaatcctggaccagaggttccattgagctgagatcacaccattgcactccagactgagtgacagagtgagactccatctcagaaaaaaaaaaatttagggggaaaaatcaaaagccatttctgagacacaaaaatacaggatttataaattatatatggtatatataaaaatatttttaaaatagtatatatagcatattatatataatgatatgtaatgttcatatattacatatttataaaaaaatctaatctcccttctcttgcttgctgaatagggggatgctttgcctgcctcttcctcttatattaaaaaataattcttaaagacattgtcagttcttggcttttatagcctcaatcaccaaattgtcggtaaaatggccctaaataatcattaaacaaatgtgtgtgagaggggaaataagaaggataagtaagtatggggaggattttgttataatttcaggaaatcaatatcaattttatgtaaagttttaaataaagcaatcccaactttaatgtttgatgtgtgaaaaattaggcaaaattccaaaagggctttataaactgaaaaaaactttactaacacctatccatttttattattttaaccaacttctattgagctgccactaagtacctgggaaacataaagttgtacaacatagaatgtgcaggtaaaagaggttgaaggaagaaaataataacactatgatagagataaattttaggataatagctaacacatatgatatgccagtcattgatctaagtacttcacgtgaattctttaatgcttacaacattactgtgaggtagatagagaggcacagtaaggataataacctgcctgagatcgaggaagaaagacaatgatgagatgtgaactcaggcagtttggttccagagtcctctcccttaaacctcatagttttcaacttctctgatattgtgtgggtgatgctgttggggctttcttcagggaaaactaagccaggagagagaatggatgctagtgagatattcctgaagaaggaaaaacttaagccaggcattaaagaatgagttggaattacctagctagataaaacgagaagggcaatccaggcagagggaacagactgtgcttttcactgaggtggaaaaaaaacagagtatatcagaggaattgtgattccatatggctgaagttaagggtatatgatgaggaagaaattgatgaggttgaatagagaggactggggctaaataatgggaatcctttgttgccagactgaggaattttgatgatggcctacaggcagtggcaactctgaaaggattgtaaacaggaaaataaaatcatcacatatagtttagttgcctatcaattagagctctctggatgcaagcaacagaaatcattctctgattaaatcaggcagaaagtaaatgtgctgtaattagcacaaaggcattggaacaaaacttacaaaaggaaaaagaatctgagcatgcctttctgggcatgtggctagcaagaagtattccagtctgtttgtgatactctcttttctccatcctgtgtgtaactctgttcaaattttaaagtcttaaaagagagtccagttcaccttgtttgggtcacatgttaatacatgagctagaagggagcagaaaactttgatttaaatccctctcctcccaaagtctcaaaattagggaaaggcaattctcctgaatagaaactgggttctattgacaatagaagaaggaaatgattctgaccaaccactaaacaataattgtccactgaactcagtcaagaacatgtagaataagttggaggatagagcaaataaaggagatttgtaggaggtaattattatgatctaaagcaagcttgttcaactcatggcctgtgagccacatgcgtcccaggatggctttgaatgtggcccaacacaaatttgtaaactttcttaaaacatgagatactttttgtgacttttttttgctcatcagctatcattagtgttagtgtattttatgtgtggcccaggacaattcttcttccagtgtggcccagggaagccaaaagattggatacagctgatctaaagcaacaggttcatctactcaacttcacaacgtgtagacctgaaataaagaccattcatataccaatacctgaaatataaatttgtttgaccatgacacgtacagtaattggttctcaataaatgtggatagcttgatggataatgtgaatgcaatgtgataaggaaacttcatattcaacaaagactggaatgtgaggattataattccaaagcaccagaagatagataagataatgcaatgagacattttatgactcaaggcaaagttagttatgagattcagaccaaaccttagacgtgcagtaattgaaatatttgccacagaaggggtataaggacatgacattcaagtaagctaacctttcactagctttagactttgaactcagaaaacatatttggtgaaaagcttatggtcccctttagtatgtattgcttgattaaagtattattttagaaaatggtgagctgcttccattttgaaataaaaataatttttactaagtgaattatattcagtgaaaaaaatggaagctacaattacaactttaatttttttaagttttaagaatacagccatttaaaaaaattaagcaaatctgcttcattttagacagtagaaaatataccattatcttttagaagaatagagatgtgaaatatgcaaattaagcctttagaagtaaagcacacatgaagttcaaagtttaatttctagaattgtgaatcaatagcagtggatgatttgtactttatagcttagtgtcggagaaatctgattaaaaaatgctttttctgtttcatcacataaacataagtaaaattgctctgaaacaacaatatttgacaagaattagcagttttcttttttgacataatctatcaaatgaagggaaaaatatgtcctgggttttgctttgagagtgattactaaatctgacccttaaggaaaggaaggagagaacaaagaagggaggaaagaaagggaaggaaggaggaggaaagggaaaaaaagaaggaagagaggaaggaaagcaggaaaaaggggaaggagagagaaaagacaaaagaaaggtagcaaggaaagaaaaaaagacaagaaaggaatattaaagaggacaaaagaggagtgaggaaaggaggaaatggaagagggatggtgggagacaggagggagaaaggtggagggggaaatatgaagagaggttcccagcagtggagactagtgttgctatcaacaaatagaatttagatggccatatgatattatttttcataatactggtgtctgattgcctgtgctgagttaattgtagtcttttttttcaattccgtttggccaggtgttcaggataattcaccacaaaatctcaaccactgcacttgtattgaataaagaattgagttggcaaaggcattttatcctccagtaagacctttccagattggggttgagacaaattggccaatctggacaagatgataatagcattgttcaagattaatttttaaccacacattgcactgttacctgggagatttcattatctaaaaattgaatgagcagttttagtgggtatagtgtatatttaaatgggacataattacttgaatgagtttaatttttgttgttgttgttaaggtcaaagtacttaaaaattatgattttttaaaactctgtctatacacaaaaagcatttgaattagctacagaataattctgattataacttttggtgaatagattcagtcaaaatctgattactaaacaacttgtgtagtatagccctggaagaattgatgggacaatgtgtgggtaaagtggcattggctatttaaactaaaagcaatacaaaacagaatgtttcttggttttattctgttgtcacaaacccagcagaaagtggctattacaatagtttcccttattcaacaaatgagagaagttatagacaatttagttaattgatctaaagtcacttagtaaatgtaattgtcctaacataaacccagacccccagacctcttgggaatagataatgtttcttacttcttttctatttcctcagccacccccctcaacttcttacacatctcatttctccatccaaattataacaaaacaaagcaaacatggtttatttccatgggcatcaaatggatttcacgaggttgggtgacagtcatcttagggtgaggagattgattattctgtttttctctttcatcgatcaacaatccagcccttctcatctcatcatttcatttctgcacaaacttgtttaagaaataccaattaagaaattaattaagaaattaatgttgtaatctgtttggctgaagatatttacaaattttgtgctttaattatcttccaacaaatgtacatgtctctggtagacagcttgcgaccatctggatgactgatccatatttatataattttctttctttacctaatgagaccaaatccactattatcttcaacgaaggatgtaaagatatgtcagtgtcagtaatgtgacttattttatattctctggtcataacaaaaataaaccgccccttaaataaaaaggtcatagagttgcaaacacacacacacacacacacacacacacaaaatcatattttctaagtctcctaattacctttttatggaaaatgataccatatgcttttttcttaaagaaactacataaacttataaactatactaaactacacatttcaaagtctatgaatggaaatgtgtatcttattatattttaattcaattcactgtaaacttttctgtcaaaatcttatcaagcaaaactgatccaggatatttacatgaattctgatggaagtcactgtactgtgttttccataaaataccagtgggattctgataaggaagtttatgtttgccattgtgtttaaatagagaattctgggccgggcatggtagctcacgcctgtaatcccagcactttgggaggctgaggcgggtgtatcacctgaggtcaggagtttgagaccagcctgaccaacatggagaaaccccgtctctactaaaaatacaaaattagccgggcgtggtggcgcatgcctgtagccccagctactcctgaggctgaggcaggagaatcgcttgaacccgggaggcagatgttgcagtgagccgagatcacaccattgcactccagcctgggcaacaagagcgaaactccgtctcaaataaataaataattagagaattctatttacaaatttcctttcttggatctagttagggctcctttatatggagtgatttttattgttttcatagaaatacgtagaatctgggtcttctctaactttcttacaggaaagcaatgtaataaggtttttttttaattttctgaaagttatataatgttattgttccctaaagtttaggacctgccttttaggctttccatttcaccataacttttggtccttaaagtctgtaattgaagttacagtgtgttatgatgtaaatttttcttattattacctttaatgttagggtaatgttaactaatgttaatgttaggtatatggttgtttttttcattccttcgttcaacaaattgtctttgaaacccatgttacaaagcactctagagtcaggttgaagactattaagaaaggagaatagaaagagacactagagtaataatttggatttaaatttgatttccttgtgtatgatagtgaataagtgtgaataagatgaggcagtgatcacacatcactattagtaaaagtgtttctgtacctgtatccacacttttatgtatatggttacttatgttaaagtgatacatattatataaaattaacgtatacattaagtagatattttaatagtctgtaattaaatactactagtattttctttcctccttcaagtgcttacttttgatacctcgagttacagtgtcataaagattctttagaaatatattgactgtcttttaagagcttttgatacaatactgagtttacattcatctgttatttattgaacacttgctggtgaaaggcatcagtgttatctgctcttagggaacaaaaattaaaaagggataggccctaattttagagtgtatcctctataagaaaaacataaaagatagggcagtcatggccacaaaagaaaaaagtgttatggtggtttcaatcatatatgtattagaatgaataaatcaactgatcaattgtgatttcttattctaaatatgtgcctgcctttttcatatagatgaaaattaagctatgtttatctttccagggatcttgttgatttttattcaataacttgggagtgaaagttgatttttgcatatgttttaatgtttttaaatttcataaatgaattgatcagtaatttccaaggtagtaatggctgcattgtttttgaaaaaaaaaaagcaacaggatttgattgtgcttttatgatttttaaagaattcattaaaaataatgccacggtttctaaaatgatttgagtcaatttcttattcgatttataaaaataactttgaatacaattttagtaattcacaaatgctttcagttcccttacctttatattttatattctgtgtaaacaagtgacataatatttaagaattatatatctcctatgatttattcaagaaaagaatatatactgtattatttatttcaagaacagaaatgctttgatttaactgtcatcttctctcttcaattatggaagcaaaataaactgtaatgaccaatgtaacccctcccccatatcaagttaatctatgttcaactccagaattatttttgaacactcaaactagaaattaaaaaaaattaaatccatgaagacgatttttgccaaaagcatatagataaattgagttgattctatacttaagaaagtggagaggagagagtaatttggagagagtaatttactcttaatcccatattttttccctaaatgtgaaagaagtagattgtagtgagagggaaaataacctgtagcaacttcattgaggctaagctttctgtcatgttatattatacgaaagtaatgaaatgcttccacagatagaatcagaagtcccctctgagaaattctacataaaaattagcctgccactttaccacacttactcaagtttgatttttttaagttatgtaatagatgttaggcactagaagaggacatttactgggggcaaagatcagtagttggaaagaatgcaagcaggcaagaagctatatataatgagattttacagtacaattgttttctaaatgaaaatgaggacgggtccagacacaatggctcacacttgtaatatcagtgccaggatggaggatcccttgaggccagaagttcaagagcaacctgggcaacagagtgagacttcatctctacaaaaaaatgaaataaaaagttagctggctgtgatggtgtgggcttgtagccttagctactcaggaggctgaggtgacatgatctcttgggcccaggagttcgaggctgcagtgagctatgatagcgccactggattccaacctgggcaatggaacaaaactccatttctaaaaaagaataaaatataaaactaaaataataaataaataaaaatgaggatatattttattttaacatttggaaactttgtaggtgaggaccatgcaaacattcaaggtgtgagttctgaccaaatccaattattaaccataccaatgacttaaggtttcttcacactccttaaagttgattaatataatgattatatagttgactggtatgtcacagcttgaagcctttgagatttattcctgccttttctgtaaaggttgttttgttaattccagtatgtactggtcgtttttgttttgttttgtttttgtttttgttttgtttttttgagatggagtctcgcactgttgcccgggctggagtgcagtggcacgatctcggctcactgcaacctccgccacctaggttcaagcgattctcctgcttcagcctcctgagtagctgggattacaggcactcaccaccacacccggctaattttttttatttttagtagagatggggtttcactatggtggccaggctggtctcaaatacctgacctcatgatccacctgccttggcctcccaaagtgcggggattacaggcgtgagccaccgtgcccggctgccaatatgtattggtctttttcatcaatgattcagtccaaaatcattttgtcctttaactatatattttcttgtaaagctgcttctgttgtcttgaacttttcttttcaaatgtatgttgtcatttgactttttagattgttattttctggtcctcgaaataaatttaaatttcctgtaaaggaaggtgtaatattctatttgacatagccgctaaagatgtactaggtgctttataaatattgttgatttactttatcttcacagattactagttttacttagtatttggaatatgacaacattttatagagctatattcatatatatgtttatcttaactgttaaatgcaatatgattcatgtcttgttttggtcaatgatgaatgaaagtctcctgagaattaaatttactgcatcgatgcaaaaacaatcataattttagacactctaagaattttagaaattaaaggattttttttttccagtttactctgttaagattgtgtttagctatgcgtgacagcattctcactacagtggcttatccagatagtttctttttctcatagagcaagacttccagaattatgtgttccagggtcagtgcagcacctccaaaaccgtatgtcccaactttttcctccaaccccagtcatctccaacatgagactttctttttgttttgttttgttgtttttgtttttgtttttgttttgagatggagtctctgtcgccaggctggagtgcagtggcgcgatctcgactcactgcaacctctgactccctggttcaagggattctcctgcctcagcctcctgagtagctgggattacgggaacgcaccaccacgcccagctaatttttgtatttttagtagagacggggtttcaccatgttggccaggatggtctcgatctcctgacctcatgatctgcctgcctcagcctcccaaagtggtgggattacaggcgtgagccaccgtgcccagcaagactttttttcctgtggtctcaacatggctactctgcctccaggcactatgtctgtactttaaaatggaagaagggaaaatggggaaagtaaaagcatattccagctgtgtcagctcctgtttgtaaggaaaaccagtgcttttctggcagccccacacagaagagtttctacttgaacagtgcattaaccagaaatgtgtcacgtgaccattcctaacttctaaggatcttgggaggattgagtgttttaactgaataggtgtgtttctttcttcataattcaaaatgtgaaaattggtaacttagttataaaaccttgctagtctgaacagaatttggatttttttagctaagaaggaaagaaagggtatcggataggcagctggctatgctagccaagatactcttaataatgcacatttttcttctttggacataagcagttttaacttagctaaatatgatgtgattgttttcctgtcttcttagttctgtttaaatttgtttcagaaatcaaggaaataaaatggagaaaaaactctattattcatgtctatctttctgcctctgaatatttttatgttggagaaagagaaagcagtaactttcataatagcttacatagtctgacaaattctaaacatgtccgttagcatcaatatacgtggtattaggtcatcagtttttatattctgaattattaagacccaaataaacccactgagttcaagagaaagtatacactgagcaataaaaacattaccagttctagcaatgataatcaaacaagaaaacaagtaatatagtctgtttagaataacatgttttaaagatcaagtttttcttccttaccaatgttgcctttcttgtaacacttttttttccttcttgagataggctttcctatcttttgtcacaaaccccaatatttacatggccattcgtagtctattcatagcagcaccaccccatggcccaaacttgtagatattgccctccttctatggttgttctaataagaataaccactcttgtctctcataatctcagctgttttgtgccgttaaaatggaaaataatgagtattaagatactaactaggggccaggcgcggtggctcacgcctgtaatcccagcactttgggaggatgaggcgggcggatcacgaggtcagaagattgagaccatcctggctaacacggtgaaaccacgtctctactaaaaatacaaaaaattagccaggcgtggtggtgggtgcctgtggtcccagctactcgggaggctactgcactccagcctgggcgacagagcaagactccatctcaaaaaaaaaaaaaaaaaaaatactaactaggtttcagtcatatgagatgaataagtcctacaaatctgtacagcctagggcttgtagttaacaatgttttatatttaaaactttgctaagagagtaaatctttttttacctgttattatcgtacatgcaaaaataatagtaaataaggaaggtaagagaaaaattttggaggtgatgcataggtttatggcatagattctggacatgatttcacaggggtatacagtcatgcattgctcaacaacagatatacattcggagaaatgcatggttagctgattgatcttgttgtgcaaacatcatacagtgtacttacacaaacctagatggtacatcctactatacatctaggttgtatggtatagcctattgctcctaggctataaaccagtacagcatgtgactgtactgaatacttcaggcaattggaacacgatggcaagtatttgtgtatctaatcacatctaaacatagaaaagttacagaaaaatattataatcttataggaccactgtcctacatgtatacagactgtgcacatgatagtggtccattgatcaaaatgtccttatgcagcacataactgtaattatctcgaaactcatcaagctgtgttcattaaatgtgtatagctttttatgtcaataaagtggttaagaaatcaataaagtggttaaaaaatattttgactaggaaatatactatcatttctagttgataaaagatctcaacatttccaaaattgtcctacagaaaaccaggttcatcaggtgttcatacatgatcctcatgaaaaggtcaaataagctgaaaaacatgcatagacgttgcctatcctagcaatctatgatgtacatctccatagtaaggtcactgaaaagtcttttaggaatgttagtattgttagctcagtatttctcagtgatttctccatggaaaccatttgtgtagagcatcttgaggagcacagctgagagaacattatcttagttggatgtgtatgtccctctgagtcacttgatttctctacatatgcttttaccaaattaatcttttagaaatcttttctcttcgcactatgtctataatttgtgaagttgttaccaggataacatttgtgcctctcaccatgatgtacctaccagggtccaagcagccattccttctctagagcaactgtctgagggaaagaatttaacacagcattctacgaaatcattttatttataaaaatagattactgctttacatatagtaatttatatttagaatattgattaattattaaaatctgcatgagagctttaaagagtagtacataatatatagcagtttgtactcaaactgtcttctaaaaaggattcactttttgtttgtattctattgtcctattcgttgatagtgttacgtaagtaattataaaacttaaaatctggaaagagaatgtggactcagaatgccatctcttttgttatttcaaatggattagaaatgaacatacatattcattttctttcattacacatccagagaaatagaatggattttataaatatgtaaaagcaaggattttgatcactgataaaaagggaaggtttggtcactaccttatttcattccttttttcttatccttttttttttttttgtcaattatttgatgacatctctgaacatcaccttttattcatgacaagaattgggtatcatggtaaagaacactgttaatataattcagttacttcaccccctcctgaaatatagagaagctttaagactatgtgaatatttttttctggttttcttgtatttgtagaaatagcatgagctttgtttaaagtcaggcatctaaaaccttgccctgtatgttattgacaacctgcacaaattttaggatctattctattacagtttgttcaactgtaaaactaggatagcaaactctatgtcatattttcgttatcagaatttaaaaagcatgttttaagatcttagtaaataataaatctctactctgtagttgaatttgttctatattctttaagaaattccctttgatggttatgccaacctctgtattacttttcttcacactttaactttgcgctgaaatcatagtagtattttacgttatcagtcaaaataacagtcatccttaaaacaaatatgaattttagatgattaaatagatttgtatggaggttcttcttgctaatcatagcagttatccttggtgaaaaatgatagacacttgaaaaaaccaattaatcatgatggctatttttgcatcataaataaagctttcaaatttgagagggaatcaaaagggcaatggtagtatagtgtctcaaagcccctttccaattgatggtacaaatttaaaaagagagagagagagagaaacatgtttcactgtaattgttttctaagagcttccaaaaaagcgtattttcttaatagattcaaatttttcagttggattgaaagggaagtcttggagtgtagtgaggagggcaccttctgttgagaggtgttcagacgacagagtgtgcccaaggccaaagatgagatggttttgcgaaagtcagtggccacaaacaggtgtgtttgacccctgagagatatgcaggaagtctaccccactttaattcttccaaatattctttaccttaattcccaagtacttgataaaggagcaatggggagaaaatatgcacactattatggaaaagttttgacctacactttggagagttttagattaagagcattctagaaatcagtcccaaatgcctagggtttacttacttaaagataatatcatagtttgggtgactgggaagcataccctgagattgaggtgagcatgcagtatgtctatttaggagtgttcttggggtcaacgtgtaggggcagagggagaagttgagctctgacgcagtcttagtaagggcctcagctgaccgttcagggagttcttaagctggaatgacccttcagaagtgctaggaaacgaagaaaggggactggatctttataaccccgtgtcaagtcatgcactggatgtgggctactccaggaaggcaacgaactttagcaagatgattctctttagccacgggaatttccataagggggctgctatggtctgaatgtttttgtccctccaaaatgtgtatgttgaaacctaacactcaaggtgatggtattagaaggtgggggtttgggggggtgattaggtcatgcgggctctgccttcagaaacaggatcagtgcccttataaaagcggctccagaaagcttccttgccctcccaccatgtaaggacacaccgaagatgccatttaacaggagtgggccctcaccagacaatgaatctgctgatgtcttgatcttggaattcccagcctccagaactataagcaataaattctgttgtttataaattacccagtctaaggtatttagctatagcggcccagactaagacaagggctgacagctgaaggctgtctaccagcagcactcctagcagctggggaactaagtccttcatttccaaaggggaatctaggcagcatatttacagcttttcactacagataagctcattatttcaaatagggactagcaggaaaaaattaaattgcccaaaatttagtgggatgctgaaatagattgtggtgtgtaaattggagtatagtgaggagagcaccttcaaaccagtatgtactacatgatattgtttttgttgcaatatttattatatacccaaacacacatatattacttttagaaacacacaccacatatatatctatgaatattttatatacacatagggaaggattgttgatgttatttatgctattttaaagatcgatgttttcatataattatgtattggttatatattatttcttgatataaggtaaaaaaaaaaagcaaaacaaactttaagtgatcactatgaaaagaatcccaatgctgcacatttaggtttatccaactcttcccattaaaatattaaatagtagaaataattgtgaataagaaagagcagattttgaaaaatggaaagaaatgcttaaagacatagcattgttgcccaaccatcattatttaaacatacagtgtttggctttgaccaaattgccttcaaacacttccttttggcccaaaatgttaggtcatatatactaccataaaattcatgatgcttaccatgcattaatttctagtatataccaggcattgtgctatgcatatcatattcaatatttctaatcctctcaaaagtggtacaagctaactggcgtttttcttgttttgaaagggagaaactcagagaggttaagtgacttgcccaaggcaatgccattgataagtgccagattctatcacaggtttattggcaacaaaccatatgtgcgcgtgcatgcgcgtgtgtgtgtgtgtgtgtgtgtgtgtacacatacacgaataacatatatggtataaatacgtggaaacataataaactgcattgagctgcgtttataattagtatttaggacatgtttggcaaataaaaacagtggagattgaaatggatttgcttaggaaaaatgatacattaaaataggctttattatgagtcttcaactattctgtgaaaatagatacccagggaagaaataatagagaatatgaatcttgagcaggcaactgagaacttgtcgaagagccaagataaaaatgtcagagaggagaatattttggcagctcagatgagcccccagagggtgggaggcaatgatctcaccgcagtctcgtatctgaaccccaggtttttgcatctccataaagtaatttcttacacccctcaataatgatcgggcttactctcaatctctcgctctctctctgtgtctctctcacgcacacaaacatgcagaacatttcttgcacatgcataactcataagacgattatgtaaataccagcctttttatttcataactaaattacaaggcctggttattgtttggactgtgaaaaaataattatgtgaataggtgcctcaagatgaaagacaaggcaagattgtgaaattattcatatgatagtaatagtatgcaaaaaataacacaatctttaaagatctttaacgacctagttataaaaccatgctttataacaaatataaccatgaggaaataaaaagaaaaatgtaataatatactccaagaataaagtcaaatgtattgttgaatgtaaggagttggttacacttccttatagtggaggttattttaaaatttgtggcttacgtggtgttatgaattgccctagatcaacactattatgcaaggccaactattaggttatttttggtagataaccacagcaaaactttagtataataggtaaaggttagctacactcccataccctcactctcaggtgttgtcatactccgtataaaaggttcaatcaagggagacatgagaatattccagaatctagaggcaggatgcagttaaccttagagaaggcatcagacaactagaatcttcggattcaatgtggaaacaaagcatagtttaggcattaaatcttgggcaccattccaaagaatacaggttccataacttactatatttttatacctagcaagctagagatgaggaattgctctcaaatattttaaccaaagcatgtatcttaagtaacactaatctcataagtgaaaactcatttctaatattcattttgctcattagcaaggcctctagtgttgactgtgataaaaaatagttcaaatgctggtagaacccaccccaggagactggcctttctgattaaattctaactctatccccacgtgaattcctgacttaagtaactgagttcctgcacatcagaatataagtatattatagatataaaaacatatgtaattaataaatattttaagtgagacacttctttcatctttatggcttaactatatcagacatttgattatttttagcggtctaactacaaaacaaaacacaaagcccacaactaaaaatttctttgtatatattgcaaagaggcaaccatttggtgtcaattcaatcatgagtgaaatgctattatacgagtacatctccctggcttgtatgggggtaatagggcatggaatttacagattcacaataactgagatattcacaataacaaagatatcaatatgtagcttttcccataactttgtgtaatgaaatcctcagtttgtgctgtgtaaaaagcttattgtttacttctcatgaaaatcatcttagtttttatctttatttaatagtctgtaatttgggggtaatacattcgttttgttgatactatgtgaagtggcaagcagaaaattctaacaggaatagataagcaagtatcctataaatcagagtcagtgtctctctctctctcttttaatgagtcagtctgtctctctctctttttccctgcctggctatctatctgtatttttcagttttgctttgcaaataagagaattgtgtgttgtaaaccaaccaacttaccattaattttctctgaattcaaaagcaattacaagcggactcttgagtttgtgctgcctggttgtctgcatataggccagatgtctagaataggatctttatttactatttttaccctcctaatttcatggtaactccaaggtagatgatatttgtaatcgtacactacttgtcagaaatctttctaataacactgctattttataaaaataaacattaattcagtataaaattttattttaaattgttaattcaagcaaatcagtgaggtaacttttacactgccgagcgtacgtgtgtgtggattagtacagccatgccatagacttcacttgtaatcttttctttatattttttatacacctgaaatgttcatcattgtgctgtagaaaacaatctcattgtgtttttaaaagctagagtgggtattgagaaggggaagaggatcatagaaaaagttggttaacatgctacttaacacttcaaatctttactcgatgtcatcatcagcaacattttaaatttatgcttctactagtttgcagttcttttcctttgattattcttatgatacaagcctttccacacaaaatttatgtacaggaattgtgtagaatttttctttggaaaatatggtgatttattacaatttgggcaacatcatcattttaaaaattcagaatttgatttttctcagaatcatcagaaagaataaagcatatatatggttcatgtcaggagaattagaacatgagaattaatatatctctgatcttttaaaatattttcatgtttgtgaatcagcagatttttcctagtttgagatttaaaaaatctagatataattaaaatctcactgatgtttcaccatcagatgattttatatttgtattttcttccacttcataacttgtatagagaagaatagaagaaagaaaaagggaggattgataatctttctctctcagttcttatagcacttcattttttaaacttattacttccttctgcctgctttgtttgtctacatgtttgtatttcatgatttcttagaaatccatctactgccattctgaaggtcatttacctgaaaatgatagaaagcagcatatattcaaacaactgcagagtaattgtctatatcagttatcattgttcattacttttctgttttaggattgaggggctgcctcgccacctccctcacacccccagcatattatcacaaagcctactgattcattcacatccctgggctgaatttgccacccactgtgtgttcctgttgttttgtgtatggaagtgaaaagatttaatttgatgttgttgaaaagacacagaggctaactttcaattttcatatgtagttcttccctctccctctgcaccacctcctttacttgttgagaaaattgccctctccatggtaacaatagaagaagctttcagattttagtagtagttgttgcagagaaaagaattcaaaaagtagatgaagtttaaaaatgaaaaagagagaggaagacagctgggaagaaggcttaatgtttatgagtgggtgtggaggggaagaactaagttgaatgaacaaagctgagctaaggggaagatggtttttctgcatcccagaaggcaataccctagcctttcctgcagccttcactccccaaaagataagagctttatctgaaattcttataggattcattcctgaagagcagcttgtcaccaaacagaaacactgtgatttcctcagggagtcacagtttattattatttttttaatgtaacgcttttgtgaactccagtttccacctcaattcaaatggtcttttggttacagggtgaaagagacccaacaatacacctttcccacttccggaggcctttggttaaaccatgtctgccacaaggacacaggagcctggtatgactggttgttttttgtttgcttttttgcctcctgtgctttctagattgtgagatactgtaactcttgtcgatgacacatagtaccgaacccacccgaagaagtatgtcagtatgtcacattgtgacaaacagcttctcatgctaagtaaatgcagaaccattgtgaaaggtttaataatgcccactcctcccccgccaaagatgtccatatcctaatcccaggaacctgtgaatatgttaccttacatggcaaaaggctttgtattaacagatgtggttaagttaaaaatcttgacacggagagatagcctgggttaccccagtgcgcccaatgtaatcacaagagtcctcctaagagagaaggaggtgatgatacaagcagagtaaaagagagattggaagatgctacactactggcattgaagatgaaggacagggccaagagccaagaaatgcaggcaggctctaaaagctggaaaaggcatggaaaagaatcctcccctacatcccttagagggaatgcaagctctgccaacacattgtttctagcttgtgagacccattttttggactttggacctccaaaattgtaagataataaatttgggttgttttaagccattaagtctgtaatcatttgttacaacagccacaggcagctaatacagccatgaacatttagtaatgactaactttgcacaattttaatacaagcttcttattaaggtttattttttcttaattacaaggaataaaagtggggtctgggggcaatgtcatggtccactccgttttagccatatgaatttgtatttccagcattagaacaaaaggtgacaaatctgaatgtatttgtgtgaaataataataaagcagaacaaaaagggaaaagtgtccagctggaaatgaagttagagaaagatgaggagaagcaagccaattgtgtagttttcccttctgctttttaaaatcatgatttgtttaacccactgaattctattttagaaacaggactgcaaggaagtgttgatggatttggtggcatgagaaccagagtcacagaggcaggaaagtaaggaataagtgttagaataggaagcagagttgcttgggaagagaccttatgacatgtggacagggctagacttaggagtcagaaagacctgagttcaaatgctatcctttagtatagtttgaagtcaggtagcgtgatgcctccagctttgttcttttggcttaggattgacttggcgatgcgggctcttttttggttccatatgaactttaaagtagttttttccaattctgtgaagaaagtcattggtagcttgatggggatggcattgaatctgtaaattaccttgggcagtatggccatttacacgatattgattcttcctacccatgagcacggaatgttcttccatttgtttgtgtcctcttttatttccttgagcagtggtttgtagttctccttgaagaggtccttcacatcgcttgtaagttggattcctaggtattttattctctttgaagcaattgtgaatgggagttcactcatgatttggctctctgtttgtctgtcgttggtgtataagaatgcttgtgatttttgtacattgattttgtatcctgagactttgctgaagttgcttatcagcttaaggagattttgggctgagacaatggggttttctagatatacaatcatgtcgtctgcaaacagggacaatttgacttcctcttctcctaattgaataccctttatttccttctcctgcctgattgccctggccagaacttccaacactatgttgaataggagtggtgagagagggcatccctgtcttgtgccagttttcaaagggaatgcttctatagtacaaggctacagtaaccaaaacagcatggtactggtaccaaaacagacatatagatcaatggaacagaacagagccctcagaagtaacgccgcatatctaccactatctgatctttgacaaacctgagaaaaacaagcaatggggaaaggattccctatttaataaatggtgctgggaaaactggctagccatatgtagaaagctgaaactggatcccttccttacaccttatacaaaaatcaattcaagatggattaaagacttaaacgttagacctaaaaccataaaaaccctagaagaaaacctaggcattaccattcaggacataggcatgggcaaggacttcatgtctaaaacaccaaaagcaagggcaacaaaagccaaaattgacaaatgggatctaactaaactaaagagcttctgcacagcaaaagaaactaccatcagagtgaacaggcaacctacaacatgggagaaaattttcgcaacctgcttatctgacaaagagctaatatccagaatctacaatgaactccaacaaatttacaagaaaaaaacaaacaaccccatccaaaagtgggcgaaggacatgaacagacacttctcaaaagaagacatttatgcagccaaaagacacatgaaaaaatgctcaccatcactggccatcagagaaatgcaaatcaaaaccacaatgagataccatctcacaccagttagaatggcaatcattaaaaagtcaggaaacaacaggtgctggagaggatgtggagaaataggaacactcttacactgttggtgggactgtaaactagttcaaccattgtggaagtcagtgtggcgattcctcagggatctagaactagaaataccatttgacccagccatcccattactgggtatatacccaaaggactataaatcatgctgctataaagacacatgcacatgtatgtttattgaggcactatttacaatagcaaagacttggaaccaacccaaatgtccaacaatgatagactggattaagaaaatgtggcacatatacaccatggaatactatgcagccataaaaaaggatgagttcatgtcctttgtagggacatggatgaaattggaaatcatcattctcagtaaactattgcaagaacaaaaaaccaaacaccgcatattctcattcataggtgggaattgaacaatgagaacacatggacacaggaaggggaacatcacactctggggactgttgtggggtggggggaggggggagggatggcattgggagatatacctaatgctagatgacgggttagtgggtgcagcgtgccagcatggcacatgtatacatatgtaactaacctgcacattgtgcacatgtaccctaaaacttaaagtataataataataataataataaaatctcaaaataattaaaaaaagaaacaaacaaatgctatcctgatcctaactggctggctgtctttggggaagttggtaatcttttctgtgcttatttcctcatgtgtaaaaaaatgaatatagtacccagctaggtagagttgttgttgggattaaatgatgactataaagcatctagcccagcttcggctacattatagctgcttacgaaattgtagttacgatgtaaaagagaaaaacactggaaaaggaggatatgggccattttattccaccttcaccaccttttagcttggtgaccttgggcaaattatgcttcattccgtgcttcattttccttgtctataaaagggtgtaagtacagaaccattgaggggtggtcattattaacctacctcaaatggtgtctgtaagttaatatatattgtgcttttcctatgtacaatatctagcacataattacaaatcaaatccatcccatgtgcaatatctagcacataggaaaagcacaataactagttattactcttgttgtagtaattgctacgctgtaggagtttgaattgtaaggcagtggagagtcactgacctttacgagaaagtgtagcagaacatttgagtagatagtaatggggaatattacataaatggatagatattaggggcagatattactattaaaatattacagcatggatatttattaaggccaaactggttaattagttgcatctctcaggttcctaatgttgcttaattttttaacctcccattttgtgctgccctttgtacgaatatttaatgctcccaacacctcttcagtagcacatgtactgtgagtttgttttgttattacttgtgtgtattagcattcctttgtgaaccaaaagcatggaattagctgttgcctctaggctacctagttttgtagtttggattgaagccttcacctcagtaacacctattctgtctactatcttacagaaaacttgtaaaattaagacagatcattaatatagcagaaagagacaaagggcagagaacattgagatactggatattggaaccacccaatagtgttgatttatttatgattatcagtttttgtctctgcctagcctcatgccactaaagtctctgaggcaacaaagaataagcaattttgctcaccttatacaaataaaacacagaaaaaggaatcactagagaaatggtactgcagcctttctgcagggattactgcttatttttaaattacttaaaaggtattgaaattattgttcataatgagaaacctgcctaataaaacagaaaattaaacttaacacttccctataatgtaaacagctcggttaggaacacaacattacagaaaccacttaagaattgattgtacttgttcttggagcagaactagaagctcaccgtttagaagctgtgcacatttccctatcaaacagtacataaagtttccatattcctcagaatcggcttcatttgtgccatgtgtttgcttggaactatgccacagaaagcagttctccccctcaagctgggctcctttcatgccgcagtgcaagtgtgtgatatactggcaccatgtgctaatgtagacccatttttatatgataagaattagtacggcctagggaatagacaagtatgtctaaaatcctccccatagaatatgtcccttcctttaaaagctgtcatactgtaagttccagctgagttaaaggccactgtgctcctatagggaaatatattctattgtaatttttacgttctccaataacagtctgttctttgtttactgaagagagctttcatgtcataaaatggtgttttttgacagagaagcagaatcattgttttattatagaaatttgctcttacaacagcaaaaataaatagctcatctcttaagctcctgatcaatgtctaacacctcctacccccagcaacacttcactgcaagtatattaacactctataatagcaattccactcacctaccaagaaatgatcttcacaaatgatttacagctaaaccagagcttaaacacatagcacccaatcaagggcagatttttatctttttcccagtcatataagttctgagaagaaatagattaatgttgatctcccagacaactgctgagaaaatgtacaaaggatgttgtttattttgaagaatgagacctagttgttaagcactttttccccttatatgtacgtccaaaggtaaccattacaccattttgatgcaaatttaggatatatatttattcatacctctcttctccattcggatgttgtctgtgtgagtgctcacagacacatgcacacatacacacatgcactcctgtttcacacttatttgtaaaactcacaaggatttccaagccattaatatagcattgtttaaggtgaacacatggttgttcaccatccatatgtatcttcactttgtagcactcagaatttggcaaaatcagaaggctgaaacctcatggattaaatatattctatataacatatgtcttaattgctgttactgtaaagaaacctggactagccatatttgactaatttctacctaaggtatttgaattcttataaatagattcattgctttaatcacacaagagtggtttatatgaatgtaattatctccactttatagctgaataaactgagcctgattctatccctatatgggaaacatgaattgaacagctgtgccaattattttgataattcaaatttcacatctaccatgtgaagacagcagaagagggttagggggcttgaattattctgattaactgtgttcatgagtgtaatcgcctctagataatcactcatttcttcacttcacttcccatctacaggtagtatcagcgaatggtaacatctcttgctttgcctcagtttattgatggctgccgttagaaataaaaagcatggttttgtttcagtacttaaatgaataatatcttcaaaatgtttttaaaacgtgaaaaggttgaatgcatttttaacaaatgttttgttagctttgacttttatttttgaacagatgagcacaataccccagtactcctttcctagaaataggagtactacctgaagacttatttcccaaagaaaaatatcaggtctagtgcagcaatacgtattaagggcattgaaaagttatattcacaaaatgtgacatcataacatatgttaatacttcttatcactgataataatccttgaagttgtatttccagagagatctcaatttcttctcacactctgaaagtctctgtttatcctttagagtaggaatgtaagaatttaacaaaacattctgaatgtttaccttttttctaaactgaaactacaatccctttttacccctatatagtaaaatataatattacaagtagaatcagcaaatttgtttaataattctttgggacagtttttacaagcaatggggttgaatttatgttccttgtgtgcagtggagttattatattcttcttaaaaagatgcatgaaggtaaattagaaatgttttacatgttttcatgacaggacatttaatcaaagaggagatacaagaggcttttcttgggttactgcaatttaattttccatttctttcttggaagggacattggatgcagttgtacgaggttaatatttctaacatgccacttttattgtggcattcttctgctctcaaacctctgatgatttcccatggccttcaacatgatgtccttatttgggcatctagtgttctgagccctcacattctggccccagcttcccttctcaacttgatcacagccatcgtaattctgctaactaattacacagctgcccttcccactctttctcaaccactctgctgtattctgacttctacactttagttttaaagctactccttgtcctgaaattccttctcccattaggtcattattaattgagttcatcctctaagttacagttcatgttgctgttcctctatggcaccttccctgaacctggtcccatataaaatcccatctctcagaatcccattagggtaggatatgtggtctgtagactattacgtttgtcatttacatattgtcttctattattgggtaactgcgtgtgcgagcatgcatgggctggcctgaaggtcacctccccaactgcattgaaagttcatcacaagttcaattatttcactagagagtctctttcatgtcatccatgaggcacattccctactgtgatgtgttatgcatacaattatttcaataaatattttctagctctttgattgaccaaagcttaattacctgtcaactctagcctcttgtatctggaatttctacagtctttggatagtatctttaggatgcaaaattaggaggagtatgtaccaggcaaactattacaaataatgccctcaaatagttacatttcactattcatgtcttgtaatttatcttctgctttggtattttagtacacttatgattcaatttgctgtatagattcctctgaatagggacaagagaattcgtcttgataagtggaagttcgaaggattccaaaatgatgttattcaaggtagaacaagaaattaatactgaaaaaattgaggagtaataatccccaaatatgtacatgcgtatctcgttttattgggtttcactttattgcactttgcagatatttcactttttgtaaattgaaagtttgtggcaaggctgcattgagcaagtccgtcgggcacaatttttccaacagcatgtgctcgctttacgtctctgtgtcacgttttggtaatttgctcaatatttcaaacattattattattattatatttgttatgatctgtgatcagtgacctttgatgttactattgtaattgttttgagatgtcatgaactgcactcatatgagatggcaaactttgtggggtgcagtggctcacacctgtaatcctaacactttgggaggccaaggcaggaggatcgtgttagcccagaagtttgagaccagtctgggaaacaaagtgagaccctgtctttaaaatatatatgtagaaaaattaactgggcatggtggcacatggctgtaaggagccctgccagctgcatgggaggctgacacaggaggatcacttgagcccaggaggtcaaggcggcagtaagccatgttcactccagtgccctccagccagaatgacagagcaagaccctgtgtggaaaaaaaaaaaaagacaaacattttttcaactttgattttagattcagggagtacatgtgtaggtttattaccttgatatattacatgatgccgaggtttggagtacaaatgatactgtcacccaggtactgagcatagtaaccgatagttagtttttcaacccttgtttccctccctccccactctagtagtcctccgtttctattgttgccatcattatgtccatgacaacgcactgtttagctccacatgagaacacgtggtatttggtattgtgtttctgcattaattcacttagaataatggcctccagctgcatccatgttgctgcaaaggacatgattttgttcttttttatggctgcatagtattccatggtgtatatgcaccgtattttctttctccagtctgccactgatgggcacctaggctgacttcatacctttgctattgtgaatagtgctgaaatgaggatgagaatacatgtggttttttagtaaagcaatttgttttatttgggctatatgcccagtaatgggatcactaggttgaacgatagttgtgttttaagtcctttgagaaatcttcaaactgtttcactgtggctgaactaatttgcattcccagcaacagtgtatcagagttccctcttctctacagcgtcagcagcatctgtcatttttttgactttttaataatagccagtatgaatggtgtgagacggtatctcgttgtggttttgatttgcatttctctgatgttgagtgatgtggagcattttttcatgtttgttggccacttgtatgtcttcttttgagtagtgtctgtttatgtcttttgcccattttttttgatggggttatttgtttttgacttgttgaattgtttaagttccctatagattctgaatattagacctttgtcagatgcatagtttgcaaatatattctcttattctgtagactgtctgtttactctgttgataaattctttcactgtgaagagctctttagtttaattaagttccacttgtcaatttttggttttgttataattgcttttgaggacttagttataaattctttcccaagtctgatgtccagagtggtgtttcctaggctttcttataggattcttataatttgagatctaatgtttaaacctttattccatcttgagttaatttttgtatatggtgtaaggagggggtccagttgcattcttctgcatatggctaaccagccatcccagcatcatgtcttaaatacagagtccttttcccattacttattttcataagatggcaaacttaatcaatcaatgttttgtgtgttctggctactccactgatcagccattccctcatctctcttcctctccttgggcctccctattccctgagacacaacaatattgaaattatgccagtcagtaaccctacaatgtcctctaagtgttcatgggaaaaaaaagagtcacatgtttgtcactttaaatcaaaagtcagaaatgattaagattggtgaggaaggcatgtcaaaagccaagacaggctgaaagccagacctcttgtgccagttggccaagttgtgaatgcaaaggaaacgttcttgaagaaaattaaaagtgctactctgttgaacacaggaataagaaagtggaacggccttatttttaatatggagaatgtcttagtggtctggatagaggatcaaaacagccacaccattatcttaagcaaaaggctaatctaaagcaaaggactaattctctgcaattctgtgaatgccgagagaggtgaggaagctgcagcagaaaagttggaagctagcagaagtatgttcatgagccttaatgaataagccctctctataacataaaagtgcaaggcagagcaacaagtgctgatggagaagctgcagcaaactatccagaagatcaaactaacatctaagttaataaaggtggcaatactaaacaacacattttcaatatagacgaaacagccttctattggaaaaggatgccatctaggactttcatagctagagagaagtcaatgcctggcttcaaaagttcaaaggacaggctgactgtcttgtgaggggctaatgcaactggtgactttcagttgaagccagtgctcgtttaccattccaaaaatcctagggcccttcaggttatgctagatctagtctgcctatgctctgtaaatcaaacaacaaagactagatgactgcacatctctttacagcatggtttgatgaacattttgagccctctgttgagacctacttctcaaaaaaatgtgtctttcaaaatattactgctctttgacaatgtccctggtcacccaagagccctgaggaatatgtccaaagagaatgattttattttcatacctgctaacacaacatccattctgcagtccttggatcaagaagtcacttcaactttcaagtcttattacttaaatcatacatttcataaaggtatagctgctatattgtggtgagtccactgatggatctggataaagtaaactgaaaacggaaagtcctcaccattccagatgccatgaagaaaattcatgattgaggggaggaggtcaaaatatcaacattatcaggagtttggaagtagttaattccaacactcatcaatgactttgagggtccaagacttcagtagaagaagtcactgcagatgtggtagaaatagcatgagaaccagaatgagaagtggagtcagaaggtgtgactgaatagctgtaatctcaaggtaaaacttcagcggatccagagttgctgcttatggatgagcaaagattgtggtttcatgagatgcactctactcttggtgatgatgctgtgaacattgttgaaatgacaacaaaggatttagaatattccataaacttagttgataaattagcatcagggtttgagaagattgactcaaattttgaaagaagttctactgagtaaaatgctatcaaacagcatcacatgctacaaagaaatcattggctataaaggagagccaatcgatgcagcaaacttcgttgttgtcttattttaagaaattgctacagccatcccgaccttcagcaaccgccaccctgatcaatcagcagccatcctcactgaggcaagagcctgtaccagcaaaaagattatgactccctgcaggctcagatgattgttaccattttttttaggagtaatgtattttcaaattaaggtatgtacattttttagatacaatgctattgcacacttgacagatgatagtagagtgtaaacataacatttaatgcactggggaaccaaaaatattcgtgtgcctcattttattgtgatatttactttattgcagcagtctggaaccaaacacacaatattccaaggcagtcctatatattgtttcatgtctctctttcttctaaaatgtgtgtaggagaaaaaattatatcacttatgttactgggccataatatcaaaagcctgcgaatctgatgcacatgataaaaactggtcttaaacctgtcttgattatcctttgttaatatgccaaatttatagaacaatagagtttcaagaaatgtgaacaatgtagaataactaaaagatctaacgttgaatagctaaaattatcaacgccctttatatcactttagaaatgcgtttgcaaatcattatcaacaaattgtagcataaaattctttttttttcttgactttgaaattgtatttcaagatccgcaatttacaccacattatttacttactggcttgtgaaagtgaaaggcattttcatttttggatgttaagggttttagtaaatgacaagtaaatcaatcctttaagttccgtgtggtataatagcttggaaaggaccatcttaatctttttttcaacacagggagataatttattttaaaaataacacactaatagtagattaatattattaccatttcaaagaagtcaccaaatttggtaggcttaagaggttttttttttttttttgagattactatgctctttttttattttatttattttatatttatttatttattttttagttttttaattttactttaagttctgggatacatgtgcagaacgtgcaggtttgttacctaggtatacatgtatcatggtggtttgctatactcatcaacccaacatccaggttttaagcccccaatgcattaggtatttgtcctaatgctctctgtccccttgcccctcaccccttgacaggccccggtgtgtgatgttcccctccctgtgtccatgtgttctcattgttcaattcccacttacgagtgagaacatgcagtgctaggcttaagagtttttttaactccccaaaatatcaacaaattgaaacattactacaaagaaatagagaaataaatttcactgactgtcttattgttttttaagtttgaatagctaataatgatttcttaaacagctatcatattttttatttttaaagctagccaaatgatcagtgatttttataatactgataaatactgcttagaaaaggaacatgtgttctagcaatttccacacatttctgattctaattacttgtttctttttgttttatttttatatttttaagttttgtgagtacctagcaggtgtatatatttatttggtacttgagatgttttgatacaggcatgcaatgtgtagtaagcacatcatgtaaaatggggtattcaacccctcaagcatttattctttatgttccaaacaatccaattatactcttttaattaatgtaaaatgtacaattaaatcattattggttatagtccccctgttgtgctatcaaatagtaggtcttactcattctttctaactaattttttgtacccagtaactatacctacaccacccccacctccccacgacccttcccatcctcaggtaaccatccttctactctctatgtccatgagttcaattgttttgaattttaaatcccacaaataagtgagaacatgcaatgtttgtctttctgtgtctgatttatttcacctagcatactgacctccatttccaacaatgttgttgcagatgacagaatctcattcttttttgtggctgagtagtattccattgtgcataggtaccacatgttctttgtccattcatctactgatggacacttaggttgcttccaaatcttggctattgtgaatagcgctgcaataaacatgggagtgcagatatctcttcaatatactgatttattttcttttgggtatatacccagcagcgggaatgctatattatatggtagctctatttttagttttttgaggaacctccaaacggttctccatagtggttgtgctaatttacatttccaccaacagtatacaagggttcctttttcttcacatacttgtcaacattggttattgcctgtcttttggatataagccattttaacgggagtgaggtaatatgtcattgtaattttgattttcatttctctggttatcaatgattcagtgatgttgagcaccttttcatatgcttgtttgccatttgtatgtattcttgatctgccacaagtctctaattacttgtttcttgtaccactgtttcccttcattgtagtcagtgatttggtcaatcaacactttttacgtatgggtatctgttaactgtatttctaggaatggaccaagaattgagaaatttatcccaaccagaaagaacaaaatctatggaggcacaggattactgaaagctttgctcctatagcctcagtttttttctgcaagttcgctgcttcccagttgtccttgtgataaaattcaaaacctcaaactgatttttaaaaagccaactatatactgcttctactatgtctacctaaacttatttgccattatttgtaaagaattccaggctctaaccagcccatttgaggctttattttacgttcatgcctttgttcatgtctgtctttcccttataatgctcttctcattctctagccaaatctgccaaagttcagctgtagtgccatacttgatatgaagtctttgctgagaattcccatatgtggtcatttccttcactgatttgtttcaatagttgttgccattattattattttttttatactgttgctggatactttcgcagatccaatctctaacctgttgttctaccctaggaggttgaccaatatggcagtagcattgggcttgcttgtctattggcttggtccttgtgttgggaggcatcagcagatcaatggatgagaggagagtgagtcgagggatggctaggttcctttactcacagccccagctcctgtcaagaggtcttgtccctgcagccacttctcagattctactaactataccctccccttagcctttcaggccttgaggaggaaagcctcctcatcccactttgaatgaactatttattgcaagaaccatgactgattcagaatataatctgtccttgaatgaaatagttaatttccccttttgtattctcgtttcatatccctgtccctttatccattcctatattatatcatactatcatatagctaccttatattatactatgacatgagtaccttgtaagtatatcatgctatattatagttcttaagtgtgtgggctttggggccaacttacctatgttagaagttctgccacttattaccatgtgatcctagacaaattgtttaacttctttttcattcattttctttactagtaaaataggggcaatattagtacccacctcacagagtaatatgataattacattgactgatagtttttatttaaaacttttattgttcttactatgaaatgggaaatgttctaaacaccttacaaatattaactctattaattctcataatgaatctgagaggtagagactcagtatctccatttcacagtgctggaaatgatacagacagcatttaagtaacatactgaaaatagtaaaccgaataggtggcagccagtatgcaaattgggaaagcctgactccagagttcattcttttaactagtatgctgtgatagactcttttggcatatggtatgcactcaataaacaactattgttgttgtcgttagcattacttcccattgtattattacacaaaaaataattgtttatgagtatttgtttgctagattataagttccttgaaaaaagaagacaagttttatttgtctatgtgtactagctgagtgcttggcaaatagttgcagtttagtaaatgtttctaaaacaaattattagttgtttcttatgtatttcccaagtctatcctagccttggaaacagctaacacttagctaaacctagaaatgtcatttgagatttcagcagccatcattgttgctgaagccacaggttctcctttttatctccaatttcttcctcagatgattcaccactttctttgtcgtttccctacttcatttttcctatagtgacttttgttctccaataaccattgatagtgatgacagtcccaccttggaaccacttctaactgtcctgttcagcttttcctgaggccagatttcccccaaaatacattttttagcttcataactgctccttccagaaatttgaaacgcattctcaggaattaagcaagaggcatttgattgacgtcatttaatttgtgtttaaatgtgttcttcccatcaacgattaaccagtgcttcagccaagatacataacttttattctccactaaccttagggttgaggtcacaatcaggtacgtaatctgtagagcccagtgaaaaatgaaaacgcagggcccttggttaaaaaaaaattaagaatttcaagatggcaacagtagagcatgaaaccaagtatgaatcccttctaatgcagatccttgtgtaactaactgcacaagttatacgttcaagaagctggtcctggttgaggtctttgtctacctagggcacttctcactcagagaggtggaataatcttaactttctgtcttccgtcatctgaaaacttgccccaaagttccttttgccatctcttgcagcaaacctagtggttgttatctgttaaggattcctggtggcttgctttagtttcctacagttcttgagctgcatgtgttgaatggaactccaccattaccatgtaacacatctgaatactcttattttcctccagttaaattctgcgctccttggaaataatggtcatgcaccctaccttagtgatttctaaatagaggtagtatgtaaaaatacatatttacttgaattgcatcttaagaggccagcccatgggaggcatgaagaaacctatgttactaattaatattcaataattgacagttacacattcaggtagtagtgtcatggaaccatcacgttacatggaactgaagagctgatgagaggtttagggtctaggaggacaaaagtgagtgtattagtcagggcctgaggttatatgtacccagacaggataaaatgggacaatattttattagtggaaatatctatgtgaaagaaaagaaggaggaagccaaggaaggtgcaagagatgttagatcaagatgcaattctgactctgcaaggaagagagagggagagaaggctaggcagaagcatcccagtgtgcggtctagtggaaggaaattttggcaaagctgttgggaagtcattgaggcagagccaggcaaagaagtcccatgtctcccaaggaaggctctctgccttagtattcccaccacacccaatcattgggtgaggagaagtctgtgagaagcttggctttggtgcagtgcaatcatggatttcaaaatgcagtaacaggagtcctcagtcagttaagacccaataatagaaggcctgcatattctcatggtggccacttgggtatgaggagcagtggtgtttaaaactgttttgtataatttaaataaagaaaagctgaggactacttaagcttgattccttcagaagacagtctttggcctttatatttcatgtgatatctttgccatatgctctgataactctccatgtttcccctaccataatacctcaggttgttgcaattgcttttttattgcctgtcatcactactcgtttgttttctctttgagaacaggaattattttctccttcactgctacagcccctgcacctagctcaatgagtgacacaacagaagcacttaaaaaattgctataactcaaatttgggggatattctacaaaatacctggcctctgttggtcaaaactgtaagtgttataaagttcaaagaaaggcaaataactatttcaacttaaaaaagactaaggagatacgacaactaaaagcaatgcgtgagtctggaccagaccaggaaataaaaatatagctataaagttcattaatggggtaattgtcatactctgaatatagagtatggataagattatggtactaaagccacgctaaatttcctgactttgaaactgagctgaggttatttaagagaatgtctttgctattaagaaataaaacctaaagtatttaagggtaaaggggcatgatatctgcaaattattctcaaatgattcagaaaaaaaatatatatatataaaacattacatatacagttatatatctatacacacagagagaatgataaaatgataaataattaaaaataatgtggcaaaatgttaacaaatggtgaatccgggcaagggttacctgggagttctttatcttgcaaatattctgcaagcttgaaattatataaaaataaaatgcatcttataaagtatttattcagtgaataaagaacaaaaaaggctaactgcagttggaagatatttatgaagttggttatgaagattcttaagaagttaccgatggaggtgctagtagaacattcaaaaaagaagtagggaaggttgaccaagtaggaaaatatcaatatccaagccagtataaaatggaaatgagaagtgaggaagtaagtggaagacaatgaggatggttttcgatttggccactctatttggagaggcagccgaatgcaagaatagaagccagaagaagatgctcagtgagatggttgaaagctagatagattacagcatcctcaccagtaaaaccctttcggtaactagaaaggctacaatttagtaccttcctgacttctatgcttattttcttcaatacataaaatggttccgtaaactcttttaccttctgaattctttatattaattttttgaagttgtaaataaaatagcatcagttctacattgttacatttcagcttaattcatattcatttactgaaaatgggaacatttgaaaaatcatcatgggcatttatgctatgtagattgttgatttttatagaaaaatataaaaatatgaccagtttgattttcaaagtcttttcttagacatgtaaatactaagcattcaactcaacatatagagtttttatttgagtattatttaggtggaattctattttaatgaatacaataaaaaattgtaattttgtctaaaagcctaaaatgccctagttataatatgtatgatttcactgtttaacttcctatttcatagggttgctatttataaccacttcactcaactctggggggacttagtgagattaaagacttctgattcactttgtatttgaagaattttttttcctccatctttgctcagctagtggaatccatgatgaattctcatctccaaggggtaagcagtttttagtaaagcccagtagctgacttatgactccttagaaatagcattgattccttccttctcctgtgttttgtttcctctagaatgatagaatccatgtagacacgatccattatcatgcttaggtactggtaagcatgtaatgattttagttttgttcgctttaagttatttgtgtcacaaatatctgggatcatatcagagaaataaataagcacaattagcattctacttgtttgttatgactaaagctaggttgaggaaacagaaaaggaccagaggtcatatgaggatgaagataatactaggaacagcatgtttgggagagtaacatctggtaggggtagcagattgggggcagagaacagaattttatagatggatattttggaggcaagtagtttgagtaatgattagatctaaggtgttttctcatctgtgggtggctcgaaggaatagaggtgaaggtcagtttatttgagaagttctggaattataaaactaagttgaagtcaaagaaagtatagtagcaaataaatagaatacccttaaaaggaaaccaaatgaaaaataatcgttactctcaccatatgcttgtgttcttattagcaagaaattcttttaaccactgtttttataatatcttaatgaaaaaatactgaagcgtatgccatattaaatccctctctttatttctagaaagggaatcaaaggagaaaattcccattctgctatactaaaagaccactaagtaaagagcctattagtgtatgataaatcccatagcaatatacattatcattttacagcttctttgttgaaatgaatgtttgtatgtgttgaccatagagtgggataaaaagttgaaattttgttttgaaatattttagaaatgcatagttgtactgcagttgtgaacctccttagatttttaaggaggctgcttcaaaggatctcattaataatcttctcaggtgcttacaaagcatgtgtctgtcagcagaattagagaatcacccaactagagaacaggtttcacaataccctgagacctattttgttcattagagaggaaaatggcttgttttgagtctaagttgacatgcttgctaatttcagcaataaaagctgttcattgtggtcaggtttaatttagagcctggtaaggttcagattaaagttgatcaacttacttttacaacatacttcttaaatgaactttgaaatcttaaaagaaggaaaaaagtatagcaaacagtgaataatgtatctaaaactgagaagcaaaaaaaatctggttatgtgagagtgaattaaaagaagaacaacccaataaagataatctttgttatataaaaatttccaagtatcgaaaagcacgatttttcatgtgagttacacactataccgaatatatttgtccactgccacatgcatagtccctagaatagtgcctagtgctgaaaaatatttattaaaatgaatggatgagtaaatgaatttatgtattttgccagccctgtgtatttaaagttctctgttaactttgaggtgaaaatttgacttcatctgaggtttctgggtaagtccgttttaaaaattctattgaacatattcaaacattttagggtaggcaattccaaagcaacctttcagcttcccatgtcacagatgaccagagtttcacattctaacactggaaaacatcttatttcataaaatctacctgctactatatggttcctactttaaaatttgttcagtactctccagctgacttatgccacttacttcaatagctgtctttggcaatttgttccatatttcaaacactctgttgtgtaaagaaaccataaaagttagaaacctgaaaattggattttttttctgagcaatcacagcttacaaatgtggaaaatttgttaaaagttagcccctccaatttttcaatacagagaggagaaagtgcctaaagtagatgtacaatgtttggaaaagttttttgcattattttactattaccaaaagcaattgagtttaaatcacaaagcctgtctccctacctcttcacagaagaaacactacagaatgatcaaaatttggcctttccaaaaccaaaattcgttagaaaatcagcaggagtcaaagtacagagtaaataactaagtttcatataagtttcagatacattactatctaccactttcatctcttcatcttcattggcctcatgtggtagaacatcatatttaaaattatacaaacttgctggcttgtttactagtgtggttattataagaaaaaaatgagaaaatatagataaaacatctgtcacatattgcttataaactaacagtaaatattacttgtattttccccaattaaaataaaatttactgagttttagaaccagagctagtcagatgcctttttttcataaatttcttcataaatacctctgagattgtggtccttaaatctagagagactaagatgacagagaaaatagacactgaagaaagggaagaatatcttaatgatttacattactacctataaattaaaaattgttaactttattatatttgtatttttatttaaaatagtgctatattaaagtcatttataatacaggggaataggaatactaacctgtaatctgatgctctccaaacttgcctaaatcataaaagttaattagataatttatttaaaatgcaagatttgcagccctttccactacatattcattagttctggagggaggcaaaaaggtttggtgattcttacggacaggcagcttaggagaaaagctgatttagctcgtctacttcaccttttcatttgacaggtgagaaatctcaggggtacaatgaagttaaataagtaatatctcttaaatcggttctgtgctttttctgtttttaaaataaatataccttaattttgacgtcacacagaatgatattataagtataaatagttatctatcttttaaatacattgtcgtaattcagaataacatttcttactcaaggcattcagacagtggtttaagtaatccgaggtactccggaatgtctccatttgagcctttaaatgaagaaaatctatagtcaagattttcatttgaaatatttttgatatctaagaatgaaacatatttcctgttaaattgttttctataaacccttatacagtaacatcttttttatttctaaaagtgttttggctggtctcacaattgtactttactttgtattatgtaaaaggaatacacaacgctgaagaaccctgatactaagggatatttgttcttacaggcaacaatgcaggatttggaacagaggcgtccccagttggaagaactcattaccgctgcccaaaatttgaaaaacaagaccagcaatcaagaggctagaacaatcattacggatcgaagtaagttttttaacaagcatgggacacacaaagcaagatgcatgacaagtttcaataaaaacttaagttcatatatccccctcacatttataaaaataatgtgaaataattgtaaatgataacaattgtgctgagattttcagtccataatgttaccttttaataaatgaatgtaattccattgaatagaagaaatacatttttaaatcaattcagggcttatatagttgcaaagcatgcattgatgggtgtggtgaccacagtgtggcagaacatttgtggcagaacatttgttctttagttgtcatctgggctggcatccatggagatgccagtctctccctcatatccttggctgttggtccaagcaggcagtggcttcttcctgggccatctttcattcccatgtgcagtgactttcagatctggatatctctccgctactttgatgcccccattttgtaatatcaaaaatcatcgtactgtaccttatgccgtagtagggtgggcaggaactttggtaagacccatctgactagacgctgtgcatattcttttcttctgacatacactcctatccatttaatggggagagtgattcgcagtgattgtgtgttgtgtcagtgagtttccatggggtcaggaagagtgacagacgaaggagtaggggaaactcgccacccggtttccctcagagattctcctcagaaatgaggtccaagtcagctctgctttcaggttctctcagatctctctcggtttcttcacttctctctaccttccttccctccagggacacacactggtattgaattttcttgcttcctctgcaatatcccctcattttccttcccacaacccgaagaatcctttgtagtgcaggaaggaggaaaacctttcagccatctttttttttctctttgaaatcttttgtcttttaccaggcttagacttttcaaactcggaaaccatgagagtctatatcttcataatttatattctgctatgttaacccttccctaaggaaatgactagttgtcaatatgttggggaaagtgaaagagtaaccagagtaaaaggttaatattttaaaatattattagtcatacttccacatattgggtaagtacttattgataatagctagtatttattcagtacctcataagcattagatggtgtgtgcacatgtgtgtgtttctgtgtgtttctgtgtgtgtgtacaaaatctttacagaatcttgtgagctatattttataatccccattttatagacgagaaaacaggttccaagaacagttactcggccgggcgcggtggctcacgcctgtaatcccagcacttggggaggccgaggcgggcggatcacgaggtcaggagatcgagaccatcctggctaacacggtgaaaccccgtctctactaaaaatacaaaaaaaaattagccgggcgtggtggcgggcgcctgtagtcccagctacttgggaggctgaggcaggagaatggcgtgaacccgggaggcggagcttgcagtgagccgagattgcgccactgcactccagcctgggcgacagagcgagactgcgtcgtttacaaacaagcaaagaacagagcttggaatttgtaaatgtctctttctgacttgaaaatctgcgctctttctagtatgtttaccatttcccatcttgttttgttgcttttgttaatgaccttaatcattgtactaagactaaatacttcttttgtctgaaattatgtatgttttgattcacttcctaaagacatgtcttctttcagttgtagtgattgctaattaaaataggctgttcttggttttgaaagtttaactctttattgttgcttaaacaatgaatgtggatgtatgctaatgtattatttcagtaacactagccactataacaggtaatctcccaaatcttggaggcttactacagcagaaatttacttcttattttagtgcagtccaaaataagcagccctctatgaagtcattcaggaacccaagctccttccatcttttgtgtccagagcataagactcatatgcatttaatgggcagatgaagaatgagtattactcatgaaaatttgtcatgagccacgcctggaaatggtgtgtgttaattttgttcatattctgttggatggatcttgtcacatggtcacacctaactgcgagggaattagggaaatagtgtacactgttgagcctaggaagaggaacagatttggtaagatagccatacaattgatttagcagagcattcctccaccatactggaaccttgagggttctccaacaagttgcaacacactgacccaaaagagtgaatcttagtgagtgatttactcaatatgagactgaattcccattacacaggtaagtgatcagtttcttgcctgagaaatatggaaatttggcagtgaggtttatgcaaatctgaacatactatacagagagtcatttgttattttactaatgaaaaatcacttcaattttttccctaagaggaagacaatatgaatgtattatacagtatttgttcaacattgtctgaacattttccattatcccctgcatttttttttcatattgcattgactttttcatgatagagattaaaattgaatgaccggagggcaagtttgtatctctctgccaatattcagtgatttgaatagttcttcttttctaagcttttgtcttttaggaatgaatacctttatgaatatttgcagcctagtggaaaggctgtaatccaaatggtccaagaaagcattttcttaaaagcaagtgtctgtcgagatgtgtcatagcgcttattaagagtctaagctggaatcttagttccaaatatgcctggagcctctaaatggtaccaggataattctgacaagatatgtttatctaaacaatgtcatttgcagccctgctacacttcagtttatctctccctttgaaatctataaaatgggatggaaattcaatactcataaacttttcgatcgtgttcaaaatagaatttttcttagtaaagatttggttttcaggaaaaggacagaaataaaatacttgctcataaaattgtattttctcatttgatgattttggtcttcctttttattgccatgaaacttctagaaatgctcaaaaagaaatcagctaaataaagaaaaaatagttaatatatgtatgtaatactatattgaaacatttttctttctctggtaaatcccatttcataactttgaacagttgggaaaatctatacatagttattgcagtctatcaagagaaaagttcagtacaaagctatttatgtctactagaaatattcatgttaaacttcaagtaattgggtgtgcaagccaccaccatgttttactatatgaaactattaccgtggtatctgttgtattcaggtaattatattgatggaaatcatgcagtaataatctaggtaagagagtaaattttgtctaaatcagatcaaatgaaaaattctccctctttctaatattcgaattgctcatttttctttaactctttggtgtctgaatttgtcaatcattcctggccattttcttctgcaaaagggctgggtcaggggaccaaaagcagataagattagaagaatttaaattttcttccttggaggcgtctgaattacatgaaactcttgttcgtgtctgttaatactgcaaggcataataccataataccttgcatagcagtgaagaggatttggaaagataaaactgcttccttttatcattctgtttatttcacaaacaatattggtgaatgtcgttcctgtaacatttggatttaagagccttgtttctgtagcttctccctccgtaacccccaccactaccatttcggggctatacagcaatagcatgcattactttaaaaggcaggctgcctagactggccacttgttagctttgtggccttgagcaaatgactaatctcagtaaactatctgctcttagtttccttctctgtaaaataggctcacttataactatctcatgggttgggaggattagatgaaataattaatgtagagcccttagatcagggccatagtaaaagctgaatgaatgttagcatttgttattttaattataatctattggggtgctttgaaggcttaatgcaaaatacttaatgagctttttggtagctgtttagttatttcgccccccaccaccaccccaaaaggagagatttaaaagaccgacaggagaaggttgcttggaaaagatggaataagatctataaatagaattaaacaaatattcaggaaagccttttgtgggaaatactgcaaaatttttattatctataaatttaataggtagataaaattactactcccattttagagacagaaaaccgagactcggagagctaacgtaacttgtctagggtcttaggaagatgacaagtgaggaagtagaattcaagcccacgtctatatgattttaaagcccgaggcacatcaaatggaaaaggctggttagtcagaaaaataggaaggtatatttatctgacaacttaaaatattaggactaacctcaggtaattatagtctggatatacatttttgctgctcctgtttatacttttgacttctgtgtatttgagtgtctaatcaaaggattgtcttttacatgtgttggagatgtacagactagtggaccccaatgatctattagctgtgtaaccttagccaagttaattctctttcctaaactgtggttctctcatctgtcatgtggggctaataatagtacttatgctggtagggtgattaagaaagtaaaataattggtgtttctaaagtaaatatgtggcacatattagatgctcattaaatggtacatattgttatggtgagatggatttggtacagagagaactggagatgggagaatatgaagggtgtataatgtggccttttattagctaaaccaagggaaggacttctgaaacagaattccaagttttaagagggagtcgtttattttggaattattttttcagctaaggatttttcaacccagtccagaattcttagagaaatttagtgatagcttataaattttaagaaaaggaattcacattatattgcataaagaactggtatacagggccatagaaggggagaatgttcttctgtatgagaataaaaaaaaacatctctcacacgatttttgaattaactgacagttttatagcagctttgtcaacccatcattcattgctgcaaccaaatctatgaaatccttcatggcgaaataaaaaggctctgttgttctccacatttgtatgaaatctctgttgctaatgaaatgccagccagtatcttcctctcaggtattgtctattagatggttgcttattttagaagaagtggagtcaaccatataaatttccttcttttgacatctagcacctgctgtcaacctgttatagctacaagcagctctcaaaattcacatccactaggatgccgctggcaaccaaagagttcagttcagttcagcgaacgtttgaatgcctactctgtgctatctaatatcagagatggtagaggggatacaggaaaaaagtaagattcagcctttgtctttaaagagctcacaatcaaatgtgggtatttggacaagtatatttaggcaaggcagtttaggataggtgcttcagtagagcagtattacaaaatgttgagagaaaactagaggaggagttttaaatgagggcttagtggaatgcttccaggaggaggctgaatttgacctggtcatgaataagactttgaaaagcagaaggaagctggagagggaagggtatttcaggaattgatgacaggagaatacataattagacctgttaacagtggggtggaagacgaatatcagcatgggagtgtgtgtgtgtgtgtgtgtgtgtgtgtgtgtgtgtgtgtgtgtgttgtggaggataagggagtaaatgaagtcagtaagaccagttagaaggcaagagagcccaagctggagcagtgaccatggagtaaaaagaaagaagtgaaattgagacataaggtggagctagaattaacaggattttgacattgattgcatatataaaactgtcaatctaagagaaggcctgcctctaagagttggagattgaattctttggaagattaatgtcataaccagagacaaactcaggataaggagttgattatgggagacaaagtaatgtgcttaacatgaagctagatgaccatactgagattttaaagaaatggttgaaaacatagagattgcaggagtgatgttacttttggacaagaattcaaaagttacctggaatgtctgagcttgcacagagagagggtacctggtgcaaagaaaagtgaacctaggaaaaagcctagaagttggtttacatttaaggaatttgagaagaggtagcaccacccaccccccacacaacccccaaccctgccaacttacaatatagaagcatttagacacacactgaataataattttttttttgagacagagtcctgctccattgcccaggctggagtgcagtggtgccatctttgctcactgcaactccgcctcccagattcaagctattctcttgcctcagcctaccgagtagctggcattacaggctcccaccatcatgcccagctaatttttttgtatttttagtagggacggggtttcgtcatgttggccaggctggtctcaaactcttgacttcaggtgatccacccgcctcggcctcccaaagtgctgggattacagacctgagccaccgcgcccagcctaaataatgaatttatagatgctacactgtatggtttcctttttctgctgctgtacaaccattcaagtaacataagtttcatcctggttcttaatgataccatgaataaagtatagaaactctttagctgaggattaaagattgttgtgtttaggtagaccaggtttctgatgcagccctcagtataccagggaaattagccattactgtttgccttgtaggtctaatgaaccctttagctttttattttgtatatgtctaagttactctacaaattcttatggaagtataaagagatagtgaaagacaatcttatgagaaattttaataagaattgaaatacaggctgggcacagtggctcactcctgtaattccagcactttgggaggctgaagcgatggatcacctgaggtcaggagttcgaaaccagcctggctaacatggtgaagccccatctctactaaaaatacaaaaaaattagccaggcatggtggcgggcacctgtaatcccagctactcgggaggctgaggcaggagaattgcttgaacccgggaggcggaggttgcactgagccgagatcacgccattgcactctaacctgggcaacaagagtgaaactccatcgtaaataaataaataaataaataataaaaaagaaatacaacttactttttgtatcaaataaattttggtgcacaaacatcataaatgacataatatctgtcacacatcctttagcaaaacaggattgttaaaattcttacagctaatattatgtggtgaagttcttcctgttgaataattaagtggattaaaatatcatatttcctttctgtcattagaaatatattgtgcattaatcagtccttgggcctgagaacatttatctaggttttcatcatctgaaaactcacagtccaatatttcacctgtattatcaattcaccattatcattagagtttagaatgctgctgtctctttccatctatcttctgttgtatctaataattaggagatatatatatatatatatatatatatagagagagagagagagagagagagagagagagagtgagagagagagagagattggtaataatactaatatatataataatattatatatatacacacatacagagagagagagagagagagagagagagattgattttaagccattaactcatatgattgtgggagctgaaaagtcaaaaatctgtaaaatccaaaagcctggcaggatggagaccaagggaagagttgatgttgcaatcttgagtccaaaggtaatccgatagcagaattccttccttttctggggacttcagtcttttctcttaaggacttcaaaattgattggagaaggcccacccacattgtggagggtaatctgctttactcaaagtctgctgattgaaatgttaatcacatctaaaaaataccttcacagcaacatctagattggtgtttgaccaaacaactgggaaccatagcccagccaagttaacacataaaatttaccatcatcagccatcatcatgaggttcataatgtcatgtgtttcttcacatataaatctcgtggttcttttatttttttagtagtacctagttaataaggtacctggaaatatacgttaaataatagaaatggtctttaatatcttaatgaatttcagagttctatcagagtaattgtaacttgtatataaaaactgatatataaaaaacaagtatgttttttcttcctatacgttgtgttaaattaatactaattacctatcatgaaatgaatgttttccatttttcataaatgtatttcatttttaaattaagaggattaatatcaaaacatatttgaataggatttaaaatccaaattacctgttgcgattatatttaattataaatctttcaagtgagtttataataggaaaaatattttttattaaagtgatgtaccataattatgaacataaatagtgttttctactaattgtttttgtcttcattatgtttctttttaaggggaaagatctgggttaacaaatgttttattcatccaccttgaaaattaaacataataaacaaaactattaaataaataaaccaattaaagaaaatagtttttcttccttttttgtgataaagatgattatgagtaaatatattaaagaattttatactcagacaaagtgagctaataagacaaatacaaacagagatgagcccagaaagagatactctacatgtttataggctagcatttttatcttatgacctacagggtcattgtaactaaagtcttgaatttctgttatattttggtacctgtgggcataaataggaatattactccctgatggcatcatgcattttagataaaactaagccaagggttaaacacgtgccatggactgttcctaaaaaatgctctcagctctcaagttatagaaaattgtagggattattattttgtacctactacttctttctttaccaaaatttacttatacatgatttgaaaattgcttgccacctgtctttattctgttgtacttgtcttaagtaaaacatttataaagtaagtaggaaggattaatagattgtgacctttctacatgaaaaggggaaagccgagcttgttctacttttgtcaggaaagagtttgaatagttacctgttactgtaaaacaatcaccccaaacttagtgtcctaaagtagcaataatcatttattatcactcataggttctgtaggtcaggattcatgcattgcttggttgaggggttctgtctcacgatcactcatgatgttgcactcagatgtcaattaggctgcagtcatatgatggcttgactggggctgaaggattcactttcacagtgagttacttgtatagcttgtgagttggtgctgtctagttggtttccctctaaacgagttcctccatgggactacttgagtgttcttatgatgtggtggctggcttaccccaggacaagcaacctatgagttttgccctgagttttctgaaacatgatcccatgttgctttgaatatccccattagacactcccacaaatgtcaatcatactctttgccctaaaagttgcagactacttgtacatgtcctttatcctacatgtgtacaggaaacacgtgcagaataacatgtgtttttgtttcttgaaagaaacaagaacccaccaaaactttatagctccgggacatgatgataattatctcaggtccactcagcctggctccacatggaaaatatgggtattgtaaagaaagcttttgaattttggaggcctaacaaaaagacctaggaagctaatagttggttatgagataattataacaatggtgatgaaagcaattgcgattattacttttatgttagtgagataaatacataagaatgtccttctttaatttcattccttaatttccttaatccccattcttgatttctggattagaggaaagctatactatctacctgattacacaaaaagactggactgaggggtaaccattaggactcttgttagttgaaggtaataaactatattacttcagtggctaaaacaaacaggagcttttttctcatataaaactagaagtcaggaaacaaatggttgctgatgttggtttatccgtttgacaggttctacctttatcctggagattctttggcctttatttctttagtaatatagtagtaacagcactgaatctaaaataagagcacttggtccaagcactggctctgcccccttagtgacagtgggacccatggcaaattatttaatctctccaacagttaattttctcatctgtaaaactgggatcctgataacttccatactagtttggtgttaggattcaatgaaatgacgcatggaaaagtccttttcaaatggctactcactatacaaatattaatgtcttagtaagctcaggctgctataaaataatgccatagactgggtggcttaaacaacaggcagttgtttttcacggttctggaggttgagaagtacaagatcatggtgctgacagatgtggttcctggtgagaaccttcttcttgctgtatcctcgtatgttggggagagaggtggtgcagagaggtactctagtctctcttcttgctcttcttaaaaggacactaatccaattatggaggcctcaacctatgacctcatctaacccttattatttctcaaaggccccacctccaaatatccattgggggttagcacttcaacatacaaattttagccggcgggggggatgccagcattcagtccataacaatcaactatcctcattattgagagttccactaggccttctcaagggttgacaatgatagtgccctgctagctataagagtaaaaaaattttcacatctagaaaatgggtgcacgaatattggtaactgttctaatgtctatgcacagaatttttagaacttgctcgagaaatttgtctttcctgacagtgttgcttctcttaaattccagtcgagggccttgaaaaaaataggttttccatcaagattctctgaatgaataaatgaaatgctctgatattttctttcaatattaagataaagcaaaatgtatacagaattttctattttcagtgtttccaattactgcatggtttggcttattaccatctctaagtctaaccctgggtcataggagtaaagccattgggggtcccctacaaaggatacaaggcagtggtagatacaataagcctgacaattggagtcagatttttctctttcatacaggaaccatggaactgttgccctgggccacagctggctctcagaaaaacgtagaactggtcgaggaaaggaaaggcagggagtccttgattcacttgttatcagaaaattgtctgttcaaacaacagaatgtttgaaaagataaaatcaagtctcaaatgcacagaataagaatgaggggaaaacacctttctctgtaattaaacagaaaagtgtgccatgaagtgataaaacccagtcaacctgaaaatgtgaacatcaagtgtaattgtgcagaacgataaggtaatatgaacagcacaggaatatataggctcacgttggcattttaaagcaatggcactttacctgttcctcatgaaggatttggtttagtctaatcccttgtaggagccactaagaggagaaggcacagtccttttgggatgtaaaatggggaattctttctatgattacaagaatttgtaaattgctcagagttttaggacagcaggttatgtgtctctcaatgttgggtaccatgccaaacgtactttaagagacatagcaataaatagaatgggattcatttttttcttaatgtctggcagggcaaccaaaatgcccacgtttcccttcagtagcttggtattttggtaactaaaaacatgttccagggaactccagaatatgaaacatttcagacaatttgaaactgtcaaaattttcacttctttatgggacaaataaaatctaactttattcagattttaaagtatctcataaaagagtaatactttagatttgtgctgtgctttatacgaattggatgaggaactcttatacatatataagtggattttattttcacaacagtccctatggtagatattgtccttattaagtaaatgagagaaccaactatcaaagatattaatattttgcataagatcacacagatagcggaaccaggatttaatccaactcctctgattctaaaaataggtgttagatgggtattctttccccaaacctatgctgaaaggaggctacatttggagtcagttattgaaagtttaaatatatgtgtatatatatatatatatgtgtgtgtgtgtgtgtgtgtgtgtgtgtgtattcttatatactcatgcatgtagatagttataaagtacatgcttatatgtcaattttatatatacgactgatatataaactatcaatttgtgatagtttatttcaattaagttcaaacatattgggtatttattgactcatgggacttaaaatttctcagaggcattaatttctatgcctttaagcaaaataatgtttagcccgttttagaaagataaaaggctaacatatgttttgtttttgtttgttttgttttgttttgttttgttttgttgagatggagttttgctcttgttgcccaggctggagtgcaatggtgcgatcttggctcacagcaacctccgcctcctgggttcaagcgattctcctgcctcagccatctgagtagctgggattacagacacgtgccaccatgcccggctaattttgtatttttagtagagacagagtttctccatgttggtcaggctggtctcgagctcccaacctcaggtgatccacccgcctcggcctcccaaagtgctgggattacaggcgtgagccacggctcctggccgctaacacatgtttttaaaaaataaacaccattcgagtaggaaaagtgggagaactggtggttcagctagagatacggagatgggagggcaagttgctttctcatgttgccacatctgtaagttacaaatgccatagattaggaatttcaacgttgttgtgtctctctgaggacattctccatgtagtatatgtttcgcctccctgatggacagtaagcatcaaacggttactcctttatatttgaattattttaattctaacatcttgttctgaaaataacgggaatgccataaatacttactgattgattggactgtctcgcaggggagctggcagctagtgtaggctacaagctgccatcatcatctccatgaccatgagtcatcactggaattaccctaaagaggttaataaaacgccttgtttgaaaagcaaacaaaaagccagaagaaacccaaagcaaacagacccagactttgcaatgggtagtgaattttcagtcttaagggattgagagtccttttagtacaatctctcataaacatataacagattttaaaagcaccttggtctgattccagttcacatacctcatccttgcagaatacaacatactaggccatttgaaatgttcctcagtttacttttggaggatctgctgatttgagcaaaatggaaatgaaatgtatatagaaagctcttaatttttttttttttttttttttgagacggagtttcgctctgtcgcccaggctggagtgcagtggcgggatctcggctcactgcaagctccgcctcccgggttcacgccattctcctgcctcagcctcccgtgtagctgggactacaggcgcgcgccaccatgcccggctaatttttgtatttttagtagagacggggtttcaccgtgttagccaggatggtctcgatctcctgacctcgtgatccgcccgtctcggcctcccaaagtgctgggattacaggcgtgagccaccgcgcccggccagctcttaatcttaagaagttcagtttcgcagctccccccccaccaacccccaatcttgaaagcaggaatttggattagggttttttaataaaactttctttttcttattaccatgatgttttttgagagggtacagagaactcattaaaatgttatgttataacttaagacaaaatgggaatgagaatttgcattatataaacaaagtgtatgactaagtaacctgttacatataaagtgtttgactaagtaacctgttgtccctaggagaagtagaataaatatcaacatgtggcaactaacagaatgtgttgtgatcactaaagcagcacattcattgactttacacttcattaagtaggtaacgaattttacaaattttaggacttaaccaggctgtccataatactttgcatcagtaagtaccaaaatctacgatagggcacttcggagttccttaatttaataatattgataatattttgtttacattttgatttaattgtatcatttcattatttttgtgtcctgattctaaatatatacgtcaacaagctatatggccattcaaaacaggtaaactttaaatatgtttttgacatagaaattatgtaacagtcttcatcatgagtataggagtcagatttccaattgaaaatttcatcctctaaaatacttggcatatgtatacagttgtctagttcagacaaaaaagtattgaatataaagttgattttgtaaaaccagaattggcatccttaaggaatacaaataaagggaatcttaagataatataataatgctgatttgaaatgaaaattaataaaattgttattctattttagtatgctaaattggacagatccttatttcattgaaaaattagattcttcagtatatcagtgcactgtgctaataacacaagaagattaaattatgtccatatgtgatttggtagaatttaattataaatataataaatccttcaatatgtacagcagtgaatattccaaatttatctctcatataagttgtgagcaacttaaggataggcaccatcccttaacatacctagattaagaacagtacctagaaaacagtcatcaaatgcttcctaaataaattttcaccttcaagcttatggcagcaaattaaacatagattgacccttttctaatagagacagaatagatgagactgatgacttttttttataaatgtgtaagtctgcaaatatttagtaaggatctaatttacacaaagaaatcaacctagagtgagattattttattcatttcccggaggctgtgactgaattatatttgcaacttgccctaatttttatacttaataatttgcattagtatttaaattatgtgaaggaaaaatataagtttaaaatactgaaaagtatattcacacattcatcaaatgttgattatgtgcttacagtgtgcaaggtattggggctaggaattatgtggtgttccaaggaaaccatgatacagcctctttcattacagtgtttattattaggtagaaaaagtaaaattagtataatattagataggatatatgtgtcataggagtaatataaacaatattttatgaacaatgtatgaaggtataattttgttcatttatccatttatcgctctgtacatccatccgtttattcattgttcattacttcatttaataatactttagtgaccattggaaaagggatttataaaagtgagtaaaatgttaatcattttctaaagaagttgataatctagggaaagacaaatgtgtaccaacaataacttggatataaagcataaattagaggtacaagcaaagaaaaatgaaagtacaaaggagaaaaatatttggctgcatgagagcagggactgtgtcttgtttcatcatagattttccagaacctagatcagtgtttggcacaaagtaggttcagatgagtttgtgttgactgactgtctactgaagtaattgtggaacatatcatagaagaagtagatcagaggctggatcttaaaactgggagaaatacatttcagctccgtgaaaccccagaagtgatatttgacattagaaagcacaaagtcacactctaacagtgacagtactgagtgaagtaagaattttctgcaccccttcttcttcttccactcccattaacccttgttagggtgagaaatagcagctggtgaatggtagagaagactagcaagacagaaagaggaagcccaccatgcccactaccccaggtagtaaaggacctgtccacttccatcctcttctaattgaggaagaaatcatatatgtgagttcagattgaagtattgattaatatattgagctggatattctaattttaatgtctcgatatggagcaggactttgtttccttaatgatgaccagaaaagacatgaaacttacccatattttcacccaagaacagaacagaacaacctacttgaacagatttaaagggagaaccaaaggcagataaagttgtctttattcttacacagcataagtcctgattattcatcaatttatacattttatgaatttaagaaaaaaggaaaggaagactataaagggattcatatcaggatacacatgaaggtaatgtagtcagttttttagtggaaccaaaatattacagtcatcactgaacgaaaatattacaatcattacatcattcactagattaagtgaataaattaaaaatatattaaataaaattaacaaagacatgagcttttcaaagtgtgtggtaacctggagcaataagcagtgtagttggaatgttacctcttaaggattatcaaagaggctggctgttcagtaggacagtggtatggtaaagcaagcttgctacattgcagaactccagagggcaacattctaattatctttagctatggggtctgttcccataggataactataacttagtaggttgacagagcctcccaagaaaccacagcagtgctcaattgtggcgaattacttctctatcccatcaaaatgtcgtgattggacccacaactgtgcatacatttttttggcattttcctgccagaagcatatttacatttctttaatatccagtcatatccttcccttatttaaaaataattattcagagaattccagttttttgtaatcctctcttctatgaattttagcaacacttatatacagatacttgatattctggagaaatatgcttcaagaccatgtggattaacagattttcaaatgccgttatagtatatgtatatactatatatgtataagtatgtgtagtccccaaaatgcgtactttaaaatcctcataatagatctcttacagatgaggaaaagaagatgtagaaaggttacataaagtagctaacaagtattccaaataatattgaacttcagtctgactattccaaaattgcattcttaactctgatttctatatttgttttccattctaaactgtgtattgtgatataagttcctcactaaggctctttttcagggtcttcctaatactaaagtcactcttacaatgagtattttctttacgtgtgaaatccaataggcaaaaaaaaaaacttggcaataaattttaggcattaacctcatgccaagtaattatcagaaggctgtaatgctttgaaacttcacaagtctgattttaagataatggaatgaggcttgcattgtgaactttcttgatgctttacattgcaatatgctgtatagattgacttcctaaaaataaaaaataaaaaaaaagatttgtagagcatactgggaaggtcttgccaattaaaaaccggagattggctgaaggcttgcagcaattgaattttgaatacagatggtgtcaaatcgagtgtttccatagcaacagactcttccttaataacttttagatgggagggggtacataaaagagaaaaccatcttttagcagatgtatgttttcagcatgttttcagattgattttggaagctaatttgtacttaactagtgattgttttaagtggatctaaatattactaaattctcctgaggaaacattttgagaataacagaaataaactctaggaactttataaagacatgaaaagggcacaattttacaaaacctttttttttttggtctggagccaatcaaacagtattttatattgagtatgacctatcaatagtcaaagagttcttgattcttaatgcctgttaatattgaatgtttagaatatgggtaaaatcaaggaaaaagtgctatgtatctcatggatttggaatatcttaatatactctttcttcaggttaatgattatttttaaaaaatgatgatataaatcatttcaggaaggactgcataaagaggtcattgatagagttcatatcatatagcagagttgtcgtagatttaatgtccaatcctcagttttgcatagccaacaactaaattttagtagtttacctagagatgatcaggctctgggagactgattcatgctacacaaactcacaaggcactggtttataaaccatttgaaagaagaaataataattcaaactattattttacaacaagactggcaggaaaatcaataatggtaatgtgttcggggtgtcctccccagtgaggactatccagaagaccaaatgatagattattgttcaaagtgatagaattgggagaagggtaataaagcattatgaaaggatgcttccttaagtgagaaaagctacataaactacccatctttactattctagatgaccttaaaaatattaatagaaacagagaaacagacaattcatctcagatggtacaaaaaacataatagcacatgtttgctccctggcttccttttagattccctgcaagaggttttcccccaaccaccaccatatacagatatacagctttaccttcactctcctattatctgtcacagaacaatataaaactcagatatgttagtataagttaatagttggtagctttatgttaatgacattgctacctgttacccccagattcatctgggttacttcatccccaaaaccctttcaaaacgacatttcccacaaagatttctagtattactggccattcccggacatcttgcttccaacataagaaattctgacataatagggatataagaaggccttgggaatctgtatttataacaagctccccaggctatctgaggctcagccagtttatttttgcagatagctattactatccacaatctcttttatcctattgtaattgcagaagaaaatctttctttctagtttctttgaaatttctggaatgttaggacttagagcctctaggaacttgtacataaaaagagagacttaaagagatatcaaagtagagatagagatagatacagataagtgcatagacatagaagtagacatatataatagaaacatatatgtatacatagaaatagaaatatgccatttagaactcttaagaaatatgtgcactcttaaaatatagtttaaaaatgtaaagaacttgctattaattgaaaatagcataataaacttaaatgaaataaggaccccaaacgcaaatatttctctctgacacaccacacacacacacacacacacacacacacacagacagagagagagagagagagagagagagctgtacaataacaaccaattcctgacccagataaagaaaaaatttttatttatcttctttctcattctattattattttttctagattaaattaaaatggtaattatgtgtaagaacaagcattattgccatataaacaatgcaacaaaggaatcaattgaaaattaagtgaaaataaaaggtacagcttcgttaaagacccagttcttagagcttagtctcaaactctttgtactctgcactcttttcttgatttgactcgattgattgattgattgattgattgagtcagagtctcactctgtcacccaggctagagtgtagtggctcaatctcggctcactgcaacctccacctcctgtttcgagtgattctcctgcctcagcctcctgagtagctgagactacagacatgtaccaccatgcccagctaatttttgtatttttagtagagatgggacttcaccatgttggtcaggctggtcctgaactcctgaattcaagtgatctgtctgccttgttcccccaaagagctgggattacaggtgtgagccaccacgcccagccgattttactctctttagaactgcaaaagtaggaatctagctcatatgcagacattctagaaagtttgatttcaaaagtcttctcaaaagaaagagagcaagagcaagaaagaaagcagagagagaaagcagaagataaaatggcattgtttgaacagggatggaaactgagtaagaaatttggtcactaaacactttagtgtctatcatttaagattgtaatttggttatttatcactggaaagtgattaataatctaaaatgcattttataatactaatactattaaaacattaatttttggagaaagtttattatagattgatttatacttaccactgaatattaaaatgtttaatggaagtagtttcaaatagtatttaatgatatagggaattattacaacattaatgctcaggaaaaaaagtaggatatggaattatttatgccataggatcctaattttgtaaaaaacagagaaaaccagcaaaagaaattataactggaaggaaatacatcaaagtggtttgcagttatcactcatgaaattgaggtgaacttgatttttttccttttatatccatccgtgttttaataccacagacatgctttagatctgcccgtatattgtggctttcagagggtaataaaccattgtgactcagaaatagctaagaatttttatctctcaagaacaaattttcactcccttggggtgtcattatctgttgagaatgcatgcaatagttcaagagccaaaagactctgattcagtaagtttagggtagaaaaaaattaagtacatttttaaaatagagctctggtgtttcaaaggcaatgtgcaaatatacctacttaatattattctaattttttcaggatagctgaaatataaacatctatttttagtaataacacaaatgatggaatgcttttacatatttataaatcattaaggatttgctttttgtttctactgtctggaacatataaatttgaacacaatttagaacaacattcaggaaatatgatttatttattaccttcttgacctttattttatttttaccatctacttttatgtaagtcttttttttcaatcattgtttatttctttacttttccttccacatagaattaaagggagattcgggcttagtgtccttaattcatagttccattgtggctattaaaaggtgaactgaaagcttgcaaacacgtggtaccttgtagataattttctccagtcagacagttagataaaggcctctgaggtttctggggtcattgttgaagctatgttttaaaatcctatatccttctctcattgttggttccttttcacaacacagaagttttcttttttttaatttcaacttttagatacagaaggtgcatgtgcagatttgtcacgtgggagtattgcatgatgctgaggtttggagtacggatcccatcgccatgttagtgagcatagtaactgataggtcgtttttttaacccactcccctccctcctccctctagtagtccccagggtctattgttcccgtatttatgtccatgtgtgctcagtgcttagctcccacttataagtaagtgagaacatgtgatatttggtagaacttttcatttttaagttaaaaaacaaaacaaaatgaggatgagtggaagaactattcagcacagcaggttataaaccaattaggatgatgacgccctgaatggagattttcatgaacatctcatattagctatttcagctttggtttttttaatgttcaaagtaaatagaataatgaagaggctatttaggaaggtttagactgagggaaaaaaatcctttcattaggttccaaataacggttagcttattaaacagcaagaggcagagatttagcagagaaaaaataaaaagatttaaaaaaaaacaacgagattaaaaggtcagtaataccattggaactggcagcatggcaagtttatatcagctatcttttgttttggaacacaactatgctaattctgttctgaacctcttgctaatgcctgtctcaagaaaatttaacatactttatctgtgtgtacaaaaatacctaaggacaaagctattacccaaactgtattcagattgaaagaatccatatagaaatttgcagctaacgtattagtcagtgtatgtaatttctactgcttcacagcacaactctttctaattttcaggagcaatatagcaactgcttgccagccaagagaaaaccataggagcattcttatcattggagccaacattagttctgcctacagtgactaacatagatgcgtttattgctagctggaattttccattggcactagttacatgtaataagttagtgctttcaaatggaccgtggaatataggaaaactagagtctgacgtaaccaaaaaaaaatgttgataaactcagagattatgaaagagaggagaggagtggtttttgtggaaatgatagaaaagcaaaaaaagatggcaggatttggaaaaaagaaaatcaggttagagatttaattagtaaaggagctccttttaataattatataagagtatgagtttagagtaactgcctggctaatatgtacaatcttcaagttcagtcgttttccaaaattctaacttttagcattttttttttgtaaattttaagtggaaatcttccacttttgttgactaacttggctacctgatattttactcaacctcctactttcttgttctctacttcttctgagtctttgcttccacaatgaggtagctcatattccttaagtttcctgtctggttttgcttttttttttttttttaacagctaaaataaactctacaagcatttctatcattttctttacatccaatctcttgtcagccatgtcctaatcactttggtaaagtatcagtgaccacccaagaggttcactttgcttcgtcaaaggaccacctgtcatgctttatctccagagcttctgccttgaaagtaagaataatataacctttcctgaatgtcttatttcaatttcatgcatttgatctgcctcttcagaccattcccaaggctttgcccttgttctttaccctcatggcttcagttattcatcactatatgaatgacagctctcaaactgacagctctggcctctcacctatttcatctattccatatggcaaactgtctatattacatttcatcatgagggataattataattccacattcaacaagaaattgtgggtccgtgttgatttccaacagcaacctttattttttagactatgatagagaaagggtcaactttctctcttacttatttatctcaaataactcaaagtcaagctagaaaagccaagcaagtaatatttcccaacaaagcagctttaagcaaaatgattttcagacacgacatgcagcctgtattgtggaagaagcacagtgacctaggtgtactttgctgaaaagcagtggtcacagtccattagtttcatctttttcctgcaagagagaaaagtatggcagggccaagactcctaagaccccttaaaaaattgtgaggtttttataaccctgttcatttcccatcaaaagcattcatgaagcacctgccatgtaccagatgatgcattctaggcagagggaagaacttgggcaaagtcctgtacattttatcttctaaatcttactaatcttttcttatctttccatctaccacccaccatcaggctgtgcctggactcctatgctaacatcttactctgtttttctgcatcttttttgccctcccctccaatctactctccaattagcaacatgactaatgttttcaagcccagattagacggtgtcacttccctgctttaaacctttcagtggattcccattgcactgaggttgaagaccaaaatctttaccataactcacaaggccactgggagctatgaaaattttcttttttagtttttccttttaattagtgatgcattcaataagtggagtctatcgtgaaagcatagattccaaaggcatgtgaatactcaattatgtaatttacttacagaatgtttattacttcttttttagctttgattttgtatacatcctaactcaatctcagttatataagagattataaaaaagtttgtgatgaatgcatacataaaggaacaaataattaacaaatatataaagacaaatcagtattgaatgaccaaatggctctttatttattaaagaacttagaaaaatatagtcttgcttgagaccaagttctggcaacgtatgtgtgtctttttgtttgggttaaaaagcattagttttatatgttttaaaaggataggatcttcccttggctgcaaatagtataggcaaaatgctattctgtatcttattttaaagaaaataacaatcataccttattatttgctgacagttttgcagtttacaaagcactgttcacatggattaccttattttaaattcctcaattttttttccttttactatgggaattctgtttcaggagaatttccctttaaaattaaggtgattatactattctgttcctgtatttcgtagccatatgtttcaccaaggtattgtctctctccaggtctttcttctctggatgtatagttatgattttccaggaggtaaatgaaaacagtgggagcaattgacagagtgttttttgtttcccataaacccaagcattgcatttaaggagctgctgtactattgtaagagttcctatactaattttaaaagttcatttacatattttgtagatttttaggataagtcatcagaaaaaaattaaaaataaatttacatattttgtattaagctgttttgttacttgaatggggattattggaacgaggaaagaattacttttatctccccatttttcaaatcatttactataacattcatgaattgctgaagtttaaacaatcaaaaatatctgaaaatggagcctaggaagggtaacttatgtctttcatactccttcctttttggtttttctaccagcattttagtctaaaatatattttattttcactgatcctgtgtttgtcttaataatatagtatgtatgttaaatgaaccagaattcattgatctttttttttattattcctctttttgcttttctggagaagcatttgaagaaatcagttcaggctacacttcatcaattcatttcctcatcttccccttaatacaaaagccccattttcactcttcaaaacatttgatcacatacttaattttcatagcattgactaaatgtatgtgtttattttgtttatatattgcatatttgtgatgattttcacttttacagtttaggcatgggtaggaaggacacttacatgagtacttaagttcttggttatgacttgagaaactcacaaggtagcatggaatggcacgtaaacaaggctttgatagggtgaaagggaattatcaggacaaaactgactagtggcagtgacttttgagcagagtgctgcaaactgaaaaggcagagagcattgtaggcagagagaaagcatagacacatgtgagatacatgtgaaatacttagacaaatgtgaggtgtgtggtaacattgtacatacctagggctccttcctgtgtagctgtaaagctggagtataggcatcacaacaggcagcagaagccaagaaactagaaaagtagacaaaggccacgttataaaagatcttgtaggataggtaaagagttttaatactatcctgaaagcagtgtggggtgggaggcatgacattaaggaaatttaataagtgatgaaagaccaagattttcatcttcagaagacttctctggaggtgggtggaccacttgatgtcaggagttcaagaccagcctggtcaacttgatgaaaccccatctctactaaaaatacaaaaaaatagctgggcatggtggtgcatgcctgtaatcccagctactcaggaggctgaggcaggagaatagcttgaacccaagaggcagaggtggcagtgagccaagatggtgccactgcacttcagcctggatgacagagggagactccctattaaaaaaaaaaaaaaaaaagacttctctgactagagttttaaagaaggatggggagtgcaaaaggctaacattaaatcagtggttctcatccctggctgcacgttagaatcactagggggagtttaaaaaaaatgccaatacttggactccaccccaaaccagttaaatcagagccttaatagggcccagacattcgtagtttttaaagcagccctcttgattcaaatgcacagacaaggttgtgttccgctgaactagagagaccatcaggaggcttttaactaaagcaatctagggaagagagagatgaatgatatagaggccagaagagctattaaggagaagtgactcggcatcttcttggttaaagtataaggaagaaagaagaatgaaggataatttgcatgtttctccttcagtgactaagtagaggaacagatgtgtatcagtgattaggggagaggaagaatgaagatgatgtaatccagtttggatatgttggctatttcatagagatttagtaggcgtttggctctatggatacagagttcaagagacaattcttagcttaaaacacagattttactctgattattttagagatagtaaatgaagcaatatacatacatgaactcaccagagagaatatgtaaagtgaaaacaaaaagatcaaagggagacccctagggaatagcaacatttaaggaatgggcctaagagagtgaggagtggccaaataggcagaataaaatccaagaaggaatcttccatattaatcaaaagagaaggtttcaaagagggttcgtcaattggcaggtactgaagggatatctgaaaacataaagactttagactctctaatactgtagcaactttaaggtcactgctatcacctacaaaagtaatttcagtggcaaaagccaaaacgtaatggtttagaagggtatgtgaggtgtggatgtggaaatagtgggtatagactattgcttctcaaaatgtaatcacctgaaaaatcttattttaaaatgcagattttgattcattagctctagagtggagcctgagattctgcatttctaacaagttatcaggtgatgctgatgctgctcatacacaaaccatcctttaagtagcactggtgtaagccactctcccacaaaggaggaagacatagggtttccatcaggggacgcaggtggggtgtaggaccaaaggaaataatactcttttgtcttttgtttggttggttttggttgttttcttcttaaaataaacatggttgtagacggagattgaagacataggaggggtaaaagatggaatcacttctcatagaagatggaagagactggaacattgagtacagcgagggaattaggcatgggtaggagggacacctaaatctgaagagaaggaggtaaggaagaattgaaatacagaaaagttctgtcagtaagcaatgtatggaattgtgctttttagccatagtttctgttcaagaaattgttttccatttatttttatttcttaacttgaatagttggatggtggagtatgcttgtaaaaataagagtgaggccactttgtttttcggggttaatttccgttttctgcactcatcaagtaaaagttgaagtggcaaggtgtagatatgaaattcagtgtgtgctaagggagaaaaaaatgctttttattctacatgattttaaaaatatttatattccaacaaatgcatcaaatttgatgtgcaaatttacagtgatgaatgagttttattgtgtgcattgcatgctggtgacatggtaataaatctgtggtgctagaattataatggtcccctttagcttcgctttaatgaactcttgctgaacacttttgagttgttagtactttatttgctacatttggcacttaattagttaatgactgagatgctggaccgatggatcatctaatgatatgttaggcctattatcacatctagatagtttcttttctgtgacttgtaagtgacctaagatgataaactgaaatatttttgcatagatatacatcaagcttttctcctaacttcaggctttcatcttaagcaatagtttccaacacccccaaaagagaagtcattatgtttttaaaaaaattattcattttaatgtgatcaaataatatcacatttcagcattcacctatttaattaataaaacaacttacatgtttcattatgactggatgttgatattttttcataatctattatcctccaaccagtggtaaaaacccaatcctcctctcacccagctcatctttccgtatgggaagcaatacatacttccctatgttttattaccaaaacaggagaatgagctttctttagaaggttaactcattttctctattagaatattcagcatacttttaaggaggtaatctggtctttgacagtctgttgattagaaaattaagagacctgcctaaattccatttccaactcctctccatacacattgtgactttgagcaaaacgttttgccatttccactcgtataagttctgtttagtatctttaaacttccatatcccacagatggtatttttttcttcattggaaagtggtgttagtgattcagaaaactgcttaaataatacactgctttgtgttttctgtgagagaatttttttttttttttgagacagagtctcactatgttgcctaggctggagtgcagtggcgcaatctcggctcactgcaacctctgccgcccgggttcaagcgattctcctgcctcagcctcccgagtagctgggattacaggtgcctgccactgcgcctggctaatttttgtatttttagtacagacagggtttcaccatcttggccaggttgatcttaagctcctgatctcatgatccgttcacctcggcctcccaaagtgctgggattacaggtgtgagccaccgtgcccagccgagagaacattttatctaacattctattttaaaatttttcaaatacacagaaagctgaaagaattgtacagtgagtgctcatgaacccactctctagattttgttgtatcactttacttctttctctacccgccaacccctattattttctgatgcccttcaaagtaagttggtgacatcggttccctttacccctaagttcttcaacatgcatgtcattaaccagagctcaatatttgttcacatttcttttgtttgtttgtttgtggcaaaatttgtatagactagaatgtgtaaatctcatgtgtattatgaaatgagttttgatgaatgggtatacctgtgtgacacatgcctctcttaagatacaaaaaaatagccttggcccagacaggagggaacattttttaggttggcttgagtttcctttaactgacatgtagcatgactgaatatatgaccataagattgccaagttgaaatttaccaaaggtccatccaggggaacagtatggctattgatacgtcatttgttcatctaggcactgggctgggtgagttcttcacaaaaaccttgtaaggtgagctttcagctctgacagaggcatcaagaaacgtatttcacaaactgttagagctgaaaacatctccagggatcatccaatctatcctcctttgctttatgactcaggatttaagaagccccagaaaagtccaacagtgttaccaaagtacacgattgcctatttacgcccctataattgagagctgtctaggggtcaggtacttttctcagtgccttgtgtacattatttccttttatctttctagattattaattttcttgttattatccccatataatagaggagtaaacagtgtgaaaatagcactaaactgttgatcttttccatgttccaaactaaccttaaatgttaggctaatattataaaattttaaaatttagtcatttgttctgggtctggcttccatgaacttaaccaaaatgcttggctgtttctgcattctagctttttgggatttagagaaaaagcaacttggtcatcatagtggccaggatttatttatgtgccaataactcccctctgtttttagctttttgatctgttacatctcagatactttattctctatttgtaaaacaaccacattcctccttttctatatctaagtgaaaaaaaatgcccgttcatactagctacatggttagcatatatgtttcttcctctttgtgggtttgagttgaaacttcttttgcaaagcttaactatagataggtcttccacagaaccctgtttaaatgccttgtggaagtagaagggacatatcttaatattccttataatctgtgttattatttggactttcctcagttccttatatgtctttgtatgtcaaacattgagttatgcttacattactctaggtatagttgtgtcctagctttgtacaaggttacaataatggtggtttccttgttttcagcttcattcttgatcatgcctaacattttttgatggttttagcctcggagaacagtctactgctatttctccctttttcctgatcccaacaaatagtttagaaatctttgtcttaactgcaattgggatcatttttcctttagagttgcccacagttagtcatgtccgtcactcttcactcactcaaatgacctcaaaagatttacctgcaatttaagcctttcaccttggcattttctacctggaactctggcgtactctgtgggatcagtgagatccatagtgtgcactccctagcagatcgtgaatgtttgttgataactataattcattgtttagtcttgtctatacagagaagcagtagcaccttgctttagtaggatcctttatgcttttattcattattgaattttatcttcacaataattctgtggttctgcagttgtcattatttcagtttgggagttgaggaaactgagatcgtggcaaatcaacttttcccatttaaatccactatttcatcgctaatccagggttataacccaagactaactgctagtcaaagttgctttctaaaaatcagttacacagacttctaattctcgtgctgtacagtcagtgcagaaattgcaacagaactgttctttgttctgtagcaatgtgtattcaaaaggtaatcatttcttgtgtataaataacattcctccctaagagagatgttgtgggaatttatatcagtcaagaatgtatatcgataattaaacatagctagtctaaaaaacttgaagtgaaagattggttcgtattcaatcaactgaactgtttctttctctgcaatattgtggttcttgacatgattgctgagtttccaatttgacacttctggaggttcgtaaatcaggacacatgctgggtctcagtctgtcatcctgagtcttagcattggttatttatttccctttattacccaacatctatttactgcacaaattagtcgagaagctttccatgacggacctttgtgagaaaaaaaaaatgtgtacattgggtagctcttcaattacaaacatgcacagattgtctgggtttatgtgcatatactttattattatttcacttttgtatgtcagatgaatttggtgtaaatgtaaatctaacaatatgggctctagtggccaaatacattgccataatatgtttttgatctgtcagtctcctgggtgaagtgtcgcaagtgtggtaaaattctgtagtataaattgatgctcagttatggacaattaccaggtctatatgatgtcagactaccacactgatccacttttaggataacagcttcgctctgatgatcttcagattttagatttgctttcattccttgacaaaatgaaatacatttaaaacttctaaaattgtcttttgtatatatttctgcagggtctactcttgggactactataacaatcaattgtactgctttgtttcttttattaaatagcagaatagctgcttgattcgtctgtatgtgctgatgtgtgtctgtgaatctagtccagttcactgtccaataagaatttctgaaatgttctttgtcacatcaatgtacagtcaaaatcgtattgtgtttgtagcagaatgattgcatcttttattattcacagcagccaaaatgacacatatttcacacgtgacaccttttttaaaaaagatgaattgtccaaagttgtatgtagaatatatttcacaaatcaaattccctatttaataaatggtgctgggagaactggctagccatatgcagaagagtgaatttctataaatagaatgcaactgtgtaaatagcatccaaatcaagaaacataatataatatagccagaagctcaggatcccccttcatgtcttctccagtcatgaacatttcacaagggtgactactatccttacttcaaaagttttctattactttttcctgtttttgtgtattatatgaaggaatcgaacagtcatatctacttgtctgtggctgtatttttccccccaacaatatgtttgtgagattcatccatattattgtatgtagttgtggattgttcacttttcttactgaataatattctattgataccacagtgtatttacacatgttgatatagatgagaaattgagtagtttccaacatgaggaaattgctgtcaacaattctgcaatccatagccatgctatcaacagtctagtacatggtttttggtgaatatattaataactatgcatttctgttggatatacacctgggagtggaattacaactcaaataatattcattttaaaaattttatttcgtttttagtcgacaactatattatggggtacattgtgatgtttcaatccatatatatacattgtggaataatcaaatcaggctaatagcatatctatcacctcaaatacttctcatttttgtggtgagaatatttaaaatcctcctttttagctatttggaaatatacaatatgacaatattagctatagttcctgtgctgtgcaaaagaacaccagaacttattcctcctgtctaactggaactttgtacccattgataaacgtctctcatttttccatccacccaccactgcagcttttgatcaccaccataatactctccatttctatgagttcaactttttttaaactgcacatacaaatgagattatatgatatgtgtctctctgtgccaagtttatttcacttaacctaatgtcctccaggctcatccttattattccaaatgacagaatttcctaggtttttaaaattttttttttatttttaattttttggggtacatagtaggtatatatatttacggggtacatgaggtgttttgatataggcatgtaatgtgaaacaagcacatcatggagaatgaggcatccatcctgtcaagcatttatcctttgtgctacaaacaatgtaattgtacttttagttattttttaatgtacaattaaattattattgactatagtccccctgttgcactatcaaatactaggtcttactcattctttctaactattttttgtagccgctaacaatccccacctatcccctacctccacactaccctttgtagcctctggtaaccatccttttattctgtctccatgagttcaatagttttaatttttagatcccacaaataagtgagaacatgcagtgattttcgttctgtgactggcttatttcatttaatgtaatgacctccagttccatccaagatgttgcaaatgacaggatataattcttttttattgctaaatagtaccgcatcatttatatgagccacattttctgtatccattcgcatgttgatggacagttagcttgcttccaaatcttgcctgttgtgaacagtgctacaacaatgtgagagtgcagatagctcttcaatacactccctccttttcttttgagtatgtacccagaagtgggatttctggaacatatggtcattctctttttattattttgagaaacattcatactgtctttatggaggccgttactaattcacaatactaccaatagtggataaggtttccttattctctgtatcctcatgaacacttgttatctttcaactttttgataatagccaatccaaaagatatgaggtgatatctcattgtgattttaatttgcattttttgatgattagagatgttgagtattatacatatatgtgtgtgtatatatatatatatatatatatatatatatatgctgtttgtcatcttttgagaatgtctattcatatatttgcccatttttttattagggttatttgttttcttgttattgagtagcttgagttccttgtatattttggatattagcaccttatctaatgtatgatttgcaaatatcttctcccaatctgtgggttgtctctttattccattaattgtttcctttgctgtgcaaagctttttagtttgatgcaatcttacttacctatttttgtgttgattgtgtttgggggtcatatgcaagaaaccactgcccagaccaatgtcatggagctcttctcttatgtttttgtagtttttagtttcaggtattacatttaaggctttaatccattttgagttgattcttgtataaggggtgagataagggtccagttttattctgtatgtgaacattcagttttcccaataccatttattgaagagactgtcctctccctattgtgtgttcttgctacctttgtcaaaaatcaattgatcaaaggtgtgtaggtttattttagtcctctttgtcttattccattggtctgtttttatgtacttgccatgctgttttgattattatagctttgtaatacattttgaaatccagtagtgacatacttccaattttattctttttagtaaagacagctttggctatccagggtcttttgtggttccatgcaaattttaggattttttaaaaaaaattctataaagaacaatatgcagattttgttagtattgtgtcgaatctttagattgctttatgtttaacaatattaatttttccaatttatgaacacagaaatctttccatttatttgtgtcatcttcaatttctttcgtcagtgtcttatagtttcaacacgcagatctttcactttcttggttaaattcactccaaatattttttcatgctattataagtgagattgtttccttaatttctattttagacagtttgttgttattgtacaaacaataacaattgttatcgctactgatttttgtaagttgattttgtaccctgcaactttactaaacttgtgtatgaattctaacagttttcagtggagtccttaggatttgctgtataagattatgtcatcagcaagaaggggcaattttacttcatccttttcagtttggttgccttttatttctttctcctgcctaattgctctggctaggactcccagtactaagttaaacaagggtggggagagtgggcatctttgtcttgctcctgatcttagagaaaagccttctacgttttactgttgtgcatgatgttagctgtgggcttgtaatttatggcttttattcttttggagaacatttcttctatacctaatttgctaagagtttttctcataaaaggatgttgaattttgtcaaatgctctttctgagtttattaaaatgatcatacggtttttgtacttcattctgttatatgttgaatcacatttattaatttgcatatattgaaacaaccttctatcccagggataaatccctcttggtcatggtgaataatccttctaataaactattaaatatggttcactagtatttcattgagaatttttgcatctaatttcattcgtgatattggcctatagttttctttccttgtagtgtctttgcctggctttgggatcagggtattgctggccttgtaaaataaatttggacgaatcccttcctctttagttttccaaaagagtttgagaaagatttgtgttaggtcttctttaaatgtttgtagaattctcccatgaagccatctggtcttgagctttcctttgatgtgagaacttttaaatactgatgcaatctccttaactctttccttagctgttactggtcttttcagatttccaattttcattattcagttttggtagattatgtatttctaagaattcatccatttctgttaggatgtccaatttcttggtatataattgttcatcgtagtctcttaggatcctttgtatttctgtgttatcagtcataatgtcttctctttgatttctgatttgatttatttgagcctgctctcttcattcttagtctagctaaggatttgtcaattgtgtttagcttttcaaaaaaccaacttttagttttattgactttttttctattgtttctctagtctctatttcatttatttctgctctgatctttgttattttcttctttctgctaactttgggcttaattcattcttctttttgtagtttcctgaggtataatgttaggtatttcatttgagatatttcttcttttttgatgtaggaatttattgatataaacttccctcttagcactgcttttgctacccccagaagtttttctatgttgtgttttcatttctgtttgtctcaagacttttaaaaaatttcctcttgaatttcttcttttgacccaataattgtttaggagcatattgtttagtttccacatatttcttaattttatatgatttctcatgtaattgatttctaattttatattgtggtcagaaaagatacacgatgggttttcttaaatttgttgagacttgtctgtggcctaacatatgatctatcctggagaatgttacatgtgtacttgagaagaatctgtattttcctactgttcagggcacaatgttctgtatatgtctgttaggtccatttggtctaaaatgtcattcaagtccaatgttttcttatgaatttttctgtctattgcttaaagtggaatattgaaattgcctgctattattatgttataggctatgtttcccttcagatcccttaatgtttgctttatatatttaggtgctctgatttgggatgcttatatacttgttatgtcctcttgatgaaataacctttatcaatatataatgatgttctttgtcactttgaacagatttgacctaaagattattttgtctgaagtaagtgtaactaccctgctctctttttgttctcatgtacatggagtatcttttttcatccctttactttcagtctatgcatgtcctttaaggtgaaatgagccacttgtaggcagcacatatttgggtcttgttttttgttgttgtcgttaatccactcaaccactctatgccttttgattggagagtttaatctatttacattcaaaataatgatggatgggtaaggacttactagtgtcattttgttcattgtttcctggttgtcttacagattctttgttcctttcttcctctattgctgtcttcctttgtgttttgatggttttgtgtagtagtatactttgggtcttttgtttttatcattcatgtatgtattataagtttgtgctttgtggatactccgaggcttacataaaacattttataagctgataataacttaaatttgattgtgtgcatatactcaacactttgactctccctcctcccacattttatgtttctaacatcacaacttacttttttttttaattatactttaagttctagggtacatgtgcacaacttgcaggtttgttacatatctatacatgtgccgtgttggtatgctccacccattaacttgtcatttacattaggtatatctcccaatgctatccctcccccgtcccctcaccccacgacaggccccggtgtgtgatgttccccttcctgcgtccaggtgttctcattgttcaattcccacctatgagtgagaacatgcggtgtttggttttctgtccttgtgatagtttgctgagaaagatgatttccagcttcatccatgtccctacaaaggatgtgaactcatccttttttatggttgcatagtattccatggtgtatatgtgccacattttcttaatccagtctatcattgatggacatttggattggttccaggtctttgctattgtgaatagtgcagcaataaacatacctgtgcatgtatctttacagcagcaggatttataatcctttgggtatatacccagtaatgggatagctgggtcaaatggtatttctagttctagatccctgaggaatcgccacactgacttccacaatggttgaactagtttacagtctcactaacagtgtaaagtgttcctatttctccacatcctctccagcacctgttgtttcctgactttttaatgattgccattctaactggtgtgagatggtatctcattgtggttttgatttgcgtttctctgatggccagtgatgatgagcattttttcatgtgtcttttggctgcataaatgtcttcttttgagaagtgtctgttcatatccttcgcccactttttgatggggttgtttgttttttcttgtaagtttgtttgagttctttgtagattctggatattagccctttgtcagatgagtagattgcaaaaattttctcccattctgtaggctgcctgttcactctgatggtagtttcttttgctgtgcagaagctctttagtttcattagatcccatttgtccgttttggcttttgttgccattgcttttggtgttttagacatgaagtccttgcccatgcctacgtcctgaatggtattgcctaggttttcttctagggtttttatggttttaggtctaacattaagtcttcaatccatcttgaattaatttttgtatatggtataaggaagggatccagtttcagctctctacatatggctagccagttttcccagcaccatttattaaatagggaatcctttccccatttcttgtttttgtcaggtttgtcaaagatcagatggttgtagatgtgtggtattatttctgagagctctgttctgttccattggtgtatatctctgttttggtaccagtaccatgctgttttggttaccgtagccttgtagtatagtttgaagtcaggtagcgtgatgcctccagctttgttcttttggctcaggattgtcttggcaatgtgggctcttttttggttccatatgaactttaaagtagttttttccaattctgtgaagaaagtcattggtagcttgatggggatggcattgaatctataaatttccttgggcagtatggccattttcacgatattgattcttcctatccatgagcatggaatgttcttccatttgtttgtgtcctcttttatttccttgagcagtggtttgtagttctccttgaagaggtccttcacatcccttgtaagttgtatttgtaggtattttattctctttgaagcaattgtgaatgagagttcactcatgatttggctctctgtttgtctgttattggtgtataagaatgcttgtgatttttgcacattgattttatatcctgagactttgctgaagttgcttatcagcttaaggagattttgggctgagacgatggggttttctaaatatacaatcatgtcgtctgcaaacagggacaatttgacttcctcttttcctaattgaataccctttatttctttttcctgcctgatcgccctggccagaacttccaacactatgttgaataggagtggtgagagagggcatccctgtcttgtgccagttttcaaagggaatgcttccagttttgcccattcagtatgatattggctgtgggtttgtcataaatagctcttactattttgagatacgtcccatcaatacctaatttatcgagagtttttagcatgaagggctgttgaatttggtcaagggccttttctgcatctattgagataaccatgtggtttttgtcgttggttctgtttatatgctggattacatttattgatttgcgtatgttgaaccagccttgcatcccagggatgaagcccacttgatcatggtggataagctttttgatgtgctgctggattcggtttgccagtattttattgaggatttttgcatcgatgttcatcagggatatttgtctaaaattctctttttttgttgtgtctctgccaggctttggtatcaggatgatgctggcctcataaaatgagttagggaggattccctctttttctattgattggaatagttttagaaggaatgataccagttcctctttgcacctctggtagaattcggctgtgaatccgtctggtcctggactttttttggtttgtaggctattaattattgcctcaatttcagagcctgttattggtctattcagggattcaacttcttcctggtttagtcttgggaaggtgtatgtgtgcaggaatttatccatttcttctagattttctagtttatttgcgtagaggtgtttatagtattctctgatggtagtttgtatttctgtggtgtcggtggtgatatcccctttatcattttttattgcatctatttgattcttctctcttttcttctttattagtcttactagcggtctatcaattctgttgatcttttcaaaaaactggctcctggattcattgatttttttgaagggttttttgtgtctggatcttgtaggtatgcttcattgtttcttattatttttttcttttgtcttctctggctgtgtattttcaaataggctgtctgcctacaagatccagaaaatagcctcaaaagggtcaatctaagagttattggccttaaacaggaggtagagaaagagatagggatagaaagttgatacaaagggacaatatcagagaacttcagaaacagagaaagataccaacattcaagtacgacaaagttatagaacaccaagcagaattatctcagagactacctcaaggcatgcaataatcaaactcccacaggtcaaggataaagaaagaatcctaaaagcagcaagagaaaggaaacaaataacatgcagtggagcttcaatacatctggcagcagatttttcggtggaaatcttaggccccgggcatatccagagatgctgtctgagggccagtcattggagtcaaaaaccttagcagtttacctcatgttctattctattgtggctaagctagcactcacaccacaatataaagtgctccctgctcttccttgcccttttaaaaggcagaggatcctctccctgtggccctcaccaccatgagggttctgcttggcctccactggtgttcacttaaagcccaagggctcttccatcagcttgtggtgaatgctgagagaactgggacccatattttagggccttgggctcccctctggcccaaggcaggaccaaaaatgctgtccaagaacctaggccaggactcagaaatcccagaagcctgcctgcttctctgcctttctgtggctgagctggtacctaaggggcaagacaaagtcccctttacttttctgtctacttttctcaaacagaaggggtctttcaccataaccaccacagctgggaatttgctgggtgacctatgaagccagcacatctcagaggccaagtcccacagtgtactccctgggtattgcaactggttattcaacgttcaaggcctctttagttagtagctgatgaatcctgataggactgagtccttccctttaaggtagcagattcccttttggcccagggtgtgtctagaaatgctatccaggaactagggcctggaatgggggcctcatgactctgcccatgccccatcctactgtggctgagctggtatccaagatgcaagacaaagtcttctttacttttcgctctcttctccttaacgagaagtaaggagtcacttctgttgctgcaagcttcactgctgggagtaggggaggtatggtgcaaccactcccttagccatgccagctggtgtctccctaggtcatgtgggagaccctaatccactggcttcaatatatagagggacgtttctaaattatttatctgtaatttgattaagaagatagacacaggcaataggatatgccaacagattctctctaacctatagttattttaagaaagttagggaaagagaggtcattgattagttttggcttactgaattatttgaccctcccatatcttttaatttatggattttatataaggcacagatattctactagtaaacatgacattaaagatgttttatacaaatgaatgtggttgatacaaaggcattaaataagaaacaaaggaaattcagaggacatttgttcgcctggaatagagatcattagcataagcataagaggaaaataaggaaggaaatgggaaagtcttgagtccattttcaaattatgaaaacttgaaatgcaacaaacaaatagtggttacttaagaagaaagactgaagatgctgggcaaaggttaactttagaaatggcatttttatatcattataaagagaaagtggggataatggaaataatctacatgtacaactcatttgacagacatttattgaaggtattccaaatgccaaacactagtttgtgcactaaggatgtttttaatttttactttttactttatttttattttctagcttcttccgctttgccagagaaggatttttttaaatggataaaatactaacttaggctagcttctttcagaaacagacctttaaacaatgattaatggtgaaagtggtttggttgtaatgtgatcccaggaagtaccagtaggagagtgggacaatgagataataaatgaaagaagccaataattaagccagttatggaactagttattgctttgggccactggggtttgatcctgatgaaggagctctgggagatagtaaacaaacaaacaaacaaaaaacatgcctcaaagttgtcaaccacaagggggtaaaggcaaggaaccagggctaactattccaactcttatccatcattggctaaatgcttcctggtacataaactttccagcacttctggccagcgcacctagcaagctgaggaaaatctctcaggtttgcagtagggcaaatgcttgtactaggacactgctggcatatacttgaaggatgagtgccaacggcagatagatgggccctgacagcatcttctacagattctgtccttgcctttgaggcaaggacactgtctagagtcagagacagaaatgtaaaatgtaaaaatgtaaatcatagtagcacacagtacaagttttaaaatcttaacaaagtgttatgggagaaccacggtgagagaaaatgactgcacatatgagagcaggggaagtctttatatgtgatgatgacatttgagtgggtgttccgttatcaaagatctacttaaaagggaaaaagagtagaattattttaaaccatggatgtaaccaggcgtggccaccctatatgtgaatgtcctgggataattttgtccccagatgtctctctttttgagtgtcattttcatttatgtattcataatataaagaaattgaatagaaagaggtaaacattggtggcaaaaatcccttcctacccataaggctcacagaataatgttgtctaaatgccataacatttttggtaagttttggttctatgggctttggaaattttttatgtaggaactcctccaaggtgatataagcattcagtgtatttatctagataccctagttaaagctactttaagcaggatcaaagtcctcttttaaacttttgtatttgaaagctattcccatgtacaattcccatgattcttgtacaattcctaggagacctttgtttacatcaaaagagtttgtctctctctataagttagaacttgtacattgtagtaatggaaaatccatttcaaagtagcttagacttactcagacaaaatgtattgatcagtgtcattaaacagttgaaagatagacgaggcttgattcaggaattaaatagcatgaccagattctagttttccttctccattgcatggctctgctccccagtatttgttccgtttaattcctcttaattgttctaagatggatatcaggatactgcagaactacgtgctttctcatccatcttaaacaagaagcaatgggttttctcttttagaatcacgaacaacaacaacaacaacaaaaatcctagagttgtttcattggttctgattgaccttacttggaaccataagtccatctttgaattaaccactaaagccagggagatgagttaaaactaagtacacaccatccacagagcaaagagaggtctattgtgggaaaactgcacaaatggaaaaataacaggggaaacacaggagaaggaggtagttagttaatgttcaatacacgcaccttctcagggacttttcttccatctggcatcatctttgtcttttgaccattttccccaatcaatacctatattcatactcaagttttccatatttgggaaaaaacttctcttgacaccaaactcccctctgacttccttcttataatgatctatggttggatagtctacaatttactgtccttactttttcataggtattttttaatctcctacagtaagatttctaccactgcactgaaatcattttgtgtatggtcttcagggaattccatgtggccaaagccaatggatacttttggcatgggctttggaggtctaacttcttgaatccaagtgtcggctctaacaatcactatctatgtgaccttagaccagttatttaacgctgtctttatttcctcatttgttaaatgaggataattgcagcaatagaaaaagaacgtaaacaattatacttataggattgtatgatgattaagtgattaatgcaaggaaagaacaacacagagcttcagacagtgtagatattcaaataaatgttagttatgatttttattatgtcttgtgacatctatgagatttgaaagtgttaatcactcttgtgtttttgaaaatctttcttttccatgttctataaaagtacactttcttgatattcctcctccttctctagtctttcattcatcttatttgctctttgtgttttatttattctttttacgttgtattttccaggagtccattcccagcccggtgttgggctcagtctatgtgccatataaatgagaatgcacttgcatttgaggctttgctttttatttctctgtagtgacggccaatcccagatttctgtctctcccaaaatacacagctatgctatagatccttcagtcctcctgactaaaatgttagttttatgtgtgtgttcctcacaacctcccagtgaataggtccaaaactgaactcattatcttctccatgctcactctgcattctttggataggcagtgaatagcaccactatctaacaggcacctaaaccagaagccaggtaatctgtcttaaacccttttgttttccaagttcttatcataatggctggtgtctaacagatggtaaataaaatagagactagctggctacatggatggatgtgtggggatgcacagagggatagatggattattgagtgagtctctagcctataaatatttttaattaactaataaattatgataatgtacagttgaaggtcaagggtgaaaaagcataccctcagtgggatgcacaccccaaggagccattttaacttgctacataacacacatatgaccacttttttgctgaaagccttctattattgagcaagcattcaaatcccatgtttgcctgaaataatggttcaggttataaaagtttccttctttttccaggattaaaattatcttcctacataataggaagaactgctttatcttttcctaatatctagagatggccttttaaaaatatagactgttttccctattgaaatgaactgtaggatgtacaaaatatttactggcatgaatcaaaagagcttgctatgtttatgtgaaaaccactaggcattctaaaaaatattgctagcatagtaaaatgttagtaattaagactaacgaaagcgaaggcaaattggaatcagagactatttttaaggaatgtcaactgtattattttcaaatacacatggtacataacagtaggatatgagaaaaagtcccaagtatgtgtactaaagtagcctgctatgataagttgaaaaagggtttgtaattggaatatccacagaatatttcagaacacttaaagacattttcatttacactttatacagctttcttataagagcatttacaccatttattttataaaccaaagattaattagaagactaaacaattacaaggcctcaactacgaaagctgttccactacctagtggaacaacaacaatgagacacacaaaacaatggcgttcaaagattagagagagacttacggttaaacagaggttgacatgttaactgaagttgcaatataatatgtcgactagttttgcaatacatagcaaacacccaaacagaaataaacctgataaaaaaacagtagtctataatgtgtgccacttactgagttttaattattctggggactatatttttgatttcatgttacaatcactagttttgtggggtctttctagtcctgatgcttatttacaaaatatctgaagtatttctttctatgtatttatttttgagatggagttttgctctgtcacccaggctggagtgcagcggcatgatctcggctcactgcaacctctgcctcccgggttcaagtgattctcctgcctcagcctcctgagtagctgggattacaggcgtgtgctaatttttgtatttttagtagagactgggtttcagcatgtcggtcaggctggtctcgaactcctgacctcatgatccacccgctttggcctcccagagacctgggattacaggcgtgagccaccgcacctggccatctcaagtatttctttaacttataacttcacataactttgtggaggcaacagggttaattaaaaaggactttacttacataacaaaataagaagcatagttttatattcctgtgccatatacattttgtttgtccatctgtagccattctttgaccttctctcccttgctctttattctgggaggctgacctctgtcatcattgggctcccatgccctttggcttccagttggtttaggcacccaagagccctagaaggaaattgaagacaggaggtaaagtgaggtcaagatatttattctcctaattccctccctttgaggttgccacaggctgactatgtcctttgacaaaaggttattgctcttctcagggtggtttctcattccaattctctgcttttggccacttttccctcccctcatcccttgggcctagatgtagtaacagctctactgttgcaaggttcttgtattatctgtgatggtttcttataccctgcttatcttgtgatttgttgctttgtagataaacctctcagattatctaggcaagatcatagaagaacacgtatgtccagctaagatattccagaagacagtagggaaacattgaagggttttataagagggagtgcagtgatcagatttatgttagttttaatctttaattggggtagaatttacattctaaaacagagatttgggtctgggaggatgatatagagcctcttatggatgtgagggcaaaaaatgatagaggtttgcagtgccaatagaaagaggaaagaagttatatatgagagaaatttgtaactaattatatgaggtgttgggtgacgcttaggaaagaatctagaatgtctatcaggtttcatgcttaagggataaagtagatggcagttttattacttgttttctgtattatttttatttcataaaaccagcttagagaagttgcatagaaaaaataatgtagtcctgtttattttaatatttgaaaagaacatatttcagagtagaatctatatagtacctccctcttggacttccaatgataccagtgatagcctcaatataagccagtcttacaaaatgcacccagcgtgaattcttaggtattgttaaaagaagttggccaggcgcggtggctcacgcctgtaatcccagcactttgggaggccgaggcaggtggatcacctgaggtcaggagtttgagaccagcccggccaacatggtgaaaccctgtctctattaaaaatacaaaaaaaaaaaattagctgggcatgatggcacgtgcctgtagttcctgctactcgggaggctgagacaggaggatagcttgaacccgggaggcggaggttgcagtgagcggagattgcaccattgcactccagcctgggttacaagagcaaaactccatcaaaaaaaaaaaagaaagaaaaagaagaagtttctaatacacttatcttcccttgggttcactcagaagacccttggaaaaggttttaagagcaagtgatttatttggggggtaaattaatcagtagaagagtggaaaaatgagacaggtgaggcaaggcagccagtaaagagtggtgcattatcaagccagctgctgttgtgggtcactggagctttatcccttgggaaactctggaacccttgtaaaatacatgcctcagagttatttcccctagcatcaagggagctagtgtaacaatatcccaattcctacaattagtcattatatacaggctgcctctgggagctggaggggaggcatcagttgcctggtatgtctagcctgtcacatggatggcaaagcaaactcctgtggcaacagaaagccttcaggcaatgaaatgctggcactgggaaatcaggctgatgggtgctgaagtggcaaggatgaggggatatggatattctgctgtagtgcttttctaacagatgattcatatttggttctagggatcaagaattgagttaaaattttatatatatgttgatgttctatgtcaccttcaggaaaataatttaacagaaactaatatttgccatcaaaaaagcaaagaatcctgttgttcatcatcctagccataacacaatgaataattttttaaataagcaacataaatgtgagataacgtttggaagttacatttaaaatgtctcctccagactagcatttactactatatatttatttttccttttattctagttgaaagaattcagaatcagtgggatgaagtacaagaacaccttcagaaccggaggcaacagttgaatgaaatgttaaaggattcaacacaatggctggaagctaaggaagaagctgagcaggtcttaggacaggccagagccaagcttgagtcatggaaggagggtccctatacagtagatgcaatccaaaagaaaatcacagaaaccaaggttagtatcaaagatacctttttaaaataaaatactggttacatttgataaaattataccatagattgtaatttaatgatgtttaatgtaaagttattaacagaaaatcacgttaaagctgaaatgaacagtagactttgtatatttattttcttagagacagagtctcactgtcacccaggctaaagtgcagtggcacaatcatagctcactgagccttgaactctggggctcaagcagtcctcctgcctcagcctccctagtagctgggactactagccaggcgtgtaccaccacgcctggctaattttttaaaaatttttgttttctgtagagatgggttcttgaactcttggcctcaagcaattctccttccttggcctcccaaagcactaggattacaggcatgagttagcatgcctagccagtagacttttgagtcaaggtagagaatagaggaaaattgacagctaatgtcaatgttaaagttaattttgtttagtaatctggatatagttggctggttttctgttgcaccatctttaagatcacttcaaaattggtatacgtatttatgtagttgcatgaagtcaaccattcgggcttaattccttcctagaaaaagtaacaggtctactctttcatatcttatttggaggccctggatcaagaaatgggggtgagtgggtatcaggattggggaggaataaggagtactctcactttctccccccattctcttacctccagcccagctcattcttctcttctttctctttcctctgaaatttcctcaaatatctgtctgcttagtagtctataattcctcaggataaaagaaaaaggaaaaggaagaaaattgcttaataactatgttttatcaagcagcatgcatagtgctttgcatgcgtttaatcccttcaaacttagtatttactagtcagtttgaaaagcccttaaatgttaaacaatggttaagctttagggtattttgagcagggaagtaacatggtaggaggttgatcagattgggcacttgatcaaaaccctctatagatattttatctgacagaaaaggccttttgctaaaccagtatctgattctcaaattggttatgtcatctaagaaggaaaccgtatcattttcttggatgaaatggcttccatttccaaattagtcaggttaggctatgctaagctatagtaagaaatgaactctgaaatctcaatagcttaacacaataaagactgctttcttggttatatcatagtccagtagaggttgacaagccattcttaggagctgtcccccaacatggtcacttggaaacccagacttttccaattttgtgacacttgtcattttcaacacactgccaaaagccactgcagaaaaggaagacagaatgtggtcagtcaatccatggtgttttatggccaggcctggaaattatgtatatcacttccaccacatcccatcacacagaacttgttctcgattgaatttcaggaagagttaatggaattagtgagcttttagccaatctctgtcatagccattttatcgaagggacctgagctgctatgaggacaaggttttagtttatatgatgaggatgttagaaagccacatagaattttacagtcttatcattagctctgttggagtcaaaatctaggtgaataaaaattctttcaagagacacatgttaccactaatggttttttcaatggatgagcatagatgaattaggaatctccaatggtcattttcctaattcctggtctgactatgtaatatatagaatcatgtggttattcttgaaagctctagtcatattcgtgaggtagtcagcatgttatgctacttctttttcttctctataagtttcggatactatgaatctattggatcacaaaccaaagtagttaactggtaagaaggtataagcagaaaatacgaagtttggactggatccttgagttagatgagaagaaggagagatgagaggcatacagtgatagatttgactagggcaagaggactctggtagttagcaaatgagaaataaatttaacctaagaaaatcctaaagtgatggtaagaatggttagggtttaattgctcttagaagagcaagtagctttaaataagagacaaaaatatctgcagaaggaaatatgaaagtagaaaacaaaacaattgcattgtcaaaacatgtaagatgttttaatcacctaaaataaaaccagaattgtattataattgctatcctttgtcaaacttttgaaattaaaaaaaaaaaacgctttggaatggtctaaaactacatcataaaaatggctcagccactatctatagagattgacattttttgtttgtgctctgtgtttaggaatttaatgatgtgtattgctgcagattcaatgtaagttcccgatacagataaagatggccaaagctgtaattttttcatccatttcttgaatgatgtatgctaaaattaaagtaatcctaatgttaataataacttttagtgaatgcttgctgtgtgtcaaaaagtatgctagtcactttatatatattggtttatttcatcctttcaaaaacactctttgaaaagtactcttattattcttagtttgcagagaagaaaactgaaggctagagaagttcagaatcttcttttgaaagtagtagagttgtgatgcgaatgcatagcaattactcttgtagatgacctcacaggcttcctcttccaattgtctacgtggctaaaacaaagcaagaaaaccccataagaatctgaaaaagactcatgtaattattaattgacaaataagattatattacattactgataaaccaacaggtagaaaatgaaagcaatgaaatagtatactgcgaaaaaaaatttcatattatattctttgatgaaaaaataaaacaataattgcaaactgcatttcatttttaatgaaacgacaatgtttaattcttctaaaaggtagggagcaaataaaatggttatctggtctttacatcgaatgtgtcatcactactaagtgatattagctggcttattacttaaaattttcttttaggaaaaaagtgtgaaaatagacaggaggagacattaaatggctaaagcaacacccccttgctccgtaagttctttctgagtctgtgtgcctaagattaacaagagagcctgtgagcctcacaaggcaatcacaaagctatgtctacagccttggagagctgtgattacagcagccagcctcctttgcagcacctcagtgatgactacactaactctcactactgagcaacaatgaaatgtttcaaacccaaccaccaacactgttataactcttaaaatttgagccagtcaccatacctgaacgtaaaaagaaaattaccaaaaatgcttgataccaaaaagcaattaatgattcataattgctaatctttattgacagtctcttctagttcttatctacatatattttaattgtctacataatgtaaattaaattttaaattctgatttgtaaacttaatattgcataaatatttatcaatgttgttaaacatcttttaataattattttaacttctttatattatttcattaatttccatctttatgtccttgctggtctgacatttagaaaaaactcctccttttatttagaaaaaaagaatggtgaggccgggcgcggtggctcatacctgtaatcccagcactttgggaggccgaggcaggcagatcacgagatcaggagtttgagaccggcctgaccaacatggtgaaaccctgtctctactaaaaatacaaaaactagcctggcgtggtgctgcatgcctgtagtcccagctacttgggaggctgaggcaggggaatcgcttgaacccgggaggcggaggttgcagtgagccaagatcacgccactgcactccagcctgggtgacagagcaagactctgtctcaaaaatacataaataaggagaataaatggggacaataacaacctattcacagaacagaaataaaaccggagatgtcatgtggaaaaagcttatcttgaaagcgtggtcagagtggaaagaaacagcaacaggagagtcttgatttggtgaaaaaacagaatgcagatggcatagagtatcaacaattaattagcaggccatcaagagacggccataacatattggtaattgttttctttcacccttaattttttctaaaacaaaaacatgaagttagaaagtagttaattttgttagccacatggcttcatggtttaattttatcttctctatgggcctggtacaacaataaagttcttttgagatagaaagacagatgttaggcaaaaacatacaagattttcattctaatcaaaatctttgccaataggctatgacagaatcctatgagagatgatgccatttagaactttcacaagaggcaaaaatagtatgccattggcacctaaaactgccaacagtgatcatcataggatttatttcatttggcggattcttggttgagttcataacctgttccctaggcttttaagattggtccaaacttggcaatggattctttggaaaaattatttcttgatcgttttaaactttcttttccagtgtcaagagagattttcccaggctccgagttttcatttattttttcccctgtcagtttttgaaagagaaatcccctttttgtcggctttgtgattgcttttgtgtcaaattcagcgtaaaagcttttcaaacgtgacagcattagctgttttgtgcttggctgagctaagagtacatgaattcaatagagaagtgaaatcttgtttgagcctggctgatttggctatataatattgaaaactatctgaagcaagaaattcaatacttttcaaattattgaataaacatttctaaggctgcaaaatctctgtgtttttgaaggcattctttaggaaacttgaaacacagacattctataatcacataattaattttaaaagttgaacttattgtatgtagtaactaaggcagctatttgagtgtctcaaattattttactaaaaagggagacatttttcaaatatggaagtagtgccttacatttttagttatctgtggaaggatcgatggcatcatatatctcatccaccataaaaatatgtacggtagtggaaactgaatttttcttttatatattttgtgtattttttggagttgtacaaaattaaatcagcaaattgacccacactagtagtttgaggtttgggtttctggtacaataatgaaaagcattattagaaatcttcttgccaggacctaccatttcttcatgtattttctttattcccttttgttctcccctaaagcttctatgtgattaaagagaaaagatcaataacccaatagtacttttccttctaaagtatgcatgaaactcttaaagttctcaaagcatacaaacagagtgctctctacattgctgatagaacacaggtagtaatgggctagtttccccaggtaactattatattatataaatatttaatgcagagtcaccaagccttgaataactttatgctttgattgtaccatattttctctagtttgcttttcacaatttaacttatcccgtgcttgaaaatataatgtggtaactgtgtaaatctgctcctcaaaaaattttcgaaatcatcttttcttttttcttttctttctttttttcctttttttgagatggagtctcactctgtcacccaggctggagtgcagtggcatgatcttggcttagtgcaacctccacctcctgtgatcaagtgagtctctcagcatcccaagtagatggaactacaggcacattccaccacgcccaactatttctcgtgtttttagtagagacagggtttcactatgttggccaggctggtctcaaactcctgacctcgagtgttccgcccacttcagcctcccaaagtgctgggatacaggcgtgagccaacatgcctggccccacatcgccttttctgaaccctgggaattaaccaaaggctggcaacaatttttgaaatgctgactctcaataaaaatggcaaagtttgaggttttttaagttggcctttcccgtcactttctcccagctccacagtagccttgaaaatcagtagccttgcaaccataatagctgtgaaaactagcagccttttagccaccagagagtgtagaccaggattggaattcttcaaaaaggccaattttattccaagaaccttgccactgtttgacctatcttgcagctccctggaataaacctatatacatggccttgcctttatttggcccgacttagagataactttctaggaaaagccctagctccagggtgttggtccaaaccaattagcagcaattctttaacataacaggttcctaaggctgtgatgctagttgagataaacataggtctggagaaaaacttccagtgaagctctggagaatgaggtgtccataggggattttggcaacctctgacatgttcttgcgggatctagaagcccatgtgcttgtcttaacaaatagagagtatcaataaagagatagaaattgtaaataagaactcagtggaatatctggagttggaaagcacaataactaaaattaaattttcacttgacgtcagattcaagctgcaaaagaaagaatcagcaaacttgaaaataggtaaatgggataatccaatccaaagaaaagaaagaaaaaatattaaggaaatacagaaagcaaaaactgactgaactgaaagaagaattaggtaattcaacaaaaatagttggagacttcaacatctcacttttaataacaggtaaaagaactaggcaaattaacaaggaaatagacacttgaaaaagactataaagactataaacttacaagacctaacagatatctatacagcgtttcatccaataatagcagaatactcattcttttcaactgtacacgaaatattctctagggtaggccatatgctaggtcataaaataagtctcactacattcaaagggattaaaatcatacaatgcagattttatgaccataatggagtacaattaaaaatcagtaacagatgtaaatttgggagttcataaatatgagaaaattatacaacacactcttaaatagccaatgggacaaagaagaaataagaaaatacaaaaatatcttgagataaatggaaataaaaatacaatataccaaaacttatgggaggaggctgaagcagtgcttagagtaaaatgtataactataaatacctatatttaaaaaggaaaaagatctgaaatcagtagcctaagcttctaccttaagaaactagaaaaagaagagaaaagtaaatctacagtaagcagcaggaagtaataacaattagtgtgaaaaaaatcagatagaggaagaaaatataatagaaaaaatcaacaaaaccaaaatctagaaatttagttatttgaaaaggtcaacaaaattgacaaagttttagctgattggttaggaaagaaatggtcaaattactaatattagagaaaaagagggtgcattactaccaacattacagaaataaaaagaagtaaaagaggatattatgaacaactaaacaaatagataacctggatagacctataacaagaaattgaattggtattaaaaacttctcccaatgaaaggctcaggcccagaagtcttcccccgatgaattctaccaaacatataaacaactcttccaaaaaatagaagagaaaggaacacttcctaaccagacaaagatatcacaagaaaacaagctacagagcaatatgccttatgaatatagacttgaaacgcctcaaaaaattatcaaacctaatacaacaacatattaacatgattgctaccataaccaggtaagatttatcacaggaatgtaaggttggtttaacatccaaaatttaatcaatgtattataccatatcaatagaataaaggacaaaaatcgtatggtcatcacaataaatatagaaaattcatgtgacaaagtacaaaaccctttcaagcttgaaaaataaagaacacttaacaaatgaagaatagaaggtattggccaggtgtggtggctcacgcctgtaatcccagcactttgggaggccgaggcagttggatcacgaggtcaggagattgagaccatcctggctaacacggtaaaaccccgtctctgctaaaaatacaaaaaattagctgggcacggtggcgggcgcctgtagtcccagctactcaggaggctgaggcaggagaatggcgcgaaccctggaggcagagtttgcagtgagccgagacagcagcactgcagtccggcctgggcgaaagagcgagactccgtctaaaaaaaaaaaaaaaaagaaggttttgtggattgaatagtgtcccccgctcccaaaagacatactaaaagcctgagcccaggtatctgcaaatgtgaccttatgtagaaatagagtctttgcagatgcagtcaagttaagatggtatttttataagaagaggaaaagaggcatacacagagagaagaatgccacataaaggcactgaccacgggaaaaacaccatgtgatgttacagttagagattaaagtgctacagttgcaagacaagtaaaactaatgattaacggccatcattagaagcaaggaagaggcaaggaaaaattctcccctacaggtttcagcaggagtatgggcctgctggaatcttgattttggatctagcctccagaagtctgagacaatgagttttgtctacccagctacgcaaattgtgacacttaattacagaagcccgaggaaacgaatacagaagaggatttcctcaacctgataaaaggcagctacaaaaattccacagctaatgttattgtgaaacactgaatgctttcccctaagatcaggaaatagtgaaggatgcctggtctcaccacttctattcagtattgtactggaagttcaggccagggaaattaggcaagaaaaataaataaaagacatccagattagaaaggaataagtaaaattatctctacttgcagacaacatgaccttgtaattagaaaattttgaagaatctatgaaaaaatattagaaataataaaataattcagcaaatttgtaggatacaagatcaatatacaaaatgaattattttatacattaaaaatgaataatctaaaagtgaaattaagaaaatatttacaatggcatcaaaaaatgttaaaaacttaggaataaaagagatgcaaggcttgtatactgaagaatacaaagcagtgttgaaagaaattaaagataaaaaaatagaaaaatatcacatgttctcagatcaaaagacttaatattattaagatatcaatatccccccaattgatctacagactctatggaatcattatcaaaatcacaactggcttttttttttttttcagaaattgacaagtggatcctaccatttctattgaaatgcaagggatgtagaatagtcaaaacaaccttgaaaaaagaacaacattggaggagttaactttccaatttcaaaaactactacaaagctacaattattaagtcaatgtggtactagaatgtgaatagacatatagatcaatgaaatagaattgaaagttcaaaagtaaacctttgcatttatggtcaactgatttttgacaagggtaccaagagaattcaatggaaaaagaatagtctttcacaacctggtgctagaataactggatatacacatgaaaaataatgaaatttggccccacctcacaccatacacaaaaattagcttaaatgtatcataaaagaaaacaaataatctgattaaaatgggcaaaacacttaaacatttctcaaaagaagatgtacaaatagctaacgggtttgtgaaaaatgctcaacatcactaatcattggggaaatgcatattacaatcgcagtgagatgtcaccttacacctgttagaatggctgttataaaaagagaagaatgataacaagtgttgatcaaggatatggaaaaaaggtaacacttgtatatcattggtgggaatgtatattagtacaaccattatggagaacagtatggtagctcctcaaaaaactgaaaacagaattaccataggatccagcaatcccacttccgggtatatatccaaaagaatttaaaccagtatgtcaaagagatatcttcactcctgtgtttattgcagcattagtcacaaaagccatgatatggaatcaacctaagtttccatcagtggatgaatggataaagaaaatgtggtacatatacacaatggagtattattcagccttaaataaagaatatccttttgtttatgacagcgtggatgaacctggaggacattatactaaatgaaataagccaggcacagaaagtcaaatactgcgtgatctcacttatgtgtggaatctaaaaaagtcaaactcattgaagtagagagtagaatggtggttaccagaggctgtggatttaggggtggaaaatggggagatgttgatcaaaaggggttaaaaactttagtcaggaggaataagtttttgagactttatgacacaacctggtgaccatagttaataatattatattgtatatttcaaaattgctaaaataacagattttaaatgttcttgctataaaatatgataaatatatgcagtgatagatacgttaaattgctcgatataatcattccacagtgtatacatatatcagaacatacatgtaccccataaatgtatataattatttgtcaaagcaaaataaaattaaaaataaaatgttttaaaacttttgtaaaataaactttataataataatatatttttaatgaatcatagagctaaatatattaataagaactaaaactttaaaactcttctaagaaaatgtaggaatacaatggattatgcagtgttttcttagatatgacaccaaaagcaaaagtaaccgaaaaatacacaatttggactttaacaaaattaaaacttttgtactgcaagcaatattgtaaagaaagggaaaagacaatcctcagaatgggtaaaaatatttgtaaatcatatatttgataagatacttgtatcaagaatatataaaaactcataattcaacaacaaaaaggataaatgacttaattacaagtgaagaaacagtttgaataggcatttctccaaagtagatgtatagatctccataagcacatgaaaagatggttaacatcattgattgtttaaaaaatgcaaatgaaaaccacaaggagatagtactttttacccactaggatggctaatacaaaaaatacagacaataacaagtgttgagaagatgaagaatgcttggaattttcacattactggtggaaatgtaaaatggtgaaacaactttgaaaacagtttggaagttcctggaaatatttttttaatttttaatttttgtgggtacacagtaggtatatatatttatgggatacaggaaatattttgatataggcatacaatgtgtaacagtcacattggggtacctggcctatccctcacctcaagcaattatcttttctgttacaaacgacaatctaataataatcagttatttttaaattcacaataaattttttgactgtagtcatcctcttgtgctatcaaatactagatcttattcattctatcaaactatatttttgtattataaatttcactacccattagccatccccccctttccccctaccactacccttcccagtctcctggaaatattaaacatgaagctaccatatgacaaaaccattctactcccaggtgtatgctgaacagaaataaaaatacatatgtacacagaaaacctttatacagatgttcatagcagcattatttataatagccaaaaagtagaaccaacccaaatgtccatcagctaatgaataaattttaaaatgtcctctacatccaaaaatggaatattatttagcaataaaaagaaatgaaatactgatatgcactgtaacatgagtgaacctcaaaaatatgctaagtgatggaatccagtcacaaaagaccccaaattgtatcaatacattcatataaaacatccagtaaagactgaaggaggaggagaatagacaatagaaagggactgttaattggtatgggtttcattgggggcaaataaaatgttctcaaattagatcataataatggttgcacaaccctgaatacattaagaaccagaaaattatgcactttaagtgggagaattttatggtatgttaaaaagtatatctgcatgtcattgactacagatcttttcttattttttcaagttttatgaacacagttttagaaacatagtctccatttttctctttcatgaagctgcttgccagctatagaaatgaaaaaatagccatgtctgtggaacataactgctacctagatgggagcctccatcacacaatggatagggagctattttcttttatggtcaagataggcaggttctgtcctatagaatatattctgagatgttacctgtagttcagaaaaacagggatattgttgttctaaacatttcctcaacatttatgtggcttcctatttattaataagagaacctgttctttatgtgtcattatactagtttattctagccctggtcctggtccaggactgtctggaggtattagaattgccctactctatgtgaaataaggtcatatctgaataggtatgtcagtcagcataggctaagctacagtaataagcaacctcaaatctagaggcttaatagtctatattttactcatgttacatgttcgttgtagactgatgagagcattctacttagcttagtcactcggggaccatggctgatggtatctccatcttggtacattctttcatgatcatagaggcaaggaacatggttcttgagccttctgcctggaagtgaccagtagacaaaaccagtcacatggccattcctgagttcaatgggaatgccgatgtataatcttctggcgtgaaaaggcactggatatttgagaacaataatgcagtctaccacaatatgctcatggggtctgaaaaggagctgaaaaaacgccattttctggggttctgtcctctggcattgtttctggaatcgtttccacccatccatttctacaccctctcaactgacttttctcagatgcctggggtagctgggtgatttgttaattacagtattgcttaagccttttaataaagtcagcaaattaaagagagagcccagataaagagaatgctttcaaaaatgtcataatgaaattaaggtaacgaagcacttggagacctctcctcccttctttttgtatgaaacttattccaaagcagctggaagagaaatggggcctgaaagtaaagaggggaaaaatatattgtatgccattagtttaattataaaaattcattacatgaagccatgtaagacagaaaataatggaactctaatgggttggccgataacacatttactagtctgctctcagcttgtagtcattgttgaaaggacagaaaagtaacgacgttggtatgtagtcttcaaagctattgtaaagattaatcattttcagtaagccggaaaatgagggccattttcttaaatagtatgccctgtatagagtgttaccttctgaaacagagttgtttggtaatgtcagaggtttaatagatgagtcttgaagttaatggtgagaggctttacttttgaaatggctttcttacagctattttaacatttctattataaatccataaagaggttttataggtcgttttaattcacacaaggagggaagaaattgtgcttctcttttcccaataaggatttatagaacattaattcattcttgggaccaaattgtttagtgattttcaaaaataaactatgtatttttctgctgtctttttttcagaaatgccttactttattatacataataattttccagtcatgctataatcatcaagattgttttatattcttcaaagctcagttaaaataaacccagtccttttccttaaatttctttatatggatgcataacttctttaactgaattgaaatgaaacctgaattgagagtccagaaacctgcatttttatgatgactctttcactgactagctatgtcaccttgaacaagtcacttaacctttcagagcatttatattctcatgtggacaattatggaattgctcaaaaaggaagaagatatcaaaagatgaaagtgaatatgtaggtaggggtcatatattcgagggccttgtaatccaaagagagaggttaggactttgtcttgcaggtaatagcaaaccattgaaaggttttacacagaggagaaatgaggttctatttgcattacaaaaagatcatttacgcagttgtatgtaggtggaagggtggtttgagagtggagggagggagccaataaaaaagattattttagtacctgagcaagagatgatagggacgtaaattaaggtagtgtcaatggaagtagaagatttggataaaagttaaaaaaaaaaaaaaaaaaacttatgatacaactacccagggagtatgttccctgcctcctgctccagttgaggaccaacatatcagattgatccagagacagaattttggagaacattaatatttaaaggacaggcaaaaaaaaaaaaaaaaaagcttgaacactcagagaatacagaggcgaccaaaagagtggaagccaagaaagcagagaacttcgagaagagaatagtcagcagcaccagttgctgcaaataaatcaagtaaataagaacttaaatctttccataggcattggcttttggtaactgaatcagttaactattttcacaaatgtgagtggcatatagcaataagcccatattgcctttcatgaattttcagcttgggtggggtggcacttcttcatgttgcaggttgattggggtcgctctgctccatatgtcactcattctcctcctgagatgagtaggctagtccagagcatgtttgtcttaaggtaatggtgaagtgcaaaagggatagccacactgcataaatacatttcaagcctctgcttgtgttacttctagtaatatcccactgggattaggcaaagcaaggcgcatgaccaagctcaatgtcaagggcatgctgtctttcgtaggaagaatttcagagttacttagcaaagggcatggatacagggagaggtaaagaattggggccagtaattcaatttgccatagtgacttctgtcagaatagttttagtggaacgatgatggcagaagcctgattttcatgaattggagagtggcacgaatgtagtcaagttgagataatgagtgaatatctgccttctaaagagtgtgactgtgaaaggaaagaaaatgatagagtgcagattattgttgttgttgttgtttaaagatgagagagacactcatgtttgaagtctctagagaaggtccccgcagagaggcaagaagttggaacacacaaagagagagggagtatgtggaggaggatcccagaatagatgggtgcccagatggtgaaatcaacttccaatagcagaaaagtcgcctcttcctctgagactagagagaaggatgcaagatgtaaagtctgatatttcatgaaatgtatgtttgatatattaaatttccccctgtggaattgtaggtaggatcatttactgtgagatttctttcagttcgtgttgtcaggaattagtctgtaaaccacattcgatatttcaaacagaggaaattcaatacagaggactggctcctccataggaatgaaggagctgacaaacccaacagaggacagtgaggcaacccagagtttagcaacttcaggaaactattaccacctcaagggctggggaaccgacaagttttaccaaagcccagaaaccagaaccatcgggtgctaattcacccaatgtaaggtctgcacagcaggtaatggaattacagagggagcagccgtccagtgggaaacggagacaaaggagatactgccaagacagagagagaagggggataattatcttgtttcaccctttctcatgctcttctgtctcccactagtgtgtctcatgacttaacctagttagaagccagctagcaagaaatcccaggaaattctgacctcctatgggagttagtacatctcaatactgagtggagtaggaaatgggtagagaatggatctaagagcaaacgacctcttggtggttagctaacagagttaaatttttccatgaatcccttggttcatgaatgtaaatacaggatccaaggaaaaataacaaatccaacatgtagaactttttgttcataagcatattaggatcctgttttacaattttccgagcaattgcttgattttgacacttcaggacaagccggaggcatggtcagagcaagtaaccccatcctagtttacagatgacaaaactgggacttacaaggttaatgacttccttaagatcaaactgcagaacaatggacaagcaaaacttcctgggaagatgtcctttcgttactctgcactgcctttcttgaagttcctttgagacacagtcattaaaaatttaagtaatagttcacccggaacaaacatttattttacttgtaggtgaatatcacaaaacacattttaaaaggaaatttaaccaatattcaaccttaaaattttaatgatagagctatgcacttgcttttatcttccaagttaaagggagaattttagagttgcagcatttctagacaatgtccataaaacagcgagctacttgctttgcattcagaaggggctcacactgtggggaatatagtttgactcattaaaattagtagtagatgtgctagcagtagtaatgatgatgatgatgctgatgctgatgatgattaatatttatttaatccttcgggcacgccaggcacctttgtaaatgttctccctgaattctctaagttaacccacctaatcatatttccacataaatactgttaatattcccatttagcaaaggaggaaactgaggcacagaaaagataattaactctcccatttgccactaagcgatcacgccaggattcaaacccagcaggctcattgtattgctcaggcttttagctactctttctcttcctcctctcttttctaccatgtagggtcaatatcactaaaataagttcttacacataaaagaaatgagagaagacaaacaattaaagtagaaaaaaatactcaaaattcttgaaattaattcaggttgtctcatagtccacaatcactttttctacctaagatactgtgaatatatatcaagcacatagtgcagtagcagcataatgggtttgaatgtgaaacatttctttcctggttggggaaacaatcttttggggatttagcattttatattcttcatagaaaacacacacacatacacacacacacacatacacacacacacatatacaaaggcaatctttttttataagctagtgctcacagtattttaaatttcttcacacaccatgatcaccacacaagcaattccctgtggtgtacaccattgtcaatggaattcagaaagagaaaagggtgtgtgtgaagtctgttgtatttttgaatttacactccttctgaggtctggagttatcccagtagtaaatttcacagcagtaggcaaagctggtcaaggtcatggttcctagtgtgaatgacacttgggtaaaacccaaggtgggcgggcagaatattaccgtaggagaaagggaaaacattctgtgtggggaatgtctttaagaagggagaaaaaaaaaaaaggctacctttgagaacctttgtgtttatataagggcctgagccccctcaatgtcagtcaaggtcagtgggagttttactttttaatcctacatcctcacaaaacctgggcagtattcagtgagggttagcactcagtcaagatttccttaggtataacagtcctaactttcgctgtgaatacaattttgcagaaaaatatatggcacgcgtatttctacctttcaagcattaaagtacatcaaaaagttctggtttgacgtcaagcctcactctttactaccttgtttagtaggaaatctgtcatttaactctagcttactatttctttcagagattttggaaaattctaggatatgttataatttataattttaggcatttttatgatctattgattatgtttttagattcattggcaccttctgcattttatgttttttaattttaacagctttattgaagtgtaattgatatacaaaaactgcataaaattatatgggctagaacatgtgcatatacccatgaaaccatccaaatggtataacctcttatatctagacttttcaaacaggaacctatgagtgatgggtggcttccaaggttatttaacttgcttgagtaaaataaatgattttaattatatatttactaaaaattttgtttttattttgtattcctgagcttttacatatatgctctgatactggtccatcataagtattttattaacaattcagtgttttataaaaggaattcatttgaaaaaaaggtaaccaagttattggtctcagttttgtggatgttcatgctattaattagcaatttaatagatgagagataataagctcttcttttaaaatgcaaatagcaccctctggatactaagggccaattacatgttctttcgtatcttggaatacatttcttttatcactttaggtttggcttaagtgaggaggagaaagaaagaagtggtaattttgtaccctaggatatttctagaaaaggcaagcctttggcagaagttccctcagaagggctttcaaatagtgcgaggatctgaaaagtggagaatagaaactgtaatgcttgataaaaggagtatggaagaaaaggcaggcattccacgcggataaatgttaattgttttgtaatagcagcaactatgctctgtgcctttagacactgtcctctgctttcatagcaaaagtcagtgatattggcattagcttcttgataatagtttggtaatctgggtctatttgctatatgcagtaaatactattacttggtttgattctaggatgttttagttaactgagaaattacattatatatagattgtatatgttcaataggagttcaccaaacacgctgaaattatgctaagaacactgtttgatttttattctgtaaatatcatactaacgcaaaagaacaaatattaaaacaaaaatgatttttctcctcagaagcattattttcaatttcttccatttcgtgttcagctcatgattatgtattcttagagataaacacagtgtagttaaaaattgtgttctgttttttacacaagaaaattgtgctctttttacagtgattactgtgcacatttgctacatattggaccattggaatgatgtattatgttcttttaatgtccctgcattaaacatcgacattgtttctctttttttttttttttttttttttttttttccgagatggagtctcactctgtcgcccaggctggagtgcagtggcgtgatcttggctcactgcaacttccatctcctgggttcaagcaattctctgcctcagcctcccgagtagctgggattacaggagcctaccagcacacccggctaatttttatatttttagtagagacggtgtttcaccatcttggccagactggtcttgaactcctgacctcgtgatccacccgccttggcctccctaagtgctgggattacaggcatgagccaccgcacccggcctgtttctcatttttttactgctttggttaatgaagattttaagtcatatagtatattgatcttcttttgaagattttatcaggataaagtaccaaaagtgagattattgagtcaatgggaataagcatttgtatgtcacttggtatctattgccaaattgtcctaatagataacggtccccagcagtaatacgtgaatgtgctagttttactggtcttttcagctttggattttattttttgttaatttaattggtgtccaattgtaccttttcaatttaatactctattttttattacttgaaagttaacttttttctttttaaataaaatcatcccactctttctcttgtttgaactacctgttcctattcctgtgtccatttatcaatgacttaacccatcctattgaatttgatataactatcttaacaattagtattatcttaatgcttagaagcctcctctctgcacttgcagaaatgtttaatagaaatttcaggttgatatgcttcgagataaaacctaccattaattgacttctttctttgaaatatgtttcaagtgatgagatagcaagtttgaaaacactgaattgccaaagacaaacaacgaagaaaatgtaggtgatttggtttagtaagattcttatattttgactttttttctaattttaaagtaaggtattctaaaagtattttgatccttcaaaaaattcgtgactagaataacagtactattcttttgttgttcaatattttctgtatgcaggtttagttgaacgccagtagatggcactaattacataaacaattcaacaagttaatgaagagggaaagaaatgtatgaggtttttttcgttcaaatgttgttatatgtcacatattcaacaattatatatgagcttatttttgtagtttttttctcttgtgataaaaacaattaagcccactttattgccaattaattgctactaagttgaaatacttgatactggttattgctcaagatgctgcatttgaaaagtttgtcctgaaaggtgggttaccttatactgtcatgattgactaaatcatatggtaggttaaaagcaatctaatatatgtattctgacctgaggattcagaagctgtttacgaagtattttaagacactccaactagagatttcataaaaaaaactgacattcattctctttctcataaaaatctatagcagttggccaaagacctccgccagtggcagacaaatgtagatgtggcaaatgacttggccctgaaacttctccgggattattctgcagatgataccagaaaagtccacatgataacagagaatatcaatgcctcttggagaagcattcataaaaggtatgaattacattatttctaaaactactgttggctgtaataatggggtggtgaaactggatggaccatgaggatttgtttttccaatccagctaaactggagcttgggagggttcaagacgataaataccaactaaactcacggacttggctcagacttctattttaaaaacgaggaacataagatctcatttgcccgctgtcacaaaagtagtgacataaccaagagattaaacaaaaagcaaaatactgatttatagctagaagagccatttatcagtctactttgataactctatccaaaggaatatctttctatctcatcatggcgcacactgccttacctgttatctgataaataagtcactttgggattcatgatagagttatagctgtacatggtctcatcctagtatctcactccacacacccaatgggaaaatttgtggagggcaatatgactcgtcacttcatttcccattatatatgaatggaaattaacagcgcttatagacagtatctcctcaaactaagccttgtatccttattatacctctcttgatctctagtgcttttttcactagcatttattccaatcataaataaaaatataaattatgtaactaattgttaaatatttgtcctttaaattaatctaaatgccatgagggcagagattttgtctttctcatttgatacatccccaggtcctgaaccacgtgatataatagggagctagtaaatgttttttgaatgatgactccctttgcagaatgtacaattaccttgtgcaagctgaaaaaatagcacctgtacaatatgaggaagaccacggtgaaaaataattgagttccaaaatatgacatcaattactgaaaaaataagctcggtgatttttaacaagaagtaaaagtcaccactggggccaaaacagattttgaactaagagtaggaagtcttaggagaaatgagataatgatatatggaaattaagcggccaactaaattttgaaactgagctagacattagagagtaaaaactcctgtgaagctgaatttaagctggtcaccctggggaatagagcaactctaatcctgaattccagacagtaggtgtatagatggaaaagaccatggaaaagaagattcaacctaaagttgggaagttttaattggagccctatgaaaaagaccctggtggagaaagggcaaacttgaatatggagctgatatttggaaaaattctcatagtaactactttttctcaatggcaaggcttggactttcttctcaaaatacagatcttatatgtgttcaattaaacagggacagattaggttcaggaagaattattcacatggaatcaattggtatcagagagtcaaccattagatcttagtgggaaatatctgcttctcaaagagaagtcttttggggaaagcaaattaaagtcagagattaatttgatgagtttaggtaatataaactaaggggccaagaaaaaagcttgctcatggtatgaaactagagcttgaggacactgatctagtctatctatactactctttctgacagacccctctcttcattctcatgctccttgatggcccaagccactctctcagttttttaaaaaattgttttatcaaggtctctggattcttcatgggaatgacttccagtttatattttttggcttggttccaaaaagctatcagctaaggaatgcatatacttacttcccctatgggtaaagtaaatgagaattttagaagccaactcacatttttagcctgtacagaatctgcaattcaccaagctacttctgactcatgtctataaagttcttccctgttcttttctcacttcacatgtactctttgcaagaattcatccacttgtgtagtttcagtctgttgatgactacccatctataattccagctgagaatgatcttttgagttttagacatgtagatcctgctgctttctttcgatgttaatgtcccacaggaacttcacattgaagaggtccaaagctaaactcatctttgccttcttccaatctctttctccaaatgcaacctacttctgttgtccttgtcttagtccttttcgtgcttccgtaacaaaataccacagactgggtaatttataatgaacagggatttgttggctcatagttctggaggctgcgaagtccaagatcaaggggctggaatctggtaagggccttcttgttgtgtcatgattccatgatggaaggtggaagaccaaaagagagaaaaaatggggccaaacttgtccttatatgaaactcactcccacaataatgatgctaatccgttcatgaaggcagagccttcatgtcctaatcacctcttcaaggtcacatttactactgttgcaatggcaattaaattttaccataagtttgggaagggaaaaacattaaaccatagcattctgcccccttttccccaaaattcttgttcttctcaaagacaaaatacattcatttcatccccaaagccccaaaaatcttatttcagcataaactcaaaagtgcaatctaatataaattagatatgggtgagactcaaggcacaattcatcgtgaggcaaattcccttccatctctgagcctgcaaaatcgaatcaagttcatcccctcaccccctacccttcccagcatcaggtaaccaccaatcacagaaagttttactgatagtcctgctctagatcatctttgtctatgttcactttagctatttatcctagtgttccattattggaatactaagcatgtgggaattatttatattctactgttcaaggtcctcaccaaggtctgattgcaaaaattcaaaaaattgcaaccttaggcataaatgggttaagcagtttagggtacatttataataattatttactgtgctacttcaaaaatcttattgcctctatttataaataaaaagtgttgtctctacacagtggcttgttgtaatgcatttacttgtttctgcctgattttttctatttatacattttcttttttatttttatttttattttttcacttttaagttcaggggtacatgtgcaggtttgttacataggtaaacttgtgtcatgggggtctgttgtacagattatttcatcacctaggtattaatcctggtacccgttagttgactttcctgatcctctcgctcctcccaccctccacactctaatagtccctagcatgtgttgttcccctctacgtgtccatgtgttctcatcatttagctcccacttataaatgagaacatggggtatttggttttttgttcctgtattagtttgataaggacaatggcctccagatccatctatgtccctgcaaaggacatgatctcattctttttttatggctacgtagtattccatggtatttgtgttggtctcaaaaactacaactatgacaggatggcattttcacttttgttgttatattaaactcatcttaaaaaggaaagattaataatgtcaatatttgggttatggagaaaaagtatctcatatctttgaaaaagttctgtaactatagctttttaggtaggagggattctgtggaaagttttctgattacatcatttctcacagttcaggttagacaccattttactatgaaacactaatgcattgcctgcactgagactttcagtcacatggagaaacctaggcaaaatttttgtacacttggaagaatatttaaattagtaataaaatctttagttttaaactgttgaatgttaaataagatataaaatgtacttgaaagaaatttgctttgatatcagacactgccatgttgcagtttcaagacataataaaaaagtaaactaatgtttatattttgctgtttaagtttattaatacatcagatgagtcttcaaattctacagtggcttttgatatgatcatttttacttgccattttatatagaataaatataaataggcatttatgcttaaaaggaactaatctatctatggaaaaaagagaaggctgcttctcaactaaattgtacagtttagaaacccagatctgaacatagattattgttgtgacctatgtaggaaaatatgttgttttccttatcgtagtccttacagagtccatgataacatataaagccagaaatgtgagcctctgcaagttcatttctttgtcttcaatctctgtgaatagatatgagtttgtgaataagataatattagatgtgatattacaaattattgtgagaagcctctaaggattagatttcaaggactgccatctggctgatgactttatgatgacactgtcatgagatttcatttccttatttctgttccaggatcactctttaaacaagaaataagcattaactctgaattgtctgcttgtagctgtatgagggcttccacaactgccaactagccaggtacaaactcatcaagcagaggagatggtccttgcatcagagggttaaacatgcctagaagttccttagctaagctcccagatactaaaaaatccctctaggttctaagaaagattcagcatgtacatgtgtgtacatgtatgtgtgtacatatatacatatacgtgtatatgcatatgcatgcatatacatacaaacacattttcttccataacatctcagtattctctgttctttataatactgttttgtattttaatgatcaaaattaatagttgatcatctgaaaacattttgacctgttttctccgtctttgacaaccttgaaggcacttgtaagtcactctttgcttctctattcctaggtcctttctcatcttcattgcaacaagaaaagagaaaacaattgagccctattttgtgtgtagcaaggagctactctagttaaacactagatctcttttacattctccaacatgttgttttagtaattattctactttcctttttttgggatattcaatttcttctttctttttgctcctcccctttagcaggccaacatactcaagtctccctcatcctaagagaacttttttagtatatcattttttttctatccagctgtacttgcttctgcttactatatcatttttaagcagtagttggcattactgtttcctgttctttagctactagttgtactttgacccactccagtctcacttccccagcaccaccactttatgaaaacaaggacttactaagatcatcagtgactttgtaatagctaattagtgtattttaattcgtccatcttcttgactatattttaacattgatcctgttggtcaactctgctaatcaaaactttatcctccttggttcccagaacaatattatcttgaatatctcatttctctaatcatataataattgtgaggtgcttggcacaatgcctagtgcgtagtaagaactcagtaaaatatcatctgccatcgacaccataaaaattaatttacttactcaacaaatacttttgtatgaagtttgtgctaggtaggcccagtaattggtacttggtatagagcaatgaaaagccctaccctcataaagcttatattcttggaagcagaagttggaagacagacattgacaaataaaaattaaatacatgatgtgtcagatggtcatacacacagtgtggaagaacaaagaggaaaacaagtggagagagagagggaggtggaagaggagtgctgccatgaaaatgtggtaatcaaaaaaggtcttactgaaaaggtggcatttaagcaaattctaaaagacctgaggatgtgggccatatgtataattgggggggaaaaagtagtccaggagagtcctaataagttaaaatgccccaaagcaggaatattcttggcatgttgaaggaaccttaaaagggagatcagttaggcagaaaaggatcaagcgagcaggaaggtagttgacaataaatttagaggggtaactggcatctgattatattggccttttaggcctgtggactttagcttttaatctgaatgagatgggagttattggagggttttgaatggaggagtgacatgttttgtcttatctggctcctctgttacaatagactaaacagaagtagtgagaccattaggaaactgttgtcataattcagtcaagagatgactgtggctgggatcagaatgggagaggtgaatgtggtgaggagtggttggattctactatattttgggtacagagcacaacagattttataatggaataaatttaggtgtgagagaaagagtcaagaagactcaagaatttttagcctgagcaacggaaagatggggtcatcatttactgagatggggaaggctccaggagtaacatattttgggaggaagatgtggatatgttacatttgaaatgcctattatacatctaggagatgtgtggagtagatagctggatatatgaatcttaagttatggggagtagctcaagatacaaagttgggagttgtaacaatgatcagtgcaagttctctgtcttcaatgcaattttaaatgttgatgttccattcttaattgtctctcttctttctctctgcacattttgagtagctttgtctgttggcttcagttaacattaagactcctcagtgtcaacttccatcttacactcttctcctgatctccagaactgtactttctgccacctaacctacattaccacctggatatgctacaggctgcaaaatgtgtcaagtagaatgcattatcttgcccctaaaagaaagttaaattttctgtgttttcagtgtagtgtaattgtctaacttaattgtctctaaaactggaaacctaagaattaccttctacctttctcttgatctctctttcccaatctactgacacatgtattaaactggcttccaaattctgtgaattctacttcaaaaattgctctagaaacaattccctctctttatccctattgtcacctcatcctaaagcctcttcatcctttgtagatttctgggagattgtaaccaacttttctctattctgccagttatcaagtctttacgctcatttgacattcacaacagccttggatctgtcttccttgaaatgaatcttcttgcttccctttgattccagtgctttttttttaccctcctgagacttgatgcatgatatttacatgtatgacatgtttccaaaagcattctcaaatttttctgaaagtaaaaacaaatgaaaaagtaaaacattttcctgggaagaaaagcaaatagtgttatacatttttgcttgttcatttgtttgtttatttaggagagggacaagcattagaacttcataagagtcttatatgctgtatctacaaataccgtcccttggcaatataattttagagttccttttctggaactacttaaggactgttttatgatcctcagcagactgttatattattttatagccataccttttatttgctgagtaattgtactcaataattgtttgtaattgaatgaaacaattcatcagatgttgggcactgaatggctttggattatttccaaaaatttaaaggataaagatttgctgccttcaaagctatgtacaaaaatatgatagaatgctagcgggatatttgtttaaaatacaacctttattacattggggcctgctcataatatatatgtggcacattttatttaaaatattaaagttcctggtgggacatgtccccataatcccagcactttgggaggccgaggtgggggtgggaggatcactagaggccaagagtttgagaccagcctgggcaacatagtgagataccatttctacaaaacataaaaaaaaaaaaaaaaaagccaagtttgtagtcccagctacttgggaagctgaggcaagaggatttcttgaacctaggagttcagttcaaggctgcagtgagctatgatcatgccagtgtactccagcctgggtgacgtagtgagactccatctcttaaaattaaattaaatttaaagctacaaatgaccccaaagccaccagttcaaccctctcaattttgaataccctattttaaattcctcttatgcgaaatgtaccttgtagtccattttaaggactgagaggatttggtatgttaaaaaattcaatccattatcaactcctttaggtacacttagcagtatgaaaatgtgtctttcggctcttcaggagagagtcatatgtatagttacaagacaatcccatttttatattgctgagacccaaatcttcccaactgattatgaagcataagaactcttcggaggtttaagtgagctgagattgtgccactgcactacagcctgggcgacagagcaagactttgtctcaaaaaaaaaaaaaaattctctgcattctacagtagggtaatataacatctatgatgtgaaatcttggggctccgggccagagagtgtcatgatccatatggatctaaaaggttcatagtggtaacagcctgcttcattttatgtcatctcctttcaagtaattagaatgtttctagcttgcagggattgcacacaaagggagacatttggaaccatgtcattggtgatttactggtgtggaaaattacctggtgatgtagccaagtagccattttcattctaacccagtcctacagtcctgaactgggctgaaccaacgcaccaaaatatatgcttagaaatgctcctatgtatcagttttcccaggaaaaacaatagtattatcgaaaacttaccattgtttcctaataaaaaattataggataccaacagactgttttttgttcataaatttaatattacagtatcaaatattaaagcaaatgggagaaagtttttcttatttggtttaattgaaccattaatgttagctacaatacccatcatgttacttttcaattatatttatattttcattttatttctatctgtatcattctcagaaagacttctttaaaacattcaataaaaatagaatttaggtagatttatttttagaaagttgagtttttttaataaatgaatataatcatcacttgacttaatttttttctgcacaattctagaaatcttatagttttgggatcctttggctttattcagtatgtaacagggatctgtttcctttctctaaatcattaattcaaatgatttcttatattaaaaatgtttggacatataggtattaatgagttttatgaaatctaatctttccaatttccccctaaaaagggatgtcatttaatcagttctaggttgtgatcaatagcagatttttttttttttttttttttttttttttttttttttttttttttttgcagctccctttcaccccgtagggaaacctgatatcatccttgactaattgcagcaaagagcctggctcaggtcctttgtcttataccgagtgtttatagattcttgagcccagcagaatctgaactcctggctactgctacctacttcccagcccaggccccaaaagccctatgtctgcagccccgtgcaccactgtgtgtttttgtggcatttctgaaacacagagctacttaacttgtttctaagcccagattgtgcctttttgattttctattttggtattttatctaccatttttctgtgtttggatgtttcttctatattttgaaataacttctttcctttagtacaagtgattcttattgtagaaactatcaaaaatttacaaataaagaatcattctcaacattcttagcaattccttctatcatatttttgcaaatatatttttgcctatttttattttacttactccctgtttattaacagttaaaagcattttcagatagttttattttttcatttaaaaaaatcttaccacatttttattaggaaggaaatggacaggtgtttatcttttcaataaaaaacatgggggaaataatttcttgaagtacatagtgacattcttccagccaatgttttatgctgtggtcattccgtctgtcatcagtattcatagaaagagatgaaaattatttaaattaactaggaaatcaattccccattcaaagcagtagttgtgtgtttcaaatatcttctaatagtcagtttcacacttagctttatcaaattcctaattatgatactcattacatcactctgtgtccagtcagtgtgtttatgccacagagcaattaaagcaaatcaggtgaaccaaattcaatcacctttgtagataataacctacgttgcttaaacttatggccgctcatacaattactgatggattgcctttttcttttatattgccagtattttaaatgtcctagtgaagttggggtagctgttgaacttcaactttatcacaacctcttttttaaaatgtgtaaacgaaaaaaccctccatgaaatgaccaaatacagttttcatgctgggacaaattagatgaataataatcataaattcataatgattatttatgattttatgtttttatagtgagatatgttttgttgaaatgtgttatataagtgatacttaagtttcctattaaaatagaaatgctaaaatggcattgttctctttagctgtgagtctagcttttgacctctgcttaaacggaactgttgttccatcccaaatctgcaactctgaggcctatgctcccttcactgctgtctaatggatacctatcaatttggaaggaggtttcaggcagctattcccggtaatctaatctcagctctgtccttttcaatattttcatcagtggcttggatgaagacatagataacattcttatcaaatcaatgccacaaagcagggagaaatagcaaatatagcagacaagagtatcaggagccaaaaagttttcaacaagttggactggtaggctgaatactgaaagatgtaatgtaaatgcaaggtgctacatgtgggttcaaaagaaacatgaaacaaaaaacccatctaacttagactgggctccctggaaatagactaagatagagagttgtgtgcataaggtttgttgaggagtgttcccatgagatacatgtgtaaggttgtaagataggcaagattgcacagacgaagaagtgcagtgaagcctgcagtgcgttgcggcctcatcagattttcaggggagttctggaaattgcatggccctttagagacacgctgaattgaagcaagggatctggacctttgaacccaatactagagagttaatggtcctgggtcaccccatgggaaagagcagactggagtaagattgttacctacagctgaaggcaatttccagggagggaggcagctgtgagctgttagtagtcaatattccaaccagctagggcatgaggtcttggcagagcaacagtgtacccaagaccgcagtgttacccaaagtatggtcctctgactggcagcattggtatcacctatgagctcactagaaatttaaatttgtaggtcctaccccatccaactaaatcagaatctctggggatgggacttggggaacttttaacaagctttcaggcctccaagttatttctatgcatattaaaatttgagaaccactgcctacaccaaccaaaaacattccaaatatggagataacatagagtttttagcaacaataatctccttctgtttcacttctctctttacacacacacacacacacacacacacacaacacacaacacacaatgtgatagaacagtgggaaaggaaagccaaaggggatcttaggccgaataaatttaagcatataacctagtcctaagaacgtatatttcagcttaatagagagaggaatattgttataaagctgtccaaagatggaacaggctgccttgtaaagttgtagaagtattcaggaacaggttggtgataccttggtggttgtatggtataacatcctgatcttcacatactcatcatctagagtgggagttttctttttccaaatggggttttggcagaactagttccactgtatcttaataagtaataactcaagaaagggttctatggatgaaaaaatgattaggtaatatcaagttaaatcaaagcgaacagacttctttcccataggagtaatcagacccttattacagtgcatgcttggtgaatcaacaaagtatgtgtatttatgaaagtatggggggaagggataatctatacagtatgcatcccttctaaaagtttgaccatgaaaacaatttctcaagaatcttatacaacactacagtatctggtccaatactatgcatagaacatgcactcagtaagtgtttgtaagatagatagcatagcatataggccaggccactgaagggaaatcatctcaccgtgagttacctgaatagtattctctagtgccattagctcaattcttcacgtaggcataagcctatacatttgccatgctaaccaagggaatttgtgttacgtgaattttgactctattcagacatttttttctatgactcctccaaggctgttattcttacctcatattctggtagaagtttaaggacttttttctgggaatattgattaattagctagctagctagagacagagagaggatagagattgattctctggcagagcctatttgaatcatattgaatctttttttttcctgagacttcccacaaggaggatggaggagaaattttttagaaatccaccgaagtaatcagggatatcttcagtaaaagaagctatacttaataaagtctctattttagcagatggcaatcaacaatagaggcaatagacaatagagtctattaaaattgctgggatctgctaataacgtttttcttttccctgaaacaaatgccattaaccctccttgacactctgtcttcatcaacattctaatagaatggaagtaactcataattttgaggatttttttcccacacaaaacctataaaccacaccacgctagtgattacttttagcctagttgctaggttgctgctggtaacagtaaaacttatcctgacaggtaggcaattccagaagcccagccaagcacttggtgtgtgtgagtaaacccccatacacttctcatgtagagtaaccctggccaacccataactcttagcaactattcctggtggacggacctggtctactctaagaagaggccaaggttctttaatagtgcagttgcaagaaccagaattgaaagtcaaagttctagcaagattttgcagactccttggcaaaccagtggcttgggactcattcttgacttcaagcccttaattgataatggtaggacagcttgcttgcgctgggttctgctccctgggatatgcactgtttgccaaatgagtagcaggtggacagacatctttacaatttgctgtcccatattctaaatgaacgtgacattctataggtctgagttaacctatgaagtcaccaatttcaatatcaaaatatttatgacagagaaaaggatactgaggcacagagagtctgtgactttcctaagctcaaaacaccagtttgtgttaattctgacacagaaattcttgtatttgctatcagtctcctttttctgtgtgtgtgtgtgtttttacattgcagcatcacctatatgatgttaggttctgtaactttttgagaattttctcacatacagtgatgtgttactttttgatatttcaaatagttctagtaagtcttttctacttttattagcgtattaacatactggctctaagagggcatctcaccacatctttgccattcttcctggaaaggcaagtttctctccatcttcttttttgtattccaaagttttgccaaagtttgcttttgaaaatgggttacctggcagagctttattattctaactttgaaagtacaagtcagaatcagacagtggcagttatatatgcactactgtgattactatataatgaaagtatctatggtgaaaatactgatactgacatatatttgccattttctaattaagtgcttcagtaaaaattaagcactcactctttgccagatactgcaatagatattgagcacattgaacaaaattctccatatacatatatatgagtccacattctatgaaagtataatgtttttctgagaaaaggcataatattctattaatatcagcttttgcttcttccaccatatattgaaagaattctgaatactgttataatttaatgggagaatctagagaattctgtatttgctttcactgcattgatgaactaagatttttaaaaaatgtattcttcatagaactacttttccatatttacctaatattattcttatatcatttgagcacatatttcactaacaaaacaaatgtgcaatgttattagttctaacatcaaaattacactgatactttaatttttatcctattatttttcatgcagattaaaataattatagctacatcacatgttgcaagttttaagagctactttaaaaatatatgcttcaggaaagacatgattagatggggaaatggatgatgttcatattttcaaatgaaaagttttaaaaaagtgcctatcacaaacactaaatttttacataaattatcaactactaatatatctacaagaaataccatttttccctacaaaaactcttaacaataattgttaaacttagtcctggaacctgctaatataatcggacaaatgttgtcaataagaaggtgaaaaagaaagcatatatagtttatcaaactataaaatatagtttatcaaaaccaatttttcctattgacatttattcaggaaggaaaatggatgagtgaaatgaacaatggtctctaagagaggtgggagatagcaataaattcagaccacgtttcctgtcattacagcagggaagtaaaagagctacagtcaactctcgaaagtacttgggggaactaatgattccctgtagacctgtgatgtttttgaaatttaattcaacaatttgatatacaccgcaaagcgaacagatagtcagatcaaaatcggaagaacgattgtctgaatggcatccatttttcctagatgtgctgtcccatcctgtgtcaattaaactttcaggtgatcttcaaacatatttccaagtaaaaggtattgcagttatcctataaactggcctcttccccagcactgcttttgctgtggtcaactttatttctttgggctcacaaaactgatagagcaaaataaggaaaacggaacattggattaaaataaattaattcccattctgtgactcactaaaaaaaaaatgataactatgcttctgtgagcattaataaggaaatgaataaggaaatgaccaaattgttcagtggacaacttgtatgggatttttaagtattgtgtcatcatcaatgttgtcaattagcatatactttgaaatcaactaaagcaaatcagttgactaatcattaagggtctttttaaatgacaacatctaaacagcaaatgttttattttggaaaatcatgacagcacaagaatgagccagatgttttacaacatgatatccataatttaaagtatgtagtagtcactcaaaggatttctatttcagtttccttatgatttggctaagctagaatttggaaaaacactttaaggtaatgtgagaaacagcaaaattcaacatgtggattttttcactaaagcttatttctgattattttttacaaactttactaggtatatgttaacttcatgacacttatagcagtggaccgtagttttaataaaatgtgaatgtatactcttttctcaataatattaaagaatgttgactttcgtgaggatatttttatttttctcaacattaagaactgtcaaagatttaattctacaacagaagacgtgaattttgttttctaaaggagaacagaatctatagaagaagtgttgctcatagtactcagattgttgaccaatcttaaaggagaaaccgtcaattaatttaccgagaagtaataacattatctttttcttcaattatgcacatccacaaagatttggggcaaaatccacttaaatgatattatacataatagatgagtattcatatgttgtaagagtcctggcttctttcctgcaaaatgattaaaacttggatcagaaaccaattaaaaatccattctaattcccaaatgtatgtaactgtactataagaaaaataaatatttcttcttgagggatatccattagttaaggatattcataacatggtgtcttgtaggaaatgttaatctttgggtgaatagggatgtttgggaataacaagactcaaagagatgttgcacttactcacttttctctgagttgttatttctgtcatttccccagtgcgcctgtcctcaactttgcctctctccttattcctttttttttttttttttttttgagacggagtctcgctctcttgcccaggctgtagtgcagtggtgcgatcttggctcactgcaacctctccctcctgggttcaagcaattctctgtctcagcctcccgagtggctgggattacaggcacccaccaccacgccctgctaattttttttgtatttttagtagagacagggtttcaccatcttggccaggctggtcttgaactcctgacctcgtgatccacccaccttggcctcccaaagtgctgggattacaggcgtgagccaccatggccgatccctccttatttctttttatctctacctctgcctcaatggtatttctctattactgttagcatttgctttctgtgagctcttgcacactgtcagcttatatacatgttcctgttcacatgttttcctgtccccagtggttacaacatgtcttctatctcagcccactctagaattgtcttacttttccaggtctcctgctcctcagtatttttcccacttttctagattcatgttttcccatctgcatatttctcttccatgtctgcactgtcatccgcttagaagacagcgcataaggacactgttatctgagcaaatcttcagcacagccaccatgaagcatggttaccttgtcactttccatttttcccatagtgtgtgcaaactgccctgatctgcatagaaaggtatcataattgaggaaacaaaatgcacaaaaatgtccttggttattccacccctcagaaatataggagagaagtaatttacagaattacacagaataacgctatgtcacatggacatggagttatcgggttagcatataattggaaaatatttcctaggaccttgacatttactcactttttgttttcaaattacatgtccctatctattagttgcaaattattttaatgcaccgtttaccaaagaaaggctgtttcttctgaaagctttcatttgacaagtaacttgtaaaaatattcacattgtgtatctgttttccccttctagtccaaactctagttatcttaaactttgcgcagttataaaaaatcataacaaaaaaagcttcctcgttgtcattcttgtcaaaacaggtttaccagacttaggtaaacttaaaatagttagtgtaaaagttaaaaagctgatttgctccttccagcgtgtttgttgcctttttgccacagcaaaattgtaaatgtaaacgtattccctaggagatgagctgggctgcaattttcagctaattgggagaagcagccctgagttgagcactgtcaggctgatttgagtcttaagatatgatgatgattattgtgtcaaatgtaatcaagaacgtgggctctgaactgactcaagggctggctgtttttaattcaggttcgtatatgaagtagacctccggttcaccgatagtcacagctggttgtagaagagagcaatttttaaaatgctatttcattctctatggagctctagggatcagagattggatgcacagggaggggacacatcctcattctctcctgaaaaattctattaattttcagtataataaactttctcttgagattccccagtggctctgtatcggtggttttcaaacttctcagacccaatgccacccctcttttcttttttaaataacaaatactttgtaataccttctttacgattataagccaaaatatgtagacaacataccctacttatacaggcaatagtttaaatgatgccgtaactctattttaaagagaaataagagtcatttataataaaataatatgtgttgtagtatgcagttattcaggcaggatcacactggaacacaagtgaagtttttagatcacgagactatcaatgcagtataaacaaatgcagaatgacaccattgtgttgtatggagactcaaataccatgaggggcattggtcatccatagcgtaattttccaaaatgctgaacaactcttggcaaaattcctaacaccatgaaataaattttttcttggatcgttatggcagttagttgcatggctgaaaaattcaatgtcttaaaatcatgaggaaaatatcttatgtttacgtgtaaaattgagttacgttccaggtttaggtgtttataaacagggtttccacatacatgcatgtccagtgggatattccaaagtgctgtcagacttgggagagttctttgttgtataagaagtctaccatcttcattccctctccacagaatgctattatagtaacactcttcaatcactgtgatagtcaaatgtcctccctcaatttctaggatgcctcttttttttgtggtctgtataatttggttaaatatctttccagacaaatactgatttgtgaattaatgaaatagcagtattttcggagcacctaacctatttctgagtgatacagttgccatttttacaagactaaatgaaattaccatttcagacctgccagattgtctagcccagtcttttacaattctgtgattatcactgcaattataatctattttcaccacttgaatggcatgatctctataaaagggtggtgataacactcatctattctccttcccctcacatagctatatcaatcgccccctaaccagttgttgataaatgcagttgaattttatgtaaaaattataagagatattattgtagctgtccaagacatttaaaatgctaaatgcaacttacgtggaggctataagagaaatatgaacccatttattgaagagattagctaatttagtaaaacaacacagatatacctgcatacagggataaatccctattgtctaaattattgagataaaataatgttttacaatgaaaaacttttagacaagtaggtaagtaaaatgcagcagtctatttgcatttcatctgggcatttgacaaagtctttcgttatactcttgtgaataagttggagaaatactggctagatgcaagataaattggatggcttagaagccacttcatgattttacgcaaaggatgtcgattaatagaccagtgtcaggtggtgatggaagatctctggtgctatgtcacaagcttctgttctcaaccctgacacactggatgtttttgacagaacatgagtagaactacagagaggaggcccatcaaacttatgggtgataaaaagcagggagggcaggagtattttgggtgacagaagccaaatgggtgtctggacaggatgcgttttaaggcacttttggtacttgatgtctgaagaccaggatcaaacttataggcaatctgaacatttgccaaaataacaggttaattttgacagaagttattatttgtatgctgtctatttctttaatacacctagaaagtattgaaataacattttttgcagacactcattttgaaaattcagaaaaaaaattgttaactttcgtggaagagtaacagaaactcagtcattgacagctaaatacaatgtgttgcccagtaaaatagtccaccccttcactttcatggctaatataaaatttgatgaaagatacaaattccaaagattgaatatctgtacatttgcaaagcaaaacacaattttgggcacagaattgctcattctcatttttaaacatcttggttataactgaacaatagttttttataacaaagataatattttcaaattattatgaggttcaactgaaataatttatgtgaaagcaatgtctaaactctaaaattctatataaatataaattattattcaataaattcacatcaagaaaattttaagttttttaagaacaagagcctatggccttgtttttagaagctgtataccttatcggtagtaggtttattgactttaattaaatttattgagtatctattaaattgccaggaactgtggtgtgaatctttgccctcaaataatttacagtaagttgtggttgatgaatggtgatgacgatgatgaatatccagactatagtaagtggtatattcataagtcagaggattcttaaaaccagatgcaccctcagattcattcctttcatgttgtacttctaattgaaaaaaataaatcctaaattatgactgttctttataaattttaattgatcttataaaaggccatcaatacatttcaaagtatctaggtcttttaaatgcaatttttcaccctggtaattaaaagtacgaaagcaagaaactttaaatctttattttgataagttttaattagctcaagctacttgtaatcccacatcttgtcttgtaaatcatatctgagccattaaaataggtttacaattagaagggcaattcttttagaatctacttaaactaagtcacttcgacaaattaattcatcgttcagttggttttattaaaatgtatttatttcactgtaaaatgtctagtaaagcaatgtatgaagtattttattttcatgttagaaattttatgtaaaagatatcccaaaatacatagacattcagatactctctgtatcattaaccaacatttactaacttatcatttagagaaggccaaaattgtatgtactataactttgtataatttcataagaattaaaatattcgattaatgcctgtaatgccttctttctaaatcaaatcctcaagcttacctcgagttcaaagttcagtatttattgtaacacatctcatagatgacggatgaagatggtaagcaaaggaataataatttcttttctcttttcacacatatatacacacataccccataatcctaattcatataataataacagaaaacaaagggcttttgagaatagtgacatattaatatccattatatttacttcacagggagactggcaagtctaccttgagaggtaatgtcttatagtacagtggactagattgtttcaagatttgtcatttattttggcaactcacccagcttccctgaaagttaagttcctcatctataaactgttcatgataattacaacctgcctcattagcctcatcaagctatttaaaatatgaaaggaggtgctatctgtggatcctgtcaaaggagcttgaaaactgcagaacattattttagtgtaaaatactataacaatacatgttgaatataaaatggctttttcttaacttttattttaagttcaggagcacgtgtgcaggtttgttatataggtaaactcatgtcatgggggtttgttgtaccgattattttgttacccaggtattaagcgtagtacacattagatatttttcttgatcctctccctcctcccaccctccccactccagtaggcttccacgtctgttgttcctctctgtgtccatgtgttctcatcatttagctcccactaataagtgagaacatgcagtatttggttttctgttcctgcattagtttgctaaggacaatggcctgcagctccatccatgatctctgaagaatctccacactggttttcacaatgactgaaataacatacactataaccaacagtttataagcaatgctttttctccagaacctgttatttttgactatttagtgatagccattctgactggtatgtgatggtatctccttgtggttttgatttgcatttctccaatgatcagtgatgttgagctttttttcatatgcttgttggtcgcatgtatgttttcttttaaaaagtgtctgttcatgtgctttgctaaaagggccctttcaaatgtgtattattaaccacaagagagtactgagtaagagactaggtaataaaagtcacaaatatttcgatatcataattcagaatttagatcagcggttatgaaattgttcgtatttccaaattccactgacaggactctactataagtttatttcatctgttgatatgtttttagccacttctttcttttaaagtgaatctgttgtgtgtttgccatttgatattagaaaactgaacctgcctgctttgctgtcttctgaatattatgtatcaacaactaacaagctacagttagttgttttgttctgtttttctctaagttattgtggatgaggatatatataactgcacagtcttatcaggtttgtaagagatgatcttaggctcatcttttaaattggtttttatactattttaaacaaatccttttaggagagaagaaaagctgcttagtctatcaacattaggaaatatatctttaaagagtttatcactgcaagtaaccaaagccaacttaaaaattcgcattatacaaatcattgagaatttatttagaacagaaatgtgtccaactataggtcaacaccaattttaagtgtgtaattatctgggaagtagtgttaactgcatttttttctaaagatcccttacagttgtataaatgcccaaaaggatattttgagtctctgtatattaaccaaaccaaatgtaattcattactcccaacattatatttcaacctctccaaatagtaccttttcgtattgtatcagcagaaaaatataaaatgcagatcttaaagagtatcaatctctttaaaaattcaagaaagaaaaaaatatgtgtgtatagagacgtgtatttcatctgctcataacactgtgtacatttctttatcaactaatttttttcagtgatttatgagttgaaatacaaatcaaatgaaacgggtaatgcaaagtaaagtagaaaacacattttctactgctgtctcctaatgcaggtcttttcaggaaagtactaatggttttagggaaagtgtataattatggttgtttccctaatgataaattcgcaaatctctattttaaaaacattcataaggttaaaaaaatgagagatgaaatgtgtctttcaaaattccttacgtgattgataatgcctatactctcttactatctaaagtctaggtgatatgtatattttttttaaaaaataaaatgtctgtatcagtgaaggaagtttacacagatagcttcaaagctgtggtttatctttggaggattaatctatttctcatgccagtgtgttgctactgcacatgttaaaaagtcatcctgtggtgtctggggtgacaaaagatgggaatgagttttctgagaactaatcagcaatactttgggaacatttaggtcatggtttccaattaactctggagagtttgagtaatttagtaccagacctcaagagagaggggatgaaaacctcgttaattcatatgttggtgaacggcaaaccagcaaatttgcattaaaaatggatttttattttaaagcaaagagcagccagatcttttctgcaatagtttgggtaggagaatatctttgtatgtatgtgttcccttatgtgtaggtatttgtatgtttcaacgaccctgcatatggcaataacagaaaattaaatttgtgctctaaaatgaagaccaggattcagtgacataatcttccttgtgcctttctttcttttagtacaatgaatatatcagagaggagtgtattccaatatctgtcttcagagttacaaaaacttcttttctagaatgcaagacttgggctatacccccagctctgccacttaacttgtatacaaccttgggaacatcattacaattctctcagaatcaatctctccagccctaaaatgaaaccagcaaaagcctgtactgtatatctaaaaggttttttatttttatgaaaattagttaggcaaacttttgttaagcatccatcactctattttgagataaagccttgctggatgatctccacctcttttgatggaaagagtaaaacatgtttaagatacatttatcacttgtttggcaaattgagatagaagtttatgaaagcagattgatatatgttacatttgagctactgggaaggactccagatggtttatagccttaattacattgtaactctagttaaatgtttacctatctgtaccctctgttaaacttgaatatgttaaataccaaagtccatgtattattggattttctgtcaccatcatcaggcacagatcctggtacacaataggtacggaatggatgcatggatgaattattgaattagatgttggtaggcatgtggaaataagaatgaggttcagaattaaagataatctgtatcgagtgtaaagccattggcagagaatgaaatatccagctgagtatacatagaaaaagaaggtaggtagaaaaatggaaaatatcttatgaagtgatgatagaataactctgaatatgtttgaaaacatataaagagttatgtggatgttagctttaaaaattatcttccatgctgtacattagatctgccattcttcatgctgtggatgaaaagcaagcatcagaagttaaattaaaatgatgtcatatattcctcgccttacagtttcataacagaggagaaaagagaaacattctctcattgccaccacccttctccagtcatatttctaggtagatgttgcccaaaaacagataaaaccacagagttggttttgctaggaatggactactaatccaggcaatgttgacagcttttgcttctcattagtgcacgttactaatagaattgctagagattaaaaggaatcctttctacaaagtgctgtatatccataggtgacaaaattctagcttcccctcacaagtacaatataaagttatgttttaaaatcaaaatgcaatttactagcaaactagtaggaactgttatggttacaggaaatttgaatttcagattaactctggttctatgagtagcggttgatatggcaagaatcattttgatcttacatccaggtgctactaaggtctctctgacctatatctcaccaaaaaaaggaacaaaataatgatcctttaatctttctcctaaaatatcataggaaatgatagtggctaaattgcaaataaactaggaaggaaagattcagagtattttatgtgattactctataacaatgccaggccatagtgaaagtgttatttagcagaagactgagttctttgaatgttcctaatttatcacattttaaaaataacctgggcaaaataacctttcatatcagattgagcctttttctaaaaatactcaatatgtttctgtaattatacctacacacttacaattccacagtataatgcaccgataaagtatttttcatccatatatctaatagtagaatggtgtgtatacaataattaagctctttaggcttaccccggaaagcaacaagtttcccttcctttttcctttttatgtattatgttggccataagaaattgatgatattcaactcaatgcagtcttagagatttattcagaaataccatggtgtgtgtgtgtggcgggagtagggttctaatgacaggtcagaacttacttatttgatttcttcattgataatcaggtcttaaaaagaaaatgggtatgctgaaaacatgccttctgtgattctttaccttcatgtgcagttgtctctggataaacactttctttggcacgtatagggttgcactaagctttatagctccaacactccgccccttcagtagattcttgcttgtaactgatgataatgcaaacctgtattatctataggtctccttaaagggcaaccaaaagttcagtagcaattcaggcacaattactgcatgtgagaatcctccatcttgttccctttggagaccacatatatttcttaggcaagtatatttttaaaatccttgttcagcatgacaattcaggaggtcaagttctcccagaaagcagattctgagaaagtgattagcatgaaggaattttattggagagtgctctcaggattaacacctgtgagcggaggaaaggaaagggagcaggattgggcagaaggagaagctgggctaccatacagtcacaactacaacacaatcaaccctccgcctctccttcctagccttccccaggaggatctctgaagtctgaaggtagaatagcccttcagaattgtcctgagttgcagcaagggacccaggattttataccccacaactctcccatcaaccaatacgtgcagcccgtctcggggacatagtgggtaactttgggctaggcacctctctttagctgagtccagctctcagacaggaataacagctgaggactgtcagccagtagcactaccagcagctggggtcagaagtatttcagtcctgaaaaggggtccgggcagcccagcttagcatctactatgccagtcgttctcaaatctggttcctggcaactgtgattctcaagctttagcatatattggaaggcttgttaaaacacagcttgccggattttacccacagagtctctgattcagtagagctaggctgaggcctgggaatttgcatttctaataacttctcagacgttgctggtgctgctggtccatggactatgagaacactgtttcatgctgcccttatttacatactgagaatggtacacagtgctcttatgaatagaatgaaaaccttttgaaatcacattattccttactccatcaaattctcagctatttttgtgcaccataaagctggaatagctgattataaaactttgttatgtaaaaaagtacttaaccaatacagtagattctgtttgcaaagcattattacagtttctaatatctggtcattgttacttgtaaaattcagccaaattttctccagggcctgtagtttgataacttggacaaaggaatttaaaaaaaaatctaattcaagacctttggttttttttctgaacatatcttttttttctttatgattcttatttttacattttacttatcatataagccacttaaacccatatggttccggaaaatttaaaactatatgatacatttagagcatgttgaatgcacagatatggaaattaagtattcttgactcattctagactagacctggcacaattaaaatttagggattcaacgtacacacacatagattccgagagaaatgttgaagccgtaaaacccccacacaagcaggaaacaacagtcttacctattattcaagaggcacgtaaaggagctcatttgaggagattttctgctgttattgccatcgaatttttaacgtattttccaaattagaaaatattcagcctgatgttgtcaatatttcagaccacaagggtatcatttaggaaaatggtttcttactgtcctgaaagagttactgttcttccctaagggcctaatttacaaagcagcaaacttgctggtaggatttggctgaaaatcacattgtctcggtagaactctttcatctgatttatgtgcattgcattttgcaaataactcttggaaagttatttactagttactttctctggaagcagagggtaagcggcatttctagtttaaggatagaggagctaagatgcatcaagcgcagctcatcatgaagctgatgctgataaaatgcacaatattacattctctaagtttcactctgccatgggagaatttcatatttttaaattttgtttgaaattggactacattagaaaatatgtcaaatgtctaaccctgcatttatattctggaatgtgacagcttatttctgttccaaattttgcactggagatggagtaagtcttaatgcaaactgcatgaaactgccacttttataggtcacacccagtcaattgtcagcagttacacatggttcaaactgtaaggtgtatgcccaattgtagcattgagattcgtggagttgttgcagtggttctgaatttttcaagcatgatacataaaaagataaatgactcttttgatatttctccttgcattgatagtttgcctgaaaactagataagcagggagccggcagtccacgttagcccttgaactacatgaggtttaatttatttgcccaaccagaaccctacactacctttcagctgtgcagtattaaagtttatttaggagttgataaatagcttagtgcaatgcttccttttttccagtagctacatcctcataaacctattctaccctccaccagttaatgcagacagaagatttttatccagtatgagcactgaaactccactgtggaagactgtgtgctcagcaaaaacctcacccatgatgaataaacagctcttccgggggctttgctgccgctggctcggcaggagttgtttattgcctggtttgcacatcccatgataaagttgctgctgaaataaattgcagttttgcataattattgacaatcacatcttaacaagcaatgtgtatcatattcaagtgttcaattttttaaaatccatttttagcttatgtttaatcccagaaagtgtttgtgtagtaatagaaggcaaataagacatttaaatagagtactaatttcctcattgcagacaaagtttacctgaatctttttccataggactgttactgcctaaggcaattttcctttctaagctattattatatagatatttgctgagggcatatgtgtgtgtatccacaatacatgcattttatatatatatatatatatatatatatgatcaaaaatatgaatacatttttagagtttttgtcatgaaagagtttgtttcatctttttaaaatattacaggaatggggaaatgggatatgggtagaaggaactaatgtttttgagtaactgtaatgtataactgtataacgtggggcactcaacttcacaggaattttttattttaattctcatcacagcaatagatattgcagatgagaaactgagaatcagagagggaacttgccatatcacgtaagtggtaaagaacactgggaattgaactcagatctgcctagtttttaaaactctactctttttcattacacataacatttttattttggaaaatgttctcagttgtatgatcaagtagttaaatatgaaactaacacaataattataactgatgtcatgcaaaatgatagtttgcacaaaatgatagtttctatgaaatgttatttctttacttgttaagtctttcttcctttgccctccaatccccttctttttgtcttttcctctagtcttttccttttgattctaggtttgtattttcttgacttttctccttgcatatcaaatccttgttttctgcctcagagcagcatcaaagacaagcatggtacagggattttagggttttaactataaaggtttgtctcaaatttggcagtatattaaaaataagctttcaaaattgaccaacaaaaactacaaaattgaaaaaaaggtactttgaactttcacatgttcaaatatatgtatatatatttcacatatatatatgaaacctcctctgtggagaggggtttatagaaatctgtaattgtcattcttgcatgccttcccccatacaaacgcctttaagttaaataaaaatgaaagtaaatagactgcacaatattatagttgttgcttaaaggaagagctgtagcaacaactcaccccattgttggtatattacaatttagttcctccatctttctctttttatggagttcactaggtgcaccattctgatatttaataattgcatctgaacatttggtcctttgcagggtgagtgagcgagaggctgctttggaagaaactcatagattactgcaacagttccccctggacctggaaaagtttcttgcctggcttacagaagctgaaacaactgccaatgtcctacaggatgctacccgtaaggaaaggctcctagaagactccaagggagtaaaagagctgatgaaacaatggcaagtaagtcaggcatttccgctttagcactcttgtggatccaattgaacaattctcagcatttgtacttgtaactgacaagccagggacaaaacaaaatagttgcttttatacagcctgatgtatttcggtatttggacaaggaggagagaggcagagggagaaggaaacatcatttataattccacttaacaccctcgtcttagaaaaagtacatgctctgaccaggaaaacatttgcatataaaaccagagcttcggtcaaggagaaactttgctcagagaaataacttagggattggtttattaaattttaaaagttgacatttttgagtgtttatttaatattttacagggaaagcatctgtatgaattgtctgttttatttagcgttgctaactgaatcagtttcccttcattactttcaaatatgttttgaaatgttaatctggcattttgtagctttcttcctaacatgatctgtgaaaataagaatgagatggctgaatttgtcgtagttaatgatcaaacaattttcagacaattgtttttcctagaaacaaaaattatttccataaagttccatatgcataaacagtgaaaacagaacgtggggtagttttgtttaaatgaagtcttggtgagaatcatattctgtagtacaaggaggctcttaaagtttattctcaatacctgatataattttcctgaactattatggagttttgttatgtatagttggtttttctgacttgatataataactttactagtctctcaaatacaatttggatataaatcattataataagatgattgattttttagactaactttattttttgatatttttaaactattatgaaaaactattatgaaactattatgatatttttaaactattatgaaaagtatattctagtttgaataattccagaatcaaatcataataagcagaagttcttctcctctccctcctatcgttctccttctcctgtttttcttttttgatatgatagttgatctactttgctgctctgttgcatagagtacgtaacagtggcaatgtatggctcctgaatttatcgttcttgcttcatcatcctgctttgaccccactttctcctccaaaatgcgtgttgagttagtttgatcatttggaggtaatttgtttggaacagtatcagactttatagatatctcccatggcttgtgatagaatataagggcaatgcaaatgtagagttttttgctcactcttcgatgtatggttagacaatgtaccactgtaatatatttggcttaggctatttcataaataaaattttattataaaatattataaatgctgataaagctactccagaattttaatagatatgtgggtttcccggccagatgcggtggctcatgcctgtaaccccagcactttgggaggccgaggtgggtggatcacctgaagtcaggagttcgagaccagcctggccaacatggcgaaaccccatctctactaaaaatacaaaaattagctgggtatggtgacctgcgcctgtaatcctagctacttgggaggctgaggtgggagaatcgcttgaacccaggaggcagaggttgcagtgagccgaggtggcgccactgcactccagcctgggtgacaaagtgagacttcatctcaaaacaaataaataaataaataaaaatacatgggtttacattttacccatcagctatggtaggtaaataataagctttgattaagtctattttagtctatttttagcagattactttgaaaaataaagaataacccaatgactaaaaaattattttatgtcagggatttaataaaacatatctttaaatctagttgagggcaaaaatacgtctattttctactatacaatttgtatttatatctgctgtattatataatgaaaatttatctctatttctaatctcaagaaactgcaagcttctgaatcattaaagggaagattcaccatgtgtcctaactatatttactatggaagcatggaaaataaatattttatgtttagatttctgatctctctttcaaaagcagttggaaattatgctgagaaaatgtcttagcttatcccatgttactcaagaaaatgtatttattcgtttttgtccagtggcttaaccaaaccacagtttatttgttgctcacataaagtccagtgtcgatcaggctactcttttccatctttgagctaaggcacatattacacataactttcagtgtacccgaggtagaaaaagagagagcttgggaataaggcaggggctttttactgtctcaaccccaaagtgataaactacatttattctcaaaatccagataaaactcccatagagcctctgaaaacctcaacatttgcgtcttaactataataaggttaactaagattccaaaattattttaaaacagagacagtttccctcttccctggcagctaatattgtattttctataaatccacttgcccaaggtttaaactacattttatggattgaaatgacatttatagccaactcctgatttttagttagatggttggataatgatcttttgatgaaagactcggagatgtcatggtaaaacggtgaactactgaaactattgattattgttaatggcacatttcagctgattgaattgagtcaagaaactggtgttgaagagcaacaaatggaaatgccgagcttgaaaataaataaagcagcataccttaagagattacatgcaatttcagtatttcagctaaatggaagtgtttgctttttttcctctatgaatttttattttgaacaaaaggaattttctataatatgtaggtaggagaaaagtgaaatggcatgctttttcacttcatttgaagaagctggtagcattgtattcatagattcatgctgtatagcaatcatagttctcatatattaaaaaaaaaggaaatttgaaatgcctagccaaagcaacagctctgccaacagattttgatatatctgtctaccccaaaagtagtgatgatttacttcatacaaatgctagtgaatgaagagagagggtgaaaaccttcacaaaatgtgtttttctctaagactgtcaatccgtttttctatatatggagactccagctcttgctagactacctatcactttcgtctatcagccacttcgtaagatatttattctctcagcaataatcataattcatagattctttaaacatacatgtaatataaagcatatacattctgaatggaattaacatgattaattcttctctgaaagacattagaatttcctcccgtattataaaaaggtgtaactcactttccttactaaaatcaagaactttaccgtcgtccttgtacttcaggataagggggtgtttcttataaatattgttatttctgatatgctaactggaatttttaagcaaatgtatttttatagaacgccatacaaagcctttaggggtgaaagtttcaggatttttaaattgcagatttatcctttaaataaaaaaactatattcgtaattgaatcggattatttctctatccaaaacattttctgctttgggcctaagaagagttgacaaagctgttcatggttcaaagtactaccataaaaccctgggtaactaactgaaaatggaaagactctgtctttctgaatatttcacaagagtttcacaaatattaagtggttctctaagtacccctgagagatcattgtaatattagcttgtaaagacaatgtgggggtgtgggtatgtggtgacctttatgatgttcataaaggtggtgtaattaacatatttttctcagcaagacaaactaaggagcaataaatatatgagataccttcatctgtgatctgggtcatgtctcaggccatatctttcaaatcactcccttccctaatctcgtgttttacctacgtctcctctcaatccccccattataaaaattgtcttctgatgaataaaacatttccagagagacaagtttcataaagtttgaattgtacatctgagtacacctatgaattaagatatctttgatttctaatatgttattaaaattgggtgtggtggctcacgcctgtaatcccagcactttgggaggcagaggcgggcggatcacgaggtcaagagatcgagaccatcctggccacaaggtgaaacccccgtctctactaaaaatacaaaaattagccgggtgtggtggagtacgcctgtagtcccagctactcaggaggctgaggcaggagaattgcttgaacccaggaggtggaggttgcagtgagccgagatggcgccactgcactccagcctggtgaaagagcagactctgtctcaaaaaaataaattaaaataaaataaaataaaattggagaagtttctcaccaaaattttggcgcacggattaattctgaagaaagaagaaagaatgcaatcttagtagcacaattagtaccttgaataaattggagtatcgtatttcttggactatctgagaatgcagaggcaatttaaggatccctaattctaaggagaagaaacctttagtgtattccttcctgttgctttagtttgaattgagttttatatgtattttttaatctttctattttgattgttgtctaaagagtgtgaaagtgaattttgatatttttattttgcctggcgatgaatgccttctgctctggatatttaaaaattatatacacatatatgtgtgtgtgtgtgtgtgtgtgtgtgtgtatatatatatatatatatatatatatatataaaatttttctgagaacttttattaattcagcgtatctttgctaaacacctgccatgtgtcgtggtgttaggtctggtgatacaaacatgttcagagagatgattttctttcttttttggggggtgggtaagggaaagaaggcttatacaacagaatcttatttctcacagttctggaggctgggattccaagatcagggcctggtgagggcccctcttcctggtttgcagatggcttccttctctctgtgtcctaacatagcaaagagagacagagctctgatgacacttcctcttgttataagggaactaattccatcataagggccccaagaaaggtgcttttcaaaaacagttcagtaaaagtactgggttgtataatcactttaatgagtatcaatccatatttttaagatagaaatgaatgaaattagtaaaatagaatagaaataaggagtccatcacttttaagtaagtttcaatattgttcgtaaaactttggttcggtggtttgtgtgtgtgtgtatttgtgtgtgtgtgtgtgtgtgtctgtcggtgtggaaatactggatcactttgtaacatatattcaaaagcctctgtattttaacattatttctgcctttgagaggttcacattccagaggtgaagacatacatcctaagacaaaattataatagcattatgagaattacagtagagagctggacagggtctagcaaaaacagaagactaggctaaaccttccaaagaggccaggaaactcacctagaacggtggattttaaccttgcttatgcactgggggagattttaaaaatatctctgcccacaatagataccaactgaattgagcatagcatgtcctacccatgaatctattgtccagtgagaacctctgtttagagaaagtcaccttagaagaattgttaggagttatttaggttcatggggttgaaaagagcattcgtgatagaggaaacaccatatccaaaggcttagtcagtgtggtagtgtgagaatctgaaggaacttggctggggtatggttgctacaagaaatgaaattagatcaactggggctaaattatgtggaaagacagcatgatgtagcagctagagtatggaccttgtaagcaggaagaccccttatttagcacttactagcttattgtctgacctctgagtcccaattttactcttctatacaatgagtacatcacaggattttatcaggtttaaatgataagatatatgtaaaatgcataccagagaggcagactattggactcgaagggctcagtaagtgtaagctggctctctctgccccttgccacctatttttcagactctggacttttatcactttaagtcatagcctagttctaagcaaggaaatggactaatcagacatgtttttaaaagatcattctggtagtggttaggagaatgaattggaaagatatgagacccatgcagggacaacagttaggacattatttctgtaataagccaagcaagaattgatgatcaaagtggtgaggttgaacaaacaaaacagatacgtgagctatttggagataaaatcaacactgtcatatgttttgtgggaggtggaggtgagcagaaaatgtgaggtaaaatgagaaatcagtgcctgcttaccacttggcatgattgactgaaggtagtgtcttcactcaatcatgagttgcagaattcaagatggcaaacagttgtgaggagcaaagtcaagaacgtgtttgattttgaggtatctgtaagtgaaaaatcagaggtgaaaaccttacctctcttgaagcagttgtgaatgtaaatctaaggtttggaaaaagatctgggttaaagatttaaaattgaaggacatcaacatggaagccatagaaataaattatattacacacaaatttatgtcgttatttgaatttctccatggtccactcagaaatatatctaaatgtcaccaaaatgttacttactgtagtacagaattggtattaagtgatactattgtccatgttattcaaaaagacagttatagggaccctcttaataaactaattgtgaaaaaggcaaagaattagcaaagctttggcataaaattcatatcatgggccaggcgtggtggctcatgcatataatcccagcactttgggaggctgaggtgggcagatcacctgaggtcgggagttcgagaccagcctgaccaacatggcgaaaccccgtctctactaaaaatacaaaaattagccaggtgtggtggcacacgcctgtaatcccaactactcgggaggcagaggcaggagaatcgcttgaacgtaggaggcagaggatgcagtgagctgagatcgtgccattgcactccagcctgggtgacacagtgagactccatctcaaaaaaaaaaaaaaaaaattatgtcatggaaaaagtaaaagtctttgcataatgtatccaagatcatgaaaaactcttttcaataagataattagttccttttcttatataaacatggaaattttcatttttccttttattctcatattgatactataaaaaccccatcctcattcacaatactactgtctctaccctcgatagataccagttcaattgaacgtagcatgttctacccatgaatctattgttcagtgagaacctctgactataatgctcaggaatactcaagactcacatgattgtcttcttgctatatttagttactttattattttccattttgggaccctgaattcctgtagatctcagagaaaatccgaaatgaaataatgaaaataattaaaagtttagaaaagggagtcaatggggacaaatgttcaggactggtcttttatctcctgcaggaagaaagactgaatgcagaaaattagaatccatttttcatccagtcaccccaatttaatgcaatatgagtttagctatttgattttaagtgttgtaccgttttggaccatgttaccatggtaacatgaaccatgtctcattcatacgtaaacatgttaattgtattaaaacctttaaaacctacttctggatgttgccattacattaaacaattatctagaatgatacaaagtaatgactaaattgaataactttgtaaattaactattggattttgtaattttatatctataaaccaaaagaaaagcccacattggtaagaagacactgtgcatactgaaaagtcaattttgttagcctccaataaccattgtgttttattcctcgcagagcttttgtgaggatcttataagggaataaatatgaaagcactttgaaaaagctttcaagtgaaaggtccttattaattttatgaattaccattaaacaaaagtcaaactgaagatgtaaatctaataggatgctcttaaaagtcaatggatcaaagttatattaattaataaagaataataactaaatattttatgtttcataattggcaaagtatctttactgtcattttctaatttgatccttagtgaaaacctgtgatgttggtactcctattatttccattttcatttgagaagaataaaattggagaggttaagtaatttatctattgctacttgttaaaataactactaaattttattactcccagttaggagggcaattatataaactaaaagcttgtcacaataaatgtttacttttctgggattaaagtcatcatgtatttttcaattattaaggggggtaataataataatagctacctttttaaaatagttactatgtgccaaggtgtgtactaagtgctttgcttgcatgatgtaataccatcgtatatttagtacagaggaaaaactgagaggctgggtaacttctactaaggtaacacacaagtactggttgagtatcccttatccaaaacacttgggaccacaagtgttatggatatcaatttttttctgattctttttttggatttcagattttttcagattttggattacttgctttataattatgggttaagcatcccaaaccccaaaattcaaaattggaaatactccaatgagcatttactttgagaatcatgtcggcgctcaaaaattttcagcttttagagttttttggattttggattttcagatttgggatgctcaacccgaatatatagaaaagtcagcatttgaacctaagtttgactttctgatcttctaccaactctactgtcctacccattactctacattgactcagcattacagggaaagacccaagatcaccaaaagcaagcttcaaatcactcatctaatagaaattagtggaaatatttctacttcctaaacatccatctttcctttacattttaaagtcaagtttctacatctgcctcccaactgaaacacttctctatgaaatcaccataactaccaaatgcaaatatttttatcaagtcctcattgccctagaaatctactcatattttgttattactgctcactacagcctactgaaaaatgtctcaccttttgacttgccagggtgatatattatactaattgtctccttgtctctctaagcactcattccttcctctttctttcttctttttttttttttcacttttattttaagctctaggggcacatgtgcaggtttgttacatgggtaaattgcatgtcatgggagtttggtgaacagattattttgtcacccagataataagcatggtacctgataggtagtttctcagtcttcaccatcctcccaccctccaccctagagtagatcctggtttctgttgttcccttctttgtgttcatatgtactcagtgtttagctccacttataagtgagaatatatggtatttggttttctgttcctatgttatttcacctaggataatggcctccagctccatccatgttgctgcaaagaacataatctcattcttttttctggctgcacagtattccctggtgtatatgtaccacattttctatatctgatctaccattgatgggcatttaggttgattccatgtctttggtattgggaatagtgcagcaatgaacatacagctgcatgtgtctttatggtagaatgatttatattcctttgggtatatacccagtaatggcattgctgggttgaacggtagttcagttttgagttcttagaggtatttccaaactgctttccacagtggctgaactaatttacattcccaccaacagggtataagcattcccctttcttcacaacctcaccagcatctggtattttttgactttttttttttttttttttttttttttgagacgaagtctcgctcttgtcccccaggctggagtgcaatggcgcaatcttggctcactgcaacctccacctcccgggttcaagtgattctcctgcctcagcctcccaagtagctgggattagaggcgccttccaccatgcctggctaattttttatttttagtacagacagggtttcaccaggttggccaggctggtcgcaaactcctgacctcaggtgatgcgcccgccccggcctcccaaaacgctgagattacaggtgtgagccaccacaccaagcccacagtatcaattctatgcattcttttctgatttcattaatctcattatcttcatttgatatttagtcaatagttactgtcagttatgtgttagttattatactagaaacagtcttttctccatctcctttaatccaatgatttgaacatttttattcctttccaatgtctgtcccacatttcttactgtatgtaggacatttcttactcaaatgtctcacaaatgacataaattcagtatgacccaaataggccattttttataccaagtcttatttcctatcctgctgttcatcccggtaccatcttttcagtcagagagttcagatcatatagtcatttctaaatctcccacttacttgcctcactttcaagttcatttttaaggtctgtagattctgcctccctaattctttatgaccattcctttctcactagccccttacctccactctcattcacactcttactattttttaccctcctccactcattcctgcccaccagtggctccaatccaacttgcagatttccatttaaattaagcttcctaaaacatagcttaggttgtaactacaatgcaaattccatgagagcaaagatttcatctgctttattcacttgtatatatccattgtccaagactgtgtgtgtcacatgaaaagtgttcaataagtatttgtcagtgaacgaaaataatatatgactcccctcttcaaacaccttttttgacttcaaagcccttcagaatattctacagactccttcacctggctctccacaattgcccctgagtctcgtttccaatcttatttcttattttacctctcaatgcaccttcaactcctactaaaatgaacagctagccagcttacttctgtgtctttcgatgatcttgttttttgtcttgagattcctttttttcatctaagcttacccaaacattacctacttttcaaggaaagccattttcgaatcttccctttttccctgagcccccaagctggaagacatcttgtctccatctcaattcctataggcatttctctgcactttaaatgacgtttagtacttctgacattgcattagagagaggctggggtggatagtgtttcatagtgtgaactttgaagcccgactgcctgagtttaaatcgtgattctggggcttactgaccatagacgcatttctgaattgctctcagattatggagcataaatcaaaagtaatgacagctacctcttcaggttgttgtgagggtgatgcgaattaatgtactgaagtgcatggaacagtttctggcacacggtaagcacccaataaacatagctaatattatgttattactattttcaggcttatttttatgtatacatatagtatgtaattttatgtcaatatgtataaatagactttggtattgtttatttcactatcaccttgagagcacaattctcatttgatttgtgtgagaaactacttagaaagaaatagacgtgtgaatgaaactatgcttgaaatattggttactgtgagtgttgaaaatccattttgtttaaagaaagcttcaattgttaatcttccataaattttagttcttaagcgttcatattgactcgttttggaaaagctctttaaagtcttgggatataaacaaggctgaataccctcattcatgataacaaacatattatactgaaaattgtaagagagatattttatctttcataatgccctccttgggaaaatacattgacttggcccttctctttcaatcagacaccaaagttgagattgcctgaaacacagtttggtaaaaggagtttctttttcccaaacatcctgagtaacacaggaaatcacaccaatgactgatagataacgttaataaaattaataaagttgttttaaatgcataccatggggcagtggcaatgaaaacattgagaaggctgggactatttgccaactttctttgatctccattagaacctggacaagatccacataatttcagaacttcttctccaaacaagaattgaaaaggtcaggaaaagtttgaccacagaaaaatgtcaaagaattttgtgtcactttctcctcctcccttcctctaaccttgaataattttttagggttattggtctttgggagcagactttctagaccaaaacaaaaaaaatgatattcctctatgtgataggtaacaatcactacccatcctactggaaaattctcaaagtgtaaattgaggggataaaaaaagaatcttaagtcctttaaattatttttaagatgaactacattagtgcctctcttgtgcctttcataattctgataataaaacattccaggtattagtcaaagattaatggtattgaaaataatttaggttatcagcatgtgattttcattccacatgaggtccttttgcagtttacatggttttctaaattatattaaaataaaatgtcagaaagttcacatttttttcatgtttaacagcatcaatctttaaagaaaagttattgcacaaaggtctgtgcataaatcagccattctccgaagaggtaaaagaagtcattacgcctggttatgagagagagtttcatgaatgtaagagacataaatcatttcccactggagatcatattagtctagatggaagaatgtctgtttcttgatagtgagaaagcaacaaattacttttgtttgctcctgagtctgtggttgtccttgagaggtctgttagcatgttgactattgactattcaatattagcattataataacttacaatgatctgagtcacataaatataatctttcagttctctaaagattttactttttcctctctaatatctattcacctccaacacctttgcaaatatattattctctgggagttacaaagaaagttattctctgcaggaagcagcatttcagttgctctcaggagccaaccacatttcacctcaattctttgctcccaattcaacaattcaatattggattaaattcaaggctgtgaccccaaatagaatgagacctggatatttatgaaccacttgaccaggcattcttcccatgatttactccataaatcctttttagtttttgcagtagctttacaaatatttggaaaatggctgtgcaatgcagttttaaaaagtgcaatgagtagaggtagcttcttcacctggtatggtaaattgttgattctcttttggagtggaaaacaagtgttcttatttggatgcaaccattgcattgattagacaaccctaaattcatctttcatccatgacctgaaagaaattttgaaattcatgcaatatatacccgtagtggaaaatgtactttttgaatggattcctgaatgtgacttttaagaagagctattaagaagtgggatcttctacagaacagtaaacaggcatgaaaatatacaagttgataagatatggaactaccccaaaagaggaattaatagtggtggggcttggggcaggaggacagagagacctagccaaggaaggaagggctatattataatagagtacaaagtcctttagtcatccaagagaaggggcaccttctgcatcccttatgagtaagatcagagaaggtattctagttaacttttgctacataacaagccagcccaaaacttcatggcttcagtaaaaattacttgttttgttcatgaatctacagtttgctcaaggttcaatggggcttgcttatccctgtttcagttgatatcagttggggtagattgcctgatgctggaggattcacttccaagagggctcactcacatgcctggaaaataggtgctgactgtcagtttttcttcatgtggacctctccatggagcagtttgggctttttcacagtgtaagagttgggtcccaagagcaattatcctaagggacaagaaattaaagctgcaagcttctcaaggcctgccctaaaagcaagaatggttttgcttctcccatattctatttgtcaatcagtgacagagctctgattcaaggggatgagaacataaactccacctttccatggagaagtatcaaaaagttttgatgccatttaattaaagctgccatacaaagtttcttataaatgacactgagctgaatgaatactaaacagcaagtagtcattatcccagtcaagagaagttatctttgctcagaataccctttctctccttgtctacctggaaaattcaactcttggccaaagccctacctcttctcgaaagcattaccaggccttgcctctaagtgtacaattggagatacaccagtatactgatgtttttaaaactttaaacttttttctacaataaaacataaattaaataacttcccttctgacttaaaagctgcaaaatgctcatgacagtaactatataaattaaaattaaatcttaagcacgataaatacctctcgaatagcaacatagatgcttacttctttatttcacttctttatttgcttttctttgtctatagtttgccccaaaggtattttaataatatcgggttccatgtataccagtgtgtaccaattaatatttagaatatacctgttaataacctcatttgcatagccctactaatctgagcacagcgcagccttaagaaagtcttagtttttctcagtttagttcatctctcttctcttctcctcctgtctctcttatttcctatttctttttcttttcaagtgactttcaactaagtagaaaatgcatttcacatcactatgccggcctccaggctctgtctatttcattcacccaggaatgccctttctgaatgctttctctcatttagcagctatctattgaagttggacaaatgatagaaattcatttcttaaagagccagaacatcatcttgaacaagaagttaaaagaattcagcaaatcaaaagatgagctaatatgggtgaatcttagaggcattatgctaagtgaaataaaccagacacaaaatgaaaaatattgtatgattccactggtatgagctacctacaacagtcaaatttatacagacgtaaagttgaaggatgttaccaggagctggaggaagaagagaatgagggcttattgtttaatgagtacctgagtttcagtttgggatgatgaaaacattctagagatggatagtggtgatggttcaacgataataataatataatattaatgtacttaatagtactcaactgtatacttaaaaatggtcaagaaaatggtaccccgttatcctgatgtgattattacacattgtaggcctatatcaaaatatctcatgtaccccgtaaatatatgcacctactatgtacccataaaaaaaatttaaaggctaaatggccaggcattgtgggtcacttctgtaatcccagaactgtgggaggctaaagcaggaggatcacttgagctcaggagttcaagaccagcctgggcaacatggcaaggccccatctctacaaagaattcaaaaattaactgggtgtgggagctcatgcttgtagtcccagacacactggaggctgaggcaggaggattccttgaacccaggaactggaggaagcagtgaatgacactgtaccccagcatggtcaagatcccaaatcaaaaagaaatgattaaaatgatcaattttatgttgtgtatattttgccacaatacaaaaatggggaaaagcctattcgcttttaagtatccttaaaaaggcacagcttcttcagctaacagactctaaaactttttttaatagaagtattaaggtatttagagagtgcaaaatatcttattttaagtcaagaagttagggtcctgttcctaaacactagcctctgtaatcctggggaagtcagtgctgttggagatctcaggttgatcttctgaaaaatgatggatctaggtaaaagatatgtttctccaggtttacataccacggacaccatctttacttggaaactttattaaaaatgcattgtgtcagaagctctctggggatgggtcgtggaatctgcatatgtaaagagcccctaggtagttcttgtgcccacttaaatttgagaaccactagaccagatgttttgcttatggccctttcagctctgaaatttgaaaaaaaaaaaaatgattctgcaagacagagtctctgtgcttttgcaggataaagaaatgaagaaaataatacttcctgcttgtgttggagcatttttttcatttggtatccccatctccagtggctagccaatcaagaatagtattgtttattcttcccactgttttgaagatacaaaaggaaaagctaagccagatgacacctaaaggcttccattaccattttcatgtttttccctttgcataaaaactgtccatgcctccatcagagccatgatcactagtacaatgttacactctaatgactcatgacattaaattatatcttagcctaatatgaccaaattacaatatcagaataaaaatttcttttttcaggttgaatcccataacttaatccaattataatactggctgaatttttcacaattatgtctcagtcttgatttagggaatcttctctttatcataaaaatgcattttgttaaacatgtttcattataatcaatttctcaaaagtaaagttaatcaagagaaggaaaaaaggttttgttttgatttgatttggaatgtgtatgtgtgtttactgtattgaaatagattctgtctgaaagactgtatataagataaaaagtacagaagagtagtcagagagttattacccacccctgactgatggtgaatagattatctaagtatcccgtaaaaggcacaactccttcaggtatattttacaaattaattagtaactttctagccaaatttgtgtcttaaagacaccagctagaacttggttagttctagcaaagaagattattttattctgaaacaggtttttgttgtcgttttacttatttgaacttttttcttgaatatgtatttctttgcacataaaatatattgacttatgaatgtgattaaaatggaaaataattagttgattttagagagacagagagaggagaagagaagtgtgaaggagagagggaggatagaaaggagagagggagaacaggaaggacagagggagaatgggaaggagagggagagagagagacagagagagaggaatggagtgggtaataagcaagagaaaaatgccaatcatatgctttgctagtgtgtaaagtctgataacccaagggagagaggactactctggcctagtgaaacaaaggaaagagaaatatggtagaatattctcctggtgcttcaccaaatgtgacaccagaagtctgacagaagtcatgtcagcatttgagctccataaaactcaggctatcgacctaccatgtgagagtctcaaaatgagtttaggtaggggcagaggagttgaaatccagtaacatatgcaacagtgatcacaccaggattgcacatagaaagcaaattagtcctctaatagagacgccaatttgaaattcaccctctgagcaggtttttaagcacactcttcttttacttttctatttacaaaaatggaacaccaccagaaaaacaagaatttgaaagacgagatgagaaaagtaagttgtaattggaaacagacagaatgtgtacacaaacacacacacacacgcacacacacgtgcatgcacaggtgatgagagagtagtttgcctacatggtgtatctgactaagaagactttttgctctggttgtcttacaggaagtgactaaatctcatgatgtgaaatattttcttgcatattgtattggaaaagaaaataattttcccaaactccttaggggcagtgttgtcttataattcccatatagtatatgctcttcaagtaagtaactccagagttgagtaagacaagactcgtgactcagatggcatgctctgctccctagactagacattgcatcagtctgcctatactcacatccgctgttaaaggattgcctccagtaaaatatgtcttttaattccttatacaagaatctggaaaaaaaaagtaagattctctatttcttaaatttagcagcaggttaatcactgataacaataaaaatacataacaatcatctagcacgggtaaatattgtggcaaaaattacaccctgaagaattcagtcaaagatataagtaagtacacatcattgtcatgttccacaatatatcatctgctttaaagaaactgttatgtagctgtagtagatttaatcattaatcccatttcttctccaccttctgcaatcacaaccttaacaatgcctccttatgagtggaatgtacttcccaacccctagtcttaggggttggccatgtgatttgctttagcaaatggtaaatgagcaggagtgagaggtgacagttttcagcctaggccttaagagatctatacattcctgtttgtgcttctgctatcattctgagaacacgtccatctaggctgctggtctcaggaaaacgataaaagacatgaacagcagggctgcactagccattcacatccaggaaaagaaatgattgttgcataaagccattgagctttattctacattactgtgacaatagctaattgaaatagtaaatatactttggtttttcctaaatgcatattgaaaattaataatattagccatctgtatgataaaaatataaagcctatgttttattttttaatggttcactgccctaaataaatttccaaaaagtagatgttcccttgtctagtgatgtcattatattttatttatacatcataaacacactgtttatttctgctcatttttttgtaagtaacatgtgttaccgccaatcttgagatgatacacacacttctgtactaaattttggaaaacatattagctacccactccttatatcaaaatattgcctaataatgtgttttgttttaatccttcatgaatttccaggagaactgaactgatacttgggtttgtgagatatatgaaaatagtgaacatgaacttctggtttaacccttgtgatgataatggaatcatagctctgttaattactcttgtggtttgtcttcctagagataatcatgtacaaaattcctttccaatttgttatataatattagaaatacttccaaaattggcatggatttattgttatcatttgttggcacaatcattaaaacgaaacccataaagctagataattaaatgtttacaaagctatagtactcaaaacaaaaacactgtgaaaagagattttttaaataatagtttttgcatgccttttgaataattggattattctgaatttcttcatgtttagtccctgaatctaagtcataccgtctacataaaaatagatgtcagctgaagaaaaccaggcaatggatttgtcttgacgacaatctttttatatgttcagacttcatttaacattagacttgtctgtatttgaaattggtatttctttacatttctgaatttagggaaatggcacaagagaataacattaatttcctctgcattttggcctaatcaaatttgagcctttcaagagacacagccaagtcaattcaaagagacatatgaaaagactactgttaatgtatctttaaaatgaattagcggcatgaactgttgctaggtgagttaggtatagttgtagtttttagtaaccctaagagaagatgcagtgcattctaaaatgtcacaaggagtttgattgctcaaaattctgggagattggctctctgcaaggcttcttgatgtcattgttcctagaggaatgttgttccagtacctatagcgattgcagccataactatttatgtgtcattgtagccattgttattactacatgcttcacatacctctactgaggtctaaagaattagtggacttcatattctggagagaacacttgaagaaccaaacagaagtttgatgtgaatctgcatatccaccattattgttcataggttctcaggattagttgagtgatgccttaaagaaagaaagtcagatgataggtcttcctgctgcccgcaccacatcatgagtgttattcctatagaggaggagtaaagagtgggaagaaaatgaaatctgtcaatactgtgaatatataaataataaaagtagcagtaggactgattaattctgaatcatctttatgaaatgactggagccgtgaaaatgctcagtctgcacagctgattgagaaatgtatgcaatctgttgatcggaatttatttgtgaatgctctcttccagagatttatataccagagttcttaaaacgaattttgtccccatgaaaagaaaactacagatctgtaagactgcaatttaaaatggaagaaaacatgttcccacttgaagaacaactttcaaacaaacaactgatacaaaaaagtcaaaagctgttttgttttatataatagtttcagaatacttccagtcaatatataccttggtttggtgaaaaaataaaaagctaaatccttagatcattaactagaaatttttgtaaaataaataaaagccgtgggttttagtgcagtgatcccatgaagaggaatatattcaccattggtctcttaatctcagatagaatgtacatgttactttattttataacgaaagcaactgtgttgtgatattatgtataatattataacaggagaagtcctcttagctaactcagtaatcaataacattgtacgttgtgtgttattgtaaccaaaaactatgacagaaccccatttcataagatcagtttatccacctatatgatttatatttgaatattcatttcagtacttatgttgcttaaacaaagctactgtattagtccattttcatactgctataaagaactgcccgagactgggtaatttctaaaggaaagaggtttaattgactcacagttccacatggctgggtaggcctcaggaaacttacaatcatggcagaaggtgaaggggaagcaagcatcttcttcacaaggccgcaggaaggagaagcgcccagcgaagtaggaagagccccttataaaaccatcagatcccgctatcatgagaacagcatgggagaaactgcccttatgattccattacctccacctggtctctcccttgacacgtggggattatggaggttatggggattacaatttaagatgagattgtggggtggggacacagccaagccataccaaaaactctgttttttgtttttgtttaatggaaatgatttagaactttattttctgatgtttctttttcataaaaccacgacaccaaaatctacttttcactgctccattcaactagtagagaatatctaatctcttctcaagtatttctttctcaattatggtggttttagctaagaacagcttatggcatgcttttctaaataatattagaacacataaattatctgtacctggtattaccacattcattgctcattttaagatctcaattgatacattcaattcatatatatttaaaattgattcatttagagcaagagatacaggcattttaatgtattacactgctactaaagcttagcaaattattcttttttgtgcccacaaattatcatccattcatgtcctaaaaataaaattgaatttattatactttcccatttatccaaaaaaaaggttttttttaacaattgatgcagatacacattttcaagctaaaaatatgtgtgaaagtggcctctttctcatagtatttattttaggagtctagcaataatttttcttaggttatcagcacatgtcttagcctgaattatttgaattcagtctgtgtcttcaagttcagatggttatgtgatcttgttaagatctcaaagtagtgggaatgatggagtatacaacaacctcattgttttttatggcaactgtcatttactgaaggacataaggctagcagaacatggtcagagaaggaatcaaagtttggtcagccaactctgctccacagctacaagctgctagacaggcataaatttttccaaacctacacaaagggacttagggcccttggctgagagcgacattctaaccacttccttatttatggctggtggggtttgtacattttctcatttctgtataacatttcttgactgtaataagcaatgtattcattctgctttaccactttcactaaccttaacctcaatatatactcaattaagcaattgaaaacagcagttttaatcttttgacataaatgatttcctccgaagcaaaatgctggaaatcccctcaaatgcaccttttattgatgaatacctataagcaccacctacagtcgctggaggctgacaggaaccaaacttgatgataaccactgagctgagaattttcaactcactctttttccctgtatggttcttctagctgcattatttcccactatttaaagctacagctggtgaactattcaaatatttaaactttggagaagaaaatatcaacttatcacaaccctctttttatattctaaattcatatacctgtttggtacttaaaggaaaaatatgctgaggaacaggctggtcataagactgtatagaacgtgcatcttccatcctattgaggtgactcctagacaatgggaaaaatgccttcactcgacttgctcattaaatgtgaccgtagctgctaatcttttggcgctgtctcgaactttaattagatgtgctcttctcttgaaggttggaactacagtatccagagaccatagaatcacagagttgaaaacaaaatcttggaaatcattgaatccacttatcagatgagaaaaaaaaaataagcccatggagatagccattttaaaacatatcattctatttagcctccaatgtaaaacaatgagttactatgtttcaataatgttgatgttaagaaattatttgatagcttcctcacttggtctcctatattcctccaaggttactagttaggaagactgtcattcaaatttggagactacataagaagcagaaaaagcatataaagaggcacatgaaattggaacttttctggtaaaatcttctttcttaaactctcctcaaataagctgttggtggcaggaggtgaaagacagcctccaccctttagcacagtccgtacttgtcagcatttcccaggaagggtgatgtctggaaatgatagagattgtggaagcacattgcattatgggtcaagaatgcgaaggtcaaggagtggagtcttcctttacgaagtagtgttaactgcttggcgtggcattgttgtaaacagaagccaccaggaaggatcatccttaggagggaacctgtagatatgactgaaaacaagagagatccagttttaccactctggaaacataggtaatagaaagcccaaaaggtaccttatcacttgtttgttcctttctgtacaaaaggacttaaatcctttctgagcaagaaagatatttgagaatccaattttgttttaaacttgagcttagcattttggaactattccaaagaccacagaattcacagtcattagcataccacagcagactcttttcaaatattgcaaaccagaacagtctgcttgaaaacctggaaatacgacctagtgggttcaacttgactttttttatttctaacccttacccctaggcaattattgataactcattctggtacctggtatgtatatggactttgttagaagaatttgacaactttctaatcatctgttttttttcttttgcttgatagacatacatttagtagaactttactggattgtattgattataaaccacatttcagttcatatcagtccattttgctgcacaataaacaaccaaaaaaatttaattcagtggctaataacaacaatattgatttattcatggagctgcagtttggtagggtttggccaatcatggctggaaatggtttagctatgcttatctctaggccgtcggttctgttcgggtctataccacatattttcttctgagactcaagctgaagggacatcagctactcggggtatgacagagtagcacaaggcaatgacagaagcacaaacaacacttttcaaaatctctcctcttgtcacatttgtttatagcccattagacaaaacatgtcttgtggccaagcccaaagtcaaggggtaggaaaatactttccacctatgtgaggccatggctggagcgtgaatgtatgatactactagggatgtgaaaggattgaggccaataattcaatcttctattggagacaagctcaacgagttagttaaaatggaaggctaatatttactaactttgcaacccaaggaagagaaagcaggatctctctgacgatgacggaatttcataccctcatctttgaagttatactaaagcttaggaacaaccgtcagataggactgaattgctcccccttccagattcagcatgtgaagtatgcagcatcttattatagcagtagccaaaacagccgttttcttcaatttgggaatacaatgtaggtgtgttaattttcaattaagagttctaaacttattatctgcttggtagctcttccatgtgacagtcattccatctgactcttcatgttggcttttgaactaaattttaaaggaaccgccaaaatttaagggccatgtactttttataacctgtttgtggtctgggtaagaaaataaaaattatacaactgttctttttgaccagccacaagcatgtaatgaaaatgactgttttggctagcagatgtattagaagctttcaaggtgtttaaaaaaaaaaaaaaaaactggagaaaggagccagtgaattgacctcaaacaaaacaagaacaaataaacaaaacacttgtctgcacttccaaggaagggtgatatctagaaaagatagagatgatggaagcaccttgcattatgggtcacaaacgtgaaggtcaaggggtggcgtcttcctttatgaagtagtattaactgcttggcagggcattgttgtaaaaagaatccaccagaagtgaaacaagcagcactaaaagttaaaagatttatgtgtaaacctcatctaaggcaacagaagccatttctataaaatagtataggaccttttattatatatggtcctagagtatattaaaataagtctgtttgggtccatttgcagctcatttgaagatttttataggaaaaacatcctcaaaaatatcatactacagtgccttgatgcttttttctttttataaggtactgccagcccaaatagtaagaaaccgatatgatttttgtccatgtgaggtgtttaattgcttcccaaaatatggttattgtgtagatgtcactaacgaaatatataaagagcagtatttgggaaaatttattttaataccacctttttccttttttaccctaaaagtatttatttttttcgtagcatacactctgtgtctcagtatcattgtttttcataaaaacataaattcttaacagaaaatttcctgcaagctcccctaagcttgaagagacaaaggagatttgtaatgtagctcagccccaatcagggtaaaagaatgcagggctgactttatacttataactcagaaaaaggttatgcttcccgtctcttcacagagctagtctcttaattgattccgaactaggaacatgtacaagtggcccacgatctggaacagactggcggataatggaatattgagaccttgtctatggtcagccatattaacactggataagtctgataacactgtgattacatatgtatcaatatagtatgctgttaatatattaaaaacttatttacaacatgattattggacaactgttacagtacagccacatcaatcctatatcaagttagaccatgtcaactggttttgtgttgagacacctgtgtatggacatagtctgaacttttcatagtttgtgctaaatgatagcaatcaacatcggtatggcacttacagtttactgataactttcatgcccattaacatagtaccgcaataactctgtgaagtgctgaatttgtgtcctgtttcatgattgtatttgtgttgatatctcagtcagtcagagtcccaacaagaaacagatggcacattcagattagggtaagttgaggagtctttatttacaaggcactacatactcaggattgggcagggtgtagggaaatctcacaagatagcacaagactctaggactagcagcagcagagctgtcacctctcctagacctgaagccgttgttggggagagaggtttctcagagcccagaaaaaaagaaaaaaaaaaaaaacatcatgcagattttaatgccttgggaggagcagtggctttctcttaaggacagaatttgcctcgaaatgatactcagggaaaaagagatgaagggaatcaatactctgacccaagactctcccttctctgcagtggtttgctagtcctctccttggtcaaacccaaacagaaaaccatagggcataggagtctaatgatgtaatccaagtcagccccctggaaggtggaaaaagaagggaaaatggatctggatctggagggataccaaaaaaaaaaaaaaaaaaaaaaaaccatagttggcatgcttgtttattgatattttcttgcatgatataagaatccagataaatatagtaagaggtctattttactaacaattttaggcacctaataataatactccttctttgaatgtataacctctagaattggttcagaaatgtaactgtgccgttacaatttctattagtattcaacagtagattcatatccattcatctatgactggagtatctgccatttgctggttagttactgtgtaaggtactttgtaaggtatagaaatacacttggggtgcgatggctcatgcctgtaatcccaaggatttgggaagctgaggcaggcagatcacttgagtccaggagtttgagatcagcctgggcaacatggtgaaaccccatctctacaaaaaatgcaaaaagagtacctgcgcatggtggcatgtgcctgtagtcccagctactcgggagcctgaggtagaaggatcacgtgaacccaggaagtcgaggctgcagtgagccataatggcacaactgcactccagcctggatgacagagtgagaccctatcaaaaaaaaataagaaataaatttgagctcagtgacctacattctagtgcagaaaaaaatgaccatagttgattatgagattttaaagcaataaaccacatgagacatactaatgagctcataagatcattcagaaattgtttattatgaacacatagtactttcagtgtggcattaaacagagatcactgtccttaaacaagttaaaagcagaatcaaatcatctgcaaattaacacaccactaaactttaagcttcttgagtgattctgtaatttttaaaatgtcttcagcatttcagtgtcaagatagtgcaaactcagtaaaagcttgtggaattgcattaaacaaaaccaaaataaatagattttattaaaactatatacaattgtctttctaatcatatcctctccatgaatagggaagaaataattttaggaatttaaatatcttctatcttaatagttcctcttatttccctcttaagcaatgttcactccttcaaaaatatttattgagcatctaatatgtacttaacactgtgccaggtgctgtgaagaatgccaaggaaatagaatgaacttctaattctttggagttccaattaaataacctaaagttaaattggtttcggagagaacattatgccttcgagactgtaggcttctcttgattagaaagtcttaaacattttaagtaactaaacagattaaggagaattcaaggatgcctctcactagtaaatttggattagtctggcaaacttcagaccttaaatgcaagatttttaataattaaaagaagagagaaaatgataattacatttctagagtctatgtttaccattcagccttcttaatcatttcctaagtatatctggtgatcaggattttataactccagaaaatctttctatacatcgcataaatctcttcttttaaaaagctcttcaattttgtattttgttaaaacttaaaagcctccatgaaaaatgagacaaaagtcagtgagaggctgtagcaataaaaatcagatgtgattttcttttgaataacatctgtttttacagtcctttcatgttaaactttataagaatttattataaacagctttattgacagttcaatcctatttctaaaaggatttattttcccccaatggtaagagttttcttttcttaaacctaactagttgcagatatttcagatactacatttctcattgtgtaaggtaaagtttctgaccacctgaatatgacttgtagctcctgagaacaatttgtttagtaccgatatcatgcagtgacattggtacaaaggaattttctttatttcactgtactgttttcagttttattctatagttgttaaataagaccattaaatatttttattagtcttatttcctgtttaactaggtgggtttttgatctctgttcagtaaagcattgtgctcttcagagcaagcaattgaaaagcaaatagtgagtatttctactgtaaaagtttaacattaaaagatatacacacagccaggcaaggtggctcacgactgtaatcccagcaatttgggaggctaaggcaggagaatcgcttgagcccaggagttcgagaccagtctgggaaccatagcaagactccgtctctaccaaaaaaattttttaaaaaatagttggatgtggtggaacacctctgtaatcccagctactcaggacgctgaggcaggaggattgcttgagcctgggaggtcaaggctgcaaggctgcagggagctgtgactatgctactgtactccagtctaggtgacagaatgagaccctctctctctcaattaaaaaaaaaaaaacaagatacacacacatatatttgcgtaggtaactctaatttcatttcaagtatgttatgtaacaaccatttgtgtagtgcttgtaacagtcaatatgtaaatactgactcatcttctttgacaattctacctagatacttattagagtcccccttagtcattgaaaggaaggttaaaatcaaaagacgttgtttgccaaagtaatgaaagaaaacttataaacacaatgtatcatgtctggggctgaactaaaacccttctgatatgtggtattaacagatcatctttcatgacagtaccagttattagaaataaaatgattggagttattattaatactaacaatagtggtattcttaaaatgacttccttatttatcttcacctttatacattctactactgcttcaagacccatcttgaattcttcttccacagaacattctgcattaatttcagccaacattgatttctctttttaaaatttgtcttgcacagtgaattagaaaaccaggaattggaaaaccagaaaagcttattaagtaagaagcagagaggagagagtttcaacaaagggccattctaaagtggtctactgcggacaccatactgattatagttggtgattaaatcttatctttccaactgattataaactcctccagggcatactcttatattccacaagatgcttatctgggtgcagagcatgcatgcagttggtatttgctgatttatcaactaactaaatcttaacatattattattaacaatttaaaataaagttaaatgtatcactctccacccctcaaagccatttctgttctttgttttcatagcaccattattatttcctgcatagtattttttaaaaaccgtatttttaaaatttatatatttgtttatttgggtatacttcactagattgtaagcgtcacaaaagcagaactattataaccccagccactaacacaatgcctaacaaatagtaggttctcaatatttgttgaatgaatgacctacagatattacttcattatgaaagattttgctaagttgttttacatctattttatccaaaactaaagttcttgaggcaaagcctagaatatcttctatgttctcacaatgctctgaatcagtgcttctcttaatatgcatagcaattgcctggagagcttgttaaaacatagattacttagccccaaccccagagatgctgattcagtaggtcccaggtgatgctgctgctgtcagtctctggcgcacactttgagtagtagggctctaggatgttatatgtacagacacatgctgaatagtgggctatgtgcttacttgctggctaaataataaatgttctcactgagtcatagaactttgaaatttgcaaggacttttgctattatctagtctatggatagcaaataacctgataccgtgctatagtgcttgactgcatttaacctgcagaatcctcatgagcagcccagcaccatcactccaagtgaaactactctcttcttgaggttgtccaattctatcaattaaagatgaaaaccaggttctgagagttgaaatctctggacttcaaaggtccaacagcccaggtcttctcaattctcgttagtgtttcagcagctgaatacaaatttattaagctgtatcagagtagtatctgtcaaattggagtgtccataatatgcttaaacagagaactccattccaataacatgaactttccttatgctttattcatcatcgcttgaaattttgaattttgcccaaagaagtttataccagtacatgttaaattacatcatagccttctttgtataaatcttagagtagtttactgaagtacatcgcaaagttttgttgtttcttaggtgattttaattatgtatgtttactttcagtaatgcatcttttctccttcatcaatattatgttatgctagctgtaagtacaaaataattgagaacaaattatgacaaattgaaccaagccacaaaaaaaggagaaaccaaatacttttgtgatttgagcttttttcagtccttgaaactttaagaatatctgtctttattaacttttgctttttgctgatggtttctctcattttattatagcttatagcattgtaaattaatttaacatgaaaggataaaaacgttgcttttgaaatgtttctcattaaattatgaaaaaatattacactaaataaaagaaaggaatgcctctggtaccagcttctgtttgctcaattattgcagtacccaaagtgaattattacacagttaactcagaggcaatattattgtcattatattataaaatagatgagttgcaatcttcaaaaaaaaaaaacagcataggtcctttgaaagtgaaataccttttttccttgtgcttcatttaaatatatactgaccccagttttgtttttgtttttcctttttagagttcttgctaatgatgggcccaaagttatattaagaactgcaaagtaaatttcaaccaattactttattcaggggagtcattaaattgaggtacctctgaaattttggaaggaatgtactgccaattagccgaaagcactactcaatgtcctttctatggttataatctctctagtgtatttttaattgaagacaacctctatagaggaggtgagaagttgctatttattggtacttgttaggatggaatcaagggtgtggaagatattcatctatttctctctccagctcccccacacaaaaagaatggtgcttaatccatctgaagcatttggggagcgagggtaaagatgtaatatttaccatgagccgaaacagatcttcagaagtggaaaatggaagcatattgaagtccctcaactaaacagactttcttccatatggaattcaatgcattaatgttttcaaattctatagcttcaaattcttaatattttcaaattatgtgagcttatgtcaaaacatttaagtgagcttttaacaatgaggcaaatatttgaatcatttgtctacataacaaatactactataaagcatattaaatgttataaaaatcctaatatactaatgtaagctattataaagtacaaataattaaacaatatttatatgatcaatgttttataatacgataaacacattaaataattaaaaactcttccaccgtgcaaaaatgactaaataaattgttaatttctaaggctttttgagattactgtgaaagggggtatagtttcaggaaaggtgaaacttcccttcaatgtgtaaaccattaaagaacataataacctactgagtgtgggtctcaatgatatgccctggaaagtatgggcaactactccacacccaattttgtctttatatgataaggcacagcaaataattataatgcaatggataaatggtaaatcccaccaaagattaaccaatcagagcaggatgaaaattctgagtttggaaatctattggaagatttacagattagattaaagtgcccagtaaccaaactatcaaaattatatggcttcagttaattaatgatttccaaggtttttagtatactgtattacaaaacacattaagcatcttaagcattcaaacaacatttttttgatgattcagaaagcatcacaaattgttatatcagctgataataacttaggtacatatcaattaaacttgtattatagacacgcagaattcttcagaccagaagtcgaaagggcttctctagtttgtttatgctaagttgtttagagatgacataactctgagctaatttgtctattgcaatggttctcaaaatggggggcgggggatatttttacctccaccaagtggacatttagcaatatctggaggcatttttaattattattactggattggagatacaactgaagtctagtgggtagaggccagatatggtataaaatatcctacaatgcataggatagccctccacaaggaattatttaggccaaaatgtcagtagtataaaaattgagaaatgctagtctaatatagtgtttactcacctttcctgaaactatgtcccctttcacagtaatctcaaaaagctttagaaattaaaaaatcgtttagtcatttttgcatggtggaagagcttttaattatttagtgtgttttatcttatgaaatgttgataatataaatattgtttaattatttgaactttataagagcttatattagtatattaattaggattttatttaacatttaatatgctttacaataatattcattatatagacaaacgttttatttttttcactttaacaatgatttttaactctaattacataagaaaaagtatgagttaacaattttttaaattacatgcttggtttgagggccaaatacacatgaaaatgtggactaaaatttaaaatcaaataaaatctataaagtcgaggaaaaagctacttttatgacgaggcatggggaattcttcatagtttttgggttttatcagaagttagctattttttttctttttgctctgtaaacaatcagataagagaggctcaaatgacattttcaagtacatcttaacaaaatacactttgagcatcaattgagtaaagtttcattcttttgaaactttggttttcacaagatttcctgagagttttattttattggtgttctgtgggacttgggcatcataattcttacaaactactcagctcaatctaatgtgcagcgaagctctgggaacttttgttttgtctagtatccagttggaagattctatagctacagagcttgggtttaaaccccctccaagtctttaccagctacctttatgaccctggcaaattacttaaactgtgtgccaccattttctcctctgtaatacggaggcaataaaaatttccacttttagattttctatatgcggtttacaaattgacttactctgaagatcatctggagtaaaatctggagaaatatgatcccttataacttcttcaaccctttatatatttcaacatgagtaaccaatgctctaaatatggatataaattataagaataaaaaatctaggactattataatggtctaaactctcttcatagctaaaagtgttgagtaattaaaccagttgagcagctaaatcatgtacacacttctttgatccctcccacgatcatgtatttggcattgtaatgaaaagatatgtttattttcgagaatagacataactacctttaataatatgatcacccagaaatttttacaaacccctggaaaatttcatgaatatcaggctgtgctcataaaaccttagagatgagatcacaatagactgggtcaacatatagtaatgagcaggattaataaaacctcagatgggcatttacaaatgagtcaaaaccatgagtataattaaataattgtagcaaaaaaagagccttgggtaatcctttcagcaaacgtaatcgaagtgattgcatttagaagacaaatatttaatttggtgactagaaggtcttttattattccattatgtctttgtgtgtgtgtgtgtgtgagacacttttcaaggtcaatttttacttataaattgtctctaattaaaaattgacttggttattaaatcattgaaaattggccatcatcaaattcctcattaaaatatttctatgtgccatatatatatatatatatatatagaatatatatgtagaatatatgtatacatttatttttactttttttttactgtgcctactagagaaatttaaactacatatatgtagaatatatgtatgttttaactagacatactgttaagtacactatacctaatatttggcaatattaataccatctcattgagaaacctggaatatatgcacattttggatgtctattatatgttgggcactggactagtcattgataatacagagattagtaagactcaggttgacttcagccatgttgtcaggaagcacacactctagtttgggacagcgaggagaaattcaataagagaaatatatataaggcataatgctctaggagaatatgcagtggataactgcccaataggaccaggcaaggctttttagaggaggaggtggcatttgagtcaagtgttaaaggctgaatggaaattcactggttgagataaactccttaggaggaactactttaatagaacttgccgttagtcctgaaataaatggtgtgcaaaatcattaccatctgtcaattcactcagtctactttgctcttaacttcagaaaaaaatcagaaatacaattaaaacatttgagcctattttactgtcttttaaaatgagttaattcaaagaggaaattaaatataatgagagagaatctcccccgaggattgggggctggggaaatgctattgattctttgcttgtgtttattttctctcaaaaatacattatgcataaacttgatgatcaaaaattcagattattacatttctaaattggcaatgcaatttattgcatcatacatcaatcacaaaaatgctcatcttgctgactttcataaacttctaaatgaacaaaaatgcaaaaatagtttatactatattacactatagtagatttgttaaactaaaccagaacaatggtccatgaaaaataggcctctgactccaaacgctcacaccacaggatctctctgagatttttgtgtcatttcaagtcagagaaaattgtctaataaattgttggcttgtaacaatgaaaactaagatatctgtggggctattcttgttctcttcattttactacagcagctctgcccagtagaaataaaatgtgagccacatatgtaatttaaatttctctagtaggcacactgaaaaaataaaaataaagaagtgaaattaatttcaacagtatgttgtatataacccaatatacccaaaacattgtcattttaacatgtaattgttacaaaagttattaattagattttttccgttaagtatttaaaatctggtaagttttactcttacagcgcaactcagttcagatcagccacatttcaagtgctcagtagccatatgtgtctagtggttaccatattagaaagtagtttgagagatccacattaaaccaaaaggaaaagaacttccggcccttcactgatgagtcactcttcactgctaaccttggaagcattcccaaatgtagtctacagagtttaaatagtctatcttaacatctctcagggcttcagtcttaatgccatagtatttttaaagaatggtggatattcttttttacagaacactctgtaagagcaattagaagtttatgatgcacgtaatgcaaaatacaggtcatttcccaagcctattttaaaagcgcaaaaactgtagtcatttatcacccctgagaatgttgtcttaaatgtcttggtttggatattggtgatgtgagaactttgtgataagaaagtagtctttaagaataagatatcagactaaaattcatatctagaatgaaagtcttgtttttaatggaagattaagagcaagtctgattcagatcatgcatggggtacactagtctaggaaaacactagtctgaaaatatactaaaagttacttcgcaacttaacaagaaaatgtcttgtgggtgatgtcgttcttgatttttaggcaaacctacctacctttgcaaagcagctgggacctttttgcattggaagaatcatttggagcacaaacaaaattagattatcaacactttggaaaacaactacgaatgagcaatcagaaacctgaccttaagattacttgtgaattgtgaatcagcaaaataaactcgattgttcattgctaagtgtatttcaattatcaagggccttctagattataagtagtcttttttttttacttagtttacaattaagatgtgtggtatttgaaatacatttgccacagggagaaatataaattataattaatttcctaggctaattcaatttatgacatacctatatacattatctgtcatctataatttttcccttattgtttacttcccactggaagaatgaaaatggaatattattacatggcacatggcttgatacttttacaaactctgacaattatgtatttattttgggaggcattgagtttatttgttttatttatataaatttatgaggtacaagtataattttgttacatgcatagattgtgtaatggtcacgtcaggccttttagggtatccatcaccttaataagatgcattgtacccattaagtaatttctcactctcataaaattctaattatgtgaatttaatttaatctatttaatgtgttttaggcaaatatagccggtactataaacagttgattttaagatatcattgcttacattgagactaagtaaaacaaaatgggtcaataaatgtcaatctagataacaatgtcaactaaataagaggtcaaacatggcagtatttttgaaggtgatctgtgaaagtgattatagcgtttacactcatggaaaatgccttcagagtttcaactaagaatgccaacagctcattcctttatcctgatgcatattgtcttccttctcacccccagttccttcttcccctaacccctacccgctttcctttgctgattttgacagaaataggacccccaataagtcagggagatagcaggaaatgggataggatagaacccggaatgatagaatagctgagcctgaaggcatgaagaaaggctcctcctgacatctaaatggagacctaagagatgggttggtcaggtagggggaaggaaacatgaggagtattctctaagccaggcaacatactgtgcacaagtctgaagtcatgggaaagtgattttgagaggattgctgcttggtaaacctagagtttgaattgggagagatgaagctagaaagttagtaagggtcagattttttttttttttacttgcatgacaatggtaaaaaccactaaaggttctgtgttaagcagaggagtgacttcatttaaaaaggtaaattggattgaaatgaagggcataaactgaggcaaaaatatccttcgttaagttattgaagcccagttgaacacactggtggcttaaactggagtattggtataagtgggggaaagaggttaatagattccaagttgaaaaaaaaaaaaaaaaacatagactttgctatctagtaatggattaatatacaaaaggaaaaagtaaagtttctactttttggacagctagaaaccttcaccgaagtagggaacccaagacttagattatgttgggaggggcagggtattttagttgcacagggatttgctttacagaaatgactgaatgacaatatagagagatcaattccattaaaagaagtttgattactcacagttctcaagggaagagtacatactacgccatgcaaagccatgcaggaaaaaagttccagagtcggtcagcaggcagaaaaggaaagcacagcccaaaccctttattgtggtttccaaggaaaagaaatgagtgaggtagaataggcaagtctgagcaagtttaggactggatagttcaaataatttccaaaatttcctggctgtaaaagtggtctctggttgtctggtaccaagccctagggtgaggggaaaaagttagggtgggggaaatattggtttggtgtaacaacagttagatgaagaaggtagttggggatacggactttggattagttggtttgtataacgaaaagcaatccaacaaatccacaagggagcaagtttacaagttatttgctatctttaggaattagctagccctgggaggggcagtctctccctggccttccaaggacctcaagatgttcaagcatccataaaatatggaaattttttaaaaacattataaatacacagagtaaacgctgggcatgatataggacagtggttctcaaactttagctccactggaatctcctggaaaacttgttaatatgcagatgaccgttttacccttaagcttctaattggggaggtctggggagggcacagataatttgcatttctacaaagttcttccatgattttgatgccgctggtgagggaccaggctttgagaacactgatttaggacgtgtcctgtttagggaatatccaaaaggcggacaagttcagggaatattcttgggcagttggctgtgtgagtctgaaattcaggatagaatattaagctgaaataaagatttgggagcttatctacagtcaaatgataattgaaatactgagagtacggggggagagaggtccatgtaccaagaaaagtgaaaatgactaatcccaagcctcgctgaccattgagaatggagctaagtgagaggagttaacaaagctgacccagaaaaagtcataagggccttaggaggccaaggaaaaaaaatacattcactgccaacgagaggcacttacgaatggcttgactggctttgccagcatgcatgaactgcttcataattatttgtattgattacagtaacagatacatattttaacaagcaacttaagtaatacaactgatttttaattatcttgtttaaattgataaaggttgtatatattcatggtgtacaacatgatgttttgatatacccatacattgtggaatggctaaatcaagccaattatcgtatgcattacctcacatacactttatttgtggtgagaacacttagagtatactcttagcaagtatcaagtatataatacattgctgttaactatagtatccatgttgtacaataggtctcttgaacatactcctcctgtctaattgaaattgtgtttccttcgaacaactgatttttttaaataaaaaacttaatacctgtaagttagaattcttaatggtcaccttaggagcctatacaattattcctacgttgttgttactattctgtgtctttttcttttttaacatctttaaaggtatcaaatttttatattttgaaagtagaatttattttttgtcagtctaaaatatttttatgttgaacaaaatgcatgaatggtaaacctagatgcaatcaatttttcaaataaaaaaagtagatacccatgaacatttcttttgtaattgcaaactgtcttgaaaggcagtttcaaaaagagtttagttcctaaattgtaccattactcactgcgttaaaatgcaacattcatttgagcgtataaccttttgatcaatttgtttttgatgtcttgttccctgagagttgtctcaaatagatacatataaatatacacatatctcagattggctctgagaaatgtcttgattcaaacgttcttgattctaagattcatggtacataggaactgtatggtgacaaccttgtcagcctatctttagagtagctttggattctattcagaacatttcccaaagctattctgctatcaagaatataaacaggaatagtcaagggaagctttttaaagggcaacattttcatgtaggcatttttctcacattgaaaactagtttactaaatgcagtgtattaccttctcattacaagaagtctttcacattagtataaatgcatatggcagttgtgccagaaataaattgcctctcaaactagcacatggaaagaagaattctgagatttagcacatatgtagcttttaaatagtatactctgtttcaaacattatgtgttagtccacgttctcttcagccattttcagttgcatttttactttatattcctttgtatatttatctttgctaatcattgtcctgagattcctttagctcttgaattctacgtttttaattaatagaaaactttctttttatttttcccccgacatagttgttttctagaaagaaacagttataggttataaatccaacactttagggccgacttgaacatgcatcaaagctactagaggacttgtagaaatacagattgaatggtcccatgcctagagttttacattcagttacagatagggtaggacctgagaattcacattgctcacaaatttccagttgattttgatggcattggtctagagaccaaaccctgagaaccattaaaaaacaaacaaacaaaaacaaacaaaccaaaaaaaaaactatatacagagattttcttcattggcttttgccactgaagacatttagatgaagagactccacaaagtgtaatcatttagttatgagaggggcctgataatttgcatttctatcaaattcccaggggatactattgttgctgattgagaaccacacttggtgaaacactaattaaaataccattaaaaagcaaaaacaatttaggccagcaaaacctcctaaagaatgaggcctaaagacttattttgttttatttttgccagaagcttcttatgggcaaaattatcaccaacagagctgaggttcaaacttgtgttcatagcaagcaaaagggataatttggaaaaaaagctgaggttagctttgtggttggtttgggagtgggaatgagtagggaggaagaaatttaaaaaaaaaaaaaaaaggaagaagccaaatattaaattgttcacagggcgaaaaaagagaaaaggagtaactagaaatatcttagactggttcggcaagtcgggtccctcgcagctaacagtggtcccaccctctggagtttatatgtttacattctttttttttttttttttttttttgagacagggtctcactctgttgcctaggctggagtgcaatggtatgatcacagctcactgcaacctccacctcctgggctcgggtgatccccccaacctcagcctcccaagtagcagagactacaggcaagtgccaccatgtccagctaattttttgtatttttttgcagagatggggtttcaccagttgcctaggctggtctcaatctcctaggctcaagtgatctgcccacctcagcctcccaaagtgctgggattacaggtgtgagccaccgcgcctcattggagtttgcattctagttgggaaaatagccaataaatttgtgacttattttcctttaaaaaaaaaacttattctggctattgtgtgactataggatatggaaggtgcaagagtatgaggctaacaccctgttctaaattccgtctcctctgagccttgttctgtcaagaatctcctccttctatactttttaagtcaccttcctactgatcctttgctgtcagcttaccactctggtacccttcattttaacaaacaaacaattgtccaagcttaccggtgctgctccttcacccctccacctgtacctagtgtcaattctctccctcttctgatggccaaactttgtgaaactgtagcacagctccatatgtgttcctgcaaaggacatgatctcattcctttttatggctgcagagtattccacagtgtatatgtaccacattttctttatccagtctatcactgatgggcatttgggttgattccatgtctttgctattgtgaatagtgctgcagtgaacatacgtgtgcatgtatctttaaaatagaatggtttatattcctttgggtatataaccaataatgggattgctgggtcaaatggtatttctggttctagatctttgaggagctggaagccattatcctcagcaaactaacacaggaacagaaaagcaaatatcacatgttctcacttaaaagtgggagctgaacaatgagaacacatggactcatggaggggaacaacacacactgaggcctgtcggggggtggggcgaggggagggagagcattgggaaaaatagctaatgcatgctgggcttaatatctaggtgatgggcaatagcaaagacttggaaccaacccaaatgtccaacaatgatagactggattgagaaaatgtggcacatatacaccatggaatactatgcagccataaaaaaggatgagttcatgtcctttgtagggacatggatgaagctggaaaccatcattctcagcaaactatggcaaggacaaaaaaccaaacaccacatgttctcactcacaggtgggaattgaacaatgagaacacatggacacaggaaggggaacatcacacaccagggcctgttgtggggtcgggggaggggggagggatagcatttggagatacacctaatgttaactgacgagttactgggtgcagcacaccaacatggcacatgtatacatatgtaactaaccttcacgttgtgcatatggaccctaaaacttaaagtataataataaaatatatatatatatatctctaggtgatgggttaataggtgcagcaaaccaccatggcacatgtttacctatgtaacaaacctgcacatcctgcacatgtaccacggaacttaaaataaaaattaatcatagaactttaaaaaaagaaaagaaaatgtagcagagctgcctagctcaccttctttacccacagctcacttttcagtccatttatctggctattactcctaccgtgccaggcaaactgctctcactaagaaaatcaatagcctaccccctgccaaattgcctgactcagcttctccttgtaattttctcctttagttctctaacaccctcttccccaggttttcacctgacctgtctccataggacatttgagtctctttcctgatgattcatcctcagcctcttccataataagtatggctgctccccagatcctaccctcagcacttcttcactttccatgccacatctcttctgtgatctcatcttcatccacggctctaattagtatctataagcagatgactctcaaagcatatgctgcctatgtacccctcttggccattctacattgacatctgcaactccccagtgaacttctatatttagaccacaggactggtacctgctgataagcacaggtagggtgtactgagtagtgttttctctatttggttgggcttttgctaaagcagttgtcaaatattttgagtcttactcatggccacagacattttaacattagcatgtcccaaactgaaatcccctactgcctctattctctatttcagaagatggcaccaccatctacccaattatttaagctagaaacttctgattctggtgagacttctctcttttatgcatatgtctacactgacacaaaagactgcaaattttacctcctaagtctgtcttaaagcagatttttctctatgattctctatggtttcaggcccttatcactgtgaagtcaagcatacctgattcgaatcttgtcaccgttggcaaatttttaaatctcttctagcctcagtttcctcataaagttttctgtttcttagggtgactaaagggcttaaatgagattaccatacagagagtaaggtacataaaatgcaattaataaagaatagtcactataactgctgatgatgatgctattactattcgtatcctagaaaactccggtaacttgttcactggtctttctgcatctagcatcacttcctcagccagagttatcttctgacatgaaggctgatgccgtcacccccatactcatgtttgaaattcttcaatacctttaagataaattcccacctccttggtgtagcatgcaaggtcacacatgacataatctctccaaggccccatttcttccactctccttgagtgatatatgtggcagaaaatttaaggctgcctggatattatccaccttacgtcccaatacttccatctgccgcaaagaccttctacccaacttcccatcctcaacgaattcttattctttctttaaaaataacctcaaacttcagactagacctctggtccatagggcattacaaatctctcagtaagttgtacaggatgaacacgccccctaaaactttgtttcagatatttcaatttttattttattttattattattatactttaagttttagggtacatgtgcacaatgtgcaggttagttacatatgtatacatgtgccagatatttcagtgttaaaggtttaataatcacatttacagaaaaggaattagctacaaaatggtggcactggtatacaagtatgtaaagatacagtgcttacaatttaggattattgttgtcgatgttttaatattaaaatggctaatcatacagcaaagtcgaaagaaatttacggtcaacatctgtatacccagcacctatactttgccattgaaattttactatacttgatttattacatattcatctatccatccctctttctgtgatcaatttttaatattctaatactcttacccttaaataataagttatcttttcaaaaaataatgtgtttttacatagatgaagcaaaataaacttgcccttgataaaacaatatgcactgtagtgccttctaattcagtgcattgaagtatccattaacaatataaccagagaatataaaacatgtttattaatattccactgtacctgattagatatagaccattaggaagagttattataattaagaatctaggtttgtcaatatagaaaaaaacctgtgttttttatcccactggaatgtcttgtgaggaatattgttcccctttttctaaaatttaactttgacctttattttgttaatgcaccatgggttaagccacactacgacatgtgctaaatagacctggaagttttcaaactaggtttttaaagtgtatttgacattaaatcttcataacaccttattgattaatttaaatccattaccatggtaaggaaaattcgcagacaggcaggtgaaaattaaaatagaaacaaaacaacatggtaagcaatccttccccccaagccaatcagcatgtagtcagtgtgtccttttaaattagcaaggcgcagcttcccataaagtcccagcttgattttatatgctgcaatagtattgctaaaataaaggagaaggcaacttttctctataatttttttctagaagttttcacgcagcttagtatactgcaatgaccacattactcagttccagaattagcagcattccattgtgaatgacttaattcacattgtgattactcatttaacaacattcttgagggtttacaatgtgcaaagcattacattaagtcgtgtgtggcagaggttctcaaatgcagatgatctgtgaagaagatttcctcaataagcagagaaatgagaactataaggacagaaagagagagagagagaaagagaaattatttaagcttgtagcttgtcatcctcctttcttaggacagcctaccatttaggctgagactatgtctttctgattatttcttgtggttgaaataccccttccttaacaatatgatggtaacagtggatggtaaatcttgttttgttttaatagtttacctggcaaaagtatcattttatgtctgtatcagttatatataatagtatatcagtccattaccaaaccgcctcaaaactcagtagcttaaaacagtaggtacttcttgagttcactaatttgtgggctgatggtttacattgggtagtttatctgctctgactgggctcccttgggaatctggagggtagctgagagcttaagtgtctgaaagtggctgggtcaacacagctctatcgctcacatcttgaacatccctccagcaggctaaccagcccgagcaagtcctttttgtgaaggctgaggtgaagagtggaagtgcaaacatgtaaacaatttgttgagcccctgcttccattaagcctgcaatatccgattggctaaagcaagttttatttccccctgtggtaggcagaatcatgggcccctcgaagatgttaatccccagaacctgtgaatatgctgtgctccctggcagtagggaattaatattccagacggaattaaggttgctaagcaggtgactttgagatggggagattttatggactattcagatgggcctaatctaaccacagggttcatataagtgaaaatggaagcaggagagtgggagtcagagagatgaagatagcccctgctggctttgaagatagagaaaggggccattagccaaacaatgttggtagcatctaatgctggaaaaggcagggaaatagattgtcctctaagcttcttcagaaggagtatagccctgccaacactttcattttaatccatgaaacccatttcaaacttctgacttccaaaactataagataatcaatttgtgttgttttaggccagtaagtttatggaaaattgtcacagaagcaataggaaacaaatatacgctccattgttcaatcttttgaataacacatatactattatttacttaatgtttttcttaaaatcagctcattttgttttctgcttttagccttaagtgataattcccacaaaactgtagtctgatgttgcagtgtttttttccttaatacagataaaactaaatgaatattaaaatttaaactataagctgtttatctgtgtaacatggtaaattggctccctaccactactgttcagcaaaccacattttgggaaacagcgatttaggtggttcaaaggagcaagtgattgtgcaagaacaagaatttattagagaaagaagcatttggccaatgggtagaattgttggcagacaaaggtagaagagaaagacaaattattcagtatggctctagcgaactctttgcacttttatcacacaatctgaagcttgctaatcttgacatgtcttaatgttgttggattgctcattaaactggctgaaatgttcacaaagactctcacctgtcttctggcttaagctgagatttatcacacttcttggaaacatcttctggtctccagatctccctcagctaagctatacagtcagtctgttctgtaagaaagcccaaacttctctgcagtgttcctcagtctttttgatatcatgatgaacagattaagttgatgtgttcatcatgatatcaggtaagctggccgaagactctaagctgcctaaccatcccagggctgagagggatcgatatctgaagtacctataacccaatcagggcatgtgccttagcatacccattggaaagccctgttttagagcctttatcagctgtgaacttattgaaggcaatgattttgtcctgttaatcattctattcataattttcaacaagatacgtggttgttgttaataataattgttggttgaaatgaagttaaataaatagcaattgacttttccaaggtgacgcattgcacagatttatttatcttccctttgctgccctggagtaccagttgtatctaccaataagcttcatttataggccagcctcatcttagtttctgaattagtctaagtggctctggtagcgcatcaaaaatcttgctttctgatggtctttgtaatttgaattctgtgacttacagacttggtattcaatatgtcaggaataaacctggggtgtgcccaaatggtttgaaaaatcccagccttcctgatttcctctcttctctttctcccctggccaccctaatagtctgatagtttttgttatttggatactcctaaactcttggcaatttttcttacatctgttctctacaggctgtcacaagtgagtggaggcaggatggcatgggctgcagtggaaagaccaagaaaataagttaaaagccctgggttccagtaaatgctctgtagtgggatttagggcaagtctcttaacttctctcagcatcaatctccgcatctgtgaaataagattaatgacacctgtcttgcctatacttcaaggttgttttgaggttcacatgcattttccaccccatatagcctataaatctctgatgcctacagataacctataatgttctccagtaagtttaatatttccaggattttaaaactcaatgactagcactgctctgatctaacataacatattgtgtcaatatgtgtgggagtctctctggttgatgttaatggaagtttgtatagtttacctaaaatagaataaagctataatattaatatatatcatcgatgtgttttaggtgatttttttcaatataaaggcaattttggttcaaaattaggtagaacatttaatttttactaatttacaaataaaatgataacatcaaaagggccccttcttttaaagataagttgtaactctcacattgatagtaatctgtcatttaggacagggaatccatgtagtttgaaaattcattggcatcatggagctaaaacagtggctttttaaacatgtcgatttcagttttctttgttttacaagtcaagtagtgatattactgggtacatatgaagcatactgattgaccaaaaaatagtaacaaattttgtaaacccttcacttaaccattattcacctttcccagccacataagaatcctttctctttgtccttagattaattgcctttctttaaccttttcaattctaagtccagacaagctgctgtggttctttaaaaggccacacaaaataagtattgtccagtgctaacactctgaaatgtgatattgtaattactaccaagtgaacattaatcactactagattagaatggaattacctgttatattcacattaatagcaaatgagctttccctgattgatgttgttataatgaatacaaaaggaattaatagtgatctggcactcaccaaaagaggggtagtcattaaggacatgccatcaaaaggcgggtaatactttacaaaaaacaagtattaattaaagtaatatcacaacgaatgcctattgaataacttatatccacattacaaagatattatatggttgcgattaatgtgattgcaatacattttgtaaaaattaataatgactaaccctttaaaatatttaggaagcagatatttgtttatatttgctaaatagctatgccaactctttagcttttgtgagtgacttctagcataggaacagtgatggataatatgaagcactatatataataactcatcggccgggcgcggtggctcacgcctgtaatcccagcactttgggaggccgaggcgggcggatcacgaggtcaggagatcgacaccatcctggctaacacggtgaaaccctgtctctactaaaaacacaaaaaattagccgggcgtggtggtgggcgcctgtagtcccactactcaggaggcagagcttgcagtgagccaagattgcaccactgcactccagcctgggtgacagagtgagactctgtcaaaaaaaaacaacctcatatatttttacttgaaaacatacattttgcctttaggatttttacttgttagaatatcctaaaggacctataattgtaaatgtaaaattgactaatttctgggttttaaaaaaaagtatttgaaagctgatctgctgtgaacattgaaccagatgttaagaaaaatgctagtaagaaatgagacttgggagcaaagaagcagaactaaacttttcatatatggtttctatggagtaattgagaacgtacatattaacagggatacaaagtcaggccctctcattcaagatgctttctgtctttaaaaaaaaaaaaaagtaatttttgaaattttctgtggcaacagtcccatagcagaaagcaaagagttttgaattaagtgatcagaatatcattcttataattttactacactgaacattatttagaaaattttgaatgatattaaaaccgctataaaacatacttgcctaccataagacttaggatttaagccagattaaaataaatatttatttagaaggatgtatgtaagaactggtgaaatataaatgaggtctgtatttgagttaatagtattgtgccaatgtcagtttcctagctttgatgataatgtactatgggtatttaaaatgctatcattgggagaagctgggtaaaaggtgcgtgagaagtctctgtactatatttgcaagttttgtggtcttaaaccatttcaaagtaaagttattttagaaaatatctaaatatatattttagaaagtattatctttttctctgtaactagtggctaattagctcagtctgaaagagtatgtagaggtggaactgctaaatatatttctgatctagacttacttgatgatgcttgaattagtaagtgaatgttatgtgccaacatatgctatgatacatataaatatataagattaaatgataggagctaattatttcttggcatgttgcagtgggtccatttaaaactgtttatgtaggaaactactgtaattataaaaatgagcacagcccaacagcccagtatattagttgaaatataaaaggcgttgtgtccaagatttgaaatgccttacaataagcttggcacttacttaccttcacacaaagcagacacattttattgtgattttagtgttccatattatatggtacagtaccaaaggaaaactctaaaatatgtactcaaaatcctgatgtgcccttctttccaaacaggtggcaccacaatgaatataacctttagagttaatatctgaggacaaacccagcagttacaccagcatgatttaggtcctgctgttacaattattattattgtatttatttcacaattaagttgcagagttgagctcgatatagttccagctgtggcttttttttcaactgtctcaatagttcatagatatggccaaatgttcaataatagtgaaagcttatagtccacatattatttctgtagcaccaattttatgtgaaaaaatgatttatctaaatctcagagaatttccataactagttttgttatacatctacaaaactaagttaaaagaacagagcagactttttaaatagctagattggccaaatccacctcattatcatcaagaagatactgaaacaccgtgtttatacaacaagaccaggcattgtaaaagaggaggaaaggtagagacaaaatttatttagccctcaggaatctttcattctgatagtgtaaatttgacaactttagagggacttattaacatgtatcttatatatcttgataccgaatatatattttgtgattgcattagagccatgaaatattacacaggtcatttgaacatagcattttcatagagaaggtgacatttgcaaaagattaggagaaaagtaactacgattagaaaatcgtagttttattttgtctcttgagaatgaattgatgttaattttatgtctgatttggccaaatacgatgtggaatttgctaaagactgaaaaaagaagagacatcaaatagagggttgcaagttaacagaccatgttataattaaatgagggaaaaaaaagtagagttgttaaactcccagagaagtcatttccccttggtttggtgcatttcactttggtggtgaagtaaatgaccatatgggcacttttctagctctgtccgcaggtagcactgggtatttgtggacaaattacctagcttttcatagcactagtttccttgttgatagacttcagaattctaaattccattttacatccttatttctatgtttaacttaaagataatcctttgcagccgggcacagtggctcacacctgtaatcccagcactttgggaggccgaggcaggcggatcacgaggtcaggagatcgagaccatcctggctaacatggtgaaaccccatctctactgaaaatacaaaaaatcagccgggtgttgtggtgggcgcctgtggtcccagctactcaggaggctgaggcaggaggatggcatgaatccgggaggtggagcttgcggtgagccgagatcgagtcactgcactccagcccgggcaacagagccagactctgcctcaaaaaaaaaaaaaaacaaaaaaaaaaacaaacagatcatcctttgcactggaattatcctgcagtggaggatagtaatgaaagtgtagactctgtttctgaacactagctatgtcactttcaaactgtgtgattttccttcaagtttctcaatcactccaggtctggtttctaaatagaggaataggagtagagattaatattgtgaagattaaatgagaaaacttatataaagcacttagtacggtgccctgcatattgtgaaggcttggtatgttgttagtagattcattttattatcattattaataatactgaaccctggctgttgggggaattggttctatcctcctgtctcatagtcaaaataggttaaagggccttctatctcttatttctggtggtgcattataattactaatagtaatgtgcttcatttgtatatgatcctttatagtttacatggcgctgttttatgtaatcttactaaaatttcaaaaataattttaaaaagccagaattcacaagaatgtgactcggagaagaagtagatgtttttctaagtagatctttcagtttaactgattcaaattttctcatgtttcatatacatgattatcatgtcttttgataaacagaatgttaaccagagtacaaccttgtatgaacatatttattcagcttagaaaagatccagaggtacaaaatctagatcccagtgtagaagttagcatacacagtacaatttctagtatgtccataaacaatatgttaaagtattagtttgagccatataggattgccaatatctgagtgttatagagctacaaaattagtaggaaattttgttgctttaacctaatcattaaattagaattgtgtgacttaaagttacaaatggtttccgaatattttgcagtaaaaaagtagtgaggaaaataaatataaatactaaactagacctgggaaatttaaggctataaagaattctagcttacagagagaggagtctttgtttgcaacctcccactagctaaatttaaattatcacaaatttcatcctctcctttacttaacccttgactcatgcaactagtcaaatgtctttttcttgctaattttttctttccatagatcacttatagggagttctggttaaaaatgatgtctctttaaccttcactaaaatgagaataggggaattaaaatgatatttaccacaaagagaaaaaaatctgggaggaaaaacaataaaataaaaaagataaaaaatttaggaatatgcagagaatggaggagttagcatatcttggaaacctgaattccaagtacttagaacttgggaagtcctagaaatgtgaagcaccagctactgcagaaggcagagatgaatgtgaggtaagatagtgagactgtgaagagaaatcattcagtaaaaaatgcattatcaagccaactgccactggtctagtggagtttaatcccactggggaaattctaaatggattgaagacatgtgtttaagagttagttattctttcaaaggggcaagggagctggggtatttatacacaaaatcctgctagtcattggtttaggactgcttccaacgggggaattattttcctagcatttctggcataccaccttggcaagaaaaattattttgtgtccagagtatgtctaaagccattagggaaaaaaaatgtggatcctcatagttgaaagccaggccagtctgcactaaagtggtaaggatgttttcttttagagatacaggtctaagaaagaaatctgaaggtggttacctcttatgcaagaatttaatttgatggattcaaggtgtgttggttaagagaaatggggaagggttgcttctcatgactgcggcacgattctactatactaaatttttcttttattaagcagcattgccttatgcaatgataggaaacatttgttatatgtgaaatcacttttatttttattttttaatctattcctattcttttcatttttttaacttttattttaggtttgtggggtacatgtgaaggtttattacataggcaaaccggtgtcacaggggtccgttttacattttatttcaccaccgaggtattaagccaactactcagtagttatcttttctgctcctctctctcctcccggcatctcttttaaaagaaaataatttttagcaattctttagaataagtcttggccacctaaaggtttccaggactctagttcagggagtatttatctaagtcagtagttcttaacctgatataatttcatccccagagaacatttgacagtatctcaagaaattcttggttgtcacattgggggcggggatactgctgtcatcaagtgggcagaggccagggatgctgctcaacatgttgtaatgcacaagacagccccccacaacaaagaattatttggtccaatatgtcagtagtgccaagtttcagacatcctgctctaaatcaggactgtgatgtgaattctctgcgatgatgaagatattttatatccgtgatgtgcagtactgtagcatatggctactgagcaattgaaatatagctagtgtgactgtacaccaggtgtgatgttccataccgaggaaagaagtagaaataagatatagtctttgaagtcagagctcacaatctagtagcggagacagatttttaaaaattacaatattttaaaaatattgcaatagaacatggtaatgttagaagattaataacatgctaaatttgaggcatcaggactcagacagacaattaaaaattctctgaggtgaatttccacccttagctcagaatactgtaatgtttaaaagctgttttctatacacacacacacacacacacacacacacacacacacacacccctttaaatcttttatcatgtaactcattgcttcttattttacccttttgtcagagaatacatataaaatactggaatctgatgggacattctactttatttaacaatgctattgagtttctcaaaatagtttcctaagaaagtctattaaagtattgattttttcataaaggataatacaaatggcatgagtctgtttaacattttaatcaagcttaaaattagtcttgcatttgaaacaaacttgcccagagaaattgttgagaaacttaagagaaaaacatcataaaaaattgatgggccagccaggctgtgagaatattaaaatccaaatctaaattatggttaaccattgtcacatctttctttgaagcttaagtaactcgatattccctgtaggatacccagtgattcaaagtgacacatatactgtcagctcattttccttcccagcatgctggtacaatttgtatccatagaaatatatggaaaaacctattagtcttgagtgccagaacctaccaaaaggaatctttgtcatctacaaataaattaataacataagataaacaatcctattaagttatactggcccgaaaagggaaaaaagaccagtttatgaattgacaaaagaaggtaaatgagattagccatatagcaaccactcagataataatgtgttttctctgtttagtaaaaaagcatatttgagagaaaattttcccttatagaacaattcttaataatatacatagatactcctttcctgggatgtagagtttaatcctcccctaagcccctccatgaacttggtaacttacttccagataatagaatatggaaaagtaggaataacaatggagaagaaaccaggcaggcaccaagttaactaagtagtcaagtataacatcgccagtgataataatattgatatcatgtctcctgtgatatgatgtcatgaaaaggacatgttatctctctggtattcttccccaaaacctgtaacttcttctaatagggaaaatacttcagtcaaatcttaagagacttctagaatatacctgactagtcctattcaaaagtttcaaggtcatgaagaacaagaagaaactgagagactgtcacagactagaggagaccaaaaagacccaaggaccaaatgcagtaggagattctggattggatcctgaaacagaaaaatgacatgagtggaaaaactggtgaaatctgaataaagtctgtagttttgttaatagtgttgtatcagtgtttgtttaaatgtttagataaatctctcatgcgtacagaagagttatcattaggggaagctgtgtgtcaggcacttagaaaactttcagatacataggtaccttttgtaagtaaaataatgaattaatgggtcattttatgtctgtattttatataaggctacatttctaaagagacaaaattgtgagtcccataaaaatataaaatgaatatgtgtaaaacattttattagatcattaactgatgaaggaattagtaagatgttagttacagttggttcaaaggagagtctgaagaattggcatatatatatacgtatatatacgtatatatacgtatatacatatatatacgtatatacgtatatatacgtatatacatatatgtgtatatatatattttatatatatacacatatatatataaaaaacactctagaatgctgataggaattttataacagatacaatactgatcactaactgtagggcaggaatctattgcgttccatgagaaaattttactggcatctagtgaacaagaatcatttgtgtcaccatcagccctccacaaattgacttttaaacgtacagaattgcaaaatagcataaccaaagtctaaggtacagactcttagataatcagataactcctaaggttttcctaaggaattaaagggaaagagacattctcagattaaggaaaacaaagaatttcttgctagcaaatctgctcttaaagaatgacaaaaagacattctctaaacagaaaggaaattataacgaagtcttgacatttcagaaagaaaatagtagaatgggtaaaaatgagagtaaaataatagactatcctatttaccataagtttgaagtgaaaactttaacaccacctgatgtggttctcaatgtatgtagagaaaatacttaagagttatattttaaaagaagacatacctaagtggaagtaagagtccttctacacgtcacctgaagtcaattccagtagattgcaatgttaatgcgtatcgtaatgcctggaaagaccactaaaaaactatacaaagtgatacgttaagaaaatacaacaaataaattttgatggaatcttaagaaatgttcaaataacccacaagaaggtaagaaaaaagaaagagaagaatgagaaataaagaaaacaaacagaaaccaaataaggtggcagattgaagccctaatatatccataattaccttaaatgcaaatggtctaaatataccaattaaaagagatttagctgagtggattgataaaagctgagcacacaatatgccgtctaaaagaagtttatttcaaatacaacctaggtaggttaaaattaaaagaatcgaaaaagttacattatgcaacaattaatcaaaagaaagcagcagcagtaatgttaatatcagataaagtaggcttcattgcaaagaaaattactagtgacaaacagggacattacataaagattaagtgttaattcactgggaagacataataatcctaaatgtgtttgcacctaacaacagagcttccaaatacatgaagcaaaaatgaatagagctgaaaaaagaaacagacaaatccatatttctagttagggacttcaacactcctctctcttcagttgatagaactactaaatggaaaataagcaagggtaaagagaactgaacaacaccatcaaccaataggatctaattgaagcactcctcccaacagtagcagaatacacattactttaaagctctcatgaaacattcactgatataagccatattctggactccaagcaacttcagcaaatttagagaattcaacttatatgttcccagaacataatgaaaccaagctagaaatcaataagagaaagacaaaagaaaaacctcaaaacacttggaaatgaagcagcacacctttaaatcattttccccaggtcaaggaggaggttgcaaagaaaaattttttaaacacaaagaactaaataaaatgaaaataaaacatcaacatgagtgagattctgaagcaaagggcaagcatatctactgtctatttttaaagattaagcttccttaagctcagggtttctctcctgtgatgcaatccactgtgtgtacaggtgtctcctgaacttctttgggattactctgtgggaactggctcaataaaatgttggttctttgactactgctttgctgtgagtaatctagtctttttctctggcaaaaaaaaataaagtgagatgtcataaaagcagtattgagaataaaatgtatagcattagattatttagttagaagacaggaaaggtctaaaataaataaatgagcctagagacaaaaaccatcaacaaaatattaaataacatgcgtcaaagtttaaaaaaagagtgtcataccataactaactgggatttagtattgaaggctggctcaacatttgaaagttaattagtgtaatctaccatatcaacaaactaaagaagaaaaaatcatatgattatattgattgatgcagaagcatctgacaacacccagcatccattcatgataaaaactatgagaaaactgggaatagaggataacttccacatcttaataaagggtatctacagaaaactacagttaatagcataattttaataatggaaggcttaatgtttccacccatgattgctaattagggaaggatgcccaatttcactactcttttttaacatagttctggaagttccagacactacaataaagcaaggaaaaacaataaagcatgcatattgaaaagtataaaataaaattatttctatttgtggatggcatgactgtgtacgtagaaaatatcaaatattctacaaaaacaaaagcaaaaataaccaaaaatgctcatggagctgagaagagaggttaacaagatccaaaaatacaagatcaacacaccaaagctagtcacatttttatatacagatgctcctcatcttatgatgggcttacatttagataaacccatcataaagtcaaaaaatcataaggcaagccatcacaacttacggattatctatgttggaaatgaagatgtgaaaagtgaaattaaaaacacaacaccatttataattgcttatccaaaaatgaaatacgtaggtataaatctatcatacatgtacaggatcggtatgtagaaaattataaaatgctgatgaaaggcattaaaaacaacctaaataagtggattatatggcatgtttatagactggaagagtcagcatagcaaatatgtcagttcttctcaaatcaatctaaaggtttaatttagtttctatcaaaatcttatcaaggatttctgtacacatagacaagcatactctaaaatctataagaaaagtcacaggccacagaataactaaaacagtcttttaaaaaggtaaataaagtgggagtaacctctctacccaatattatggctaacaatatagtaaggctatcaatacagtatgatgttgctggagggatagactcatagaccaaatgaaacagaatagagaacccaaaaacagacccatgcaaatgtgcccaacagatttttgataaagttgcaaaagcaattcaatagagaaagctcaccttttcaacaaatggtcctgcagaaattggacatccctagagtgggaaaaaaaaagaacttcaacctaaatctcacaccttgtaaaaacttaattcaaaatagatcatggacttaaatgtaaaacataaaactatcaaaatttagggaaaaatgagaaaatcttcaggctctagggctagaattggcattgaaagcatgatccacacacagaaaaaaatcagttggactgcatcaagatttaaaacctttgcactgcaaaagacctgtgagggaggatgaaaagacaagctacagactgatagaaaatattttcaagccatatagccaaaagatggatgtctagaatatataaagaactctcaaaactgcaaggtaaaacaagaaacaaacaatgcaattaggaaatgggcaagacacatcaagaaacgtttcaccaaaaaggatatacagatagcaaataggtgcatgaaaagattatcaaaaacattagccattagagaaatgcaaattaaaattattatatattcctacacatctatcagaatggctaaaacaaagtagttacaacaccagatgctagcaaggatgtggagaaaatggatcattcacatattgctggtggaaatgtaaaatggtacagccactgtagcaaactgtttatcaattttctgtaaaactaaacatgcagctaccatacaacccagcaattgcactcttggacatttatcttacaacctgtacaaaaatattcataccaccattattcattatagccaaaaactggaaagaacccagacggtcaacaatgaatggttgtacaaactacggtacatccatacataccaggcaatactattcagcaataaaatggaatgaaatatttatacatgcaacaacttttagatcaatctccacagaattatgctgagtaaaaacagctcatctgaaaaggttacataatgaatgattctgtttatatagccgtcttgaagtgacagaattaaagaatgaagaacagattggtgattgcaaggagtccgggacaacaggggaaagagagagagagagatggatgtgactccaaaagggcaacacaggaggcatccttgtagtgttggaactgttctttaccttgattgtgtcaatgtcaatatcctggttatgatattgtactatatttttgcaaggttttaccttcagggagacggggtcaggggtatactggttttctctgtattatttctcacaactacatgtgaacatacaattatctcaaaactaaaagtgtaatttcaaaaaacaaataaaacaattcagaaattttaagacttcaacagtcatttatctcatttgttattttactgttgagaaaacaggcacaaagaaactgaagtgacttactttcatgcttcacctaagtctttttttcttttctccatcactcagttaagagcttctgtaatacagaaagtatgtcttgtattcttttaactcccatattacttcaagcaatgttgaacacatgttaacattgtaaaagttgttgtctgagtaaatgggaaagatagaggtctatgtctatatgcaaatactttgtattaacatgtttcagtctgatataactttccacacagaaagtacaaaagaagatctgttcaagttatctgatttaattaagatagtaaaaagaaagctgataatttagggggtcttatttgattgtttttaattttacttattttccactaggtgatcattttgatgattcaaaaatgaaaatttacaaaaaggtataaaataaaaattatttctcctacctctatgcactgtcgaatcaattcccctacccaccaccaatcagtattgtcagctgtttgtatatccttcaggagatatgtacgaatttcaagcgaatatgcataagtttatgttatgtatatgtgtgtgtctgttttctatatatatgcatctttacattaatggtagcatacgatacacattttcttctgaattatgcttctctctcaacaatgtttcttggacattttcctgtatcagtacataaagaatgtatttgtttcctatgactgcaatagtgaaataccacaaactggatgacttaaccaaaagaagtctgttgtcttacagttctggaggatagaagtctgagatcaaggtgtcaggagggttggttccttctgagggctcggaaggagaatctgttccattccattcccctagtttctgatggtttgttggcaatctttggtgctccttgtcctgtagatgtctgccttcattttcacatggcatgccccctgtgtacgtgtctgtctccaacttccccttttaaggacagagtcatattggactcaggcccaaccaaatgacctcattttaagttgattatctctgtaatgaccctatctccaaatagggtcacattctgaggtaccaggggttaggacttcaacatttaaatttggagaaaatttggacagaattcaacccatagcaaagaacttaaccgttagtttaatgactacatattgttccattttgtggatgtatcataatctatttaagcagtgctctgaacattttattggttttcactttcattgttttgccttaatattggtgtctgtttcatagaatagatttatagtattttaggcttatcaagattttatttaaatcttggaatttaaattccctgtaaatttcaagtgccttgaaggcaagatatattgaggaggggagacttttaaagttcatatgaaataataaataatcgcaagtatctcaggaatgcatgaaaaataataaatgtctctgcatcaataataagggagggggcttgccttatccaatattaaacttgctgtaaagctactgtaatccaaatagtatagtattagcacaaaacaagacaagtagatcactgaagcaaaattgagagtccagaagcagatcagattgtttttggaggccgggcatggtggcttacgcctgtaatcccagcactttgggagtctgaggtgggtggattacctgaggagttcaagaccagcctagccaacttggtgaaaccccgtctctactaaaaatacaaaaattagctgggcgtggtggtgggcgcctgtagtcccagctacttgggaggctgaggcaggagaatcgcttgaacccaggaggcggaggttgcagtgagccaagatcgcaccattgtactccagcctgggcaacaagagcgaaactccatctcaaaaaataaataaataaataaataaatagatacaaattgtttttggaaacattatatggcaaatgtgttattttaattcaaggaataaaggtgttttattcaataaatggtgccagcactctttgcaattcctcttagaaaacacagattgcctcctagcttatgcaatgtaagaatacatttcaaatgcattaaagttttaaatgtaaaaacaaaaattcttggaatgaggaagacgttttctaaacaagacacaaaactcaaaagctataaggaaaaaatataccttgttactgcttaaaataacagaagacaaagtcaaaagaaaaacagcaaatagagtagatgtattcgcaacatgtgacataaagagatgcatatacctaatatacaaatttctcctacaaatttgttaattaaattaatattttttaaaattcaaacaacccagtacaaaactggccgaagtataggaatatgcaattcccagaagaggatatccagatagctggaaaaataaaactatgataatatgcttcctcatagtagtaagggataggaaaataaagaaataagacaccatgtctatctaacaaatagacagaaattaagaatgataatttttaatggaagagagcactctcagatattgcagatgaaacgcaaattgctgtggtctttgaggaaagaaatgtggtatgatctacaaaaattttaaatgcacttaccttttgatcagtcactccatttctgagaatcaatactacagaaataaaagtaccagtatgaaaggctgtatgtagaggatgtgtattttggcattgtctatgatggtcaaaaagtagaaatcaagcaaatacccttcagtgtggaaattattgaatatgttatggaattatttgggcatcccagaatgaattattatttagtctagttagagctgtgtctactgtcctgaaagaatggtgatgatatctttcaaaaatcaaaacaagtttcaattaacatattccatttttaaaataaaaaagataaaattaatcttatgggattacataaccatgaaggaggaatggagagatatatactaggttatcagtatttgttaccttggattttcaaaggagaatgaaagaggaacaaataatgtatcaagtttcacaaaaagtgaaaaggtggaatataaatattactgcaaatatataaccattgaatatgtatatggacaaggacgataagataatatagaaaactgaatatgttggttttattatgaggtggttggattgaagatatttttgtctccaaatactgttgttttaatatgttgtgttttacaaagaaacatgggctgagcagacagggaagccctgataagcatagtacctgccatgtggccattcaataaatgatagttattgattattattattagagttgtagtacagtagtgcctaccttaatatatttagattgatgcccagcagcattgagttaacccgcattttaaggacaagtgttatagctattatatactaatggtaaacttgagtctgtaactagcactgttgaaggaggacaacagagtaatatgatgtgtattggcctggggatggaagggtggtgcttaaggcacagcagattttcactccagccaggtttccttaggacctctccaatgaacaggatacctcccttcctgttctttctaccctcccaccccgttttttgctttttcagtttcagcccaaaggggaaggaagtatgatgactgactccccatcagtccctgaggtgaactgggattttgggagagtgtggcagctgcaaatttggcttcctggagataggatttttgccctcaatctggagaaagttcctgaggctacagctgttcaagcttgtgaagtaggaactttgatcccttttttcaaaagttttgtataattagcatccaacttgttagacagtatgtggctcattacaagattgccacaaattcatgctgggccgtgtctaagaacagggcaaagggagcctttggaaagtgttatacagttgaccctcaaacaatgtgagggttaggggcgctgagcccaacacattgaaaaatctaagtagaacttttcactcccccaaaacgtaactactaataggctactgttgacagaagccatactgataacataaagagtgattagcgtatactttgcattgttatatgtaatatatactgtattcttgcaataaagtaagttagagaaaatacgatgttactaagaaaatcataaggaagagaaaaatatatttactattaattaagtggaagtggatcatcatataggtcttcattctcattatcttcacgttaagtaggctgaggaggtggagggagaggaggggttggtcttgctgccaatctaaatgctgggcccagccaatgggtataagttttaagtgtgcacatattggtgaacccttacagatcacggcactgtctgttcgagtgtctattttgaaatgtccctatccgtaatataagttgcaaaggagtttgtgggcccactgaattctaccaccctgatcattgtgaagcccattcagctttgtgaagagcttatcttggtactaccttagccaaggtatgataactcagacataatgtcttttctttcatggttccttttttagtgatcatagattcagttctgtaataattagagatttatgtgtcctattagtaattgcatcattctttaaagacagtgtcaaccttgctatacagtgtgattgaagccttgacataacttgggggtttgttggcattttgaaatcccaggccccacttcaaaactgttgaatcagaatctgcattgtaagaagatccccaaaagatctgcatgcacaagccttgaaagagaagagaagccatctaacattcctcacctaagatttgaagaatttcccacttatgcaagagtaggggtgtgatttctcaggcaggatatctaacagaaaacaacacttatgaagtgtttcctgtaggagctaagcaggtggccagaaaatggcaggctacaaaggagaagaatgactaggaacctgagcaaggagaaagtctcaaagacaaggaagtggctggcagtgtcagggactaccaggcagctgaaaaagctaggtgtgaacactatttcttggagttttcagcaagtaagaggttcatgatgatgcctcaaagaatttacagtggaaccagagccaagaagtcttattgtggtgagttgggaattagggaaagtgttatacagttgaccctcaaacagtgtgagggttcggggcgctgagccctaacctcaagtaagaggttcatgatgatgcaatcaaagaatttacactggaaccagagccaagaagtctttttttttttttttttttttttttgagacggagtttcgctctgtcgcccaggctggagtgcagtggcgcgatctcgactcactgcaagctccgcctcccgggttcacgccattctcctgcctcagcctcccgtgtagctgggactacaggcgcgcgccaccatgcccagctaatttttgtatttttagtagagacggggtttcaccgtgttagccaggatggtctcgatctcctgacctcgtgatccgcccgtctcggcctcccaaagtgctgggattacaggcgtgagccaccgcgcccggcagccaagaagtcttatggtggtgagttgagaagtagggaggtggaaataaggaatggagatgaagacatgaaaggaatttgagaaatgaggcaatagctagagaagaatataggaatacacagatccagcaacccagcaagggaagggctagattctgatttcatgagcaaattgcctactaattaaattcacaatatcagaggaaactgttggactcacttactgaataatagctgaaaagtatctttgctttatagagagatcactgtagatgaaagtcatcttccagtggtgagatattcttcagtgtcatctcttcatttttatttctaatttttcttaatttgaattatttcttctgataatgggaatgatgtggtaattttgtctctcctgtaaattattttaaagatttgtacgaactcctttggcaggcttgagtgtgttgtgacagcttggcttagatatgcattgaatgtcattgaattcaaactccttaccaacatagttagatagcccataggcattctacttgaccctttcaaggagatctggagatgcaattgtaggggaaaaaagaagaaaagaattcaagaagcaacaaagtgaaagataatttggcttgcagaagagaggtctttctatcacagtaataataatgccaattatatgtccatatatatatatacgcacacatatatatagtatatatatatacacatataactcagacataattctttcatagttctttcttttgtgcacagattcacttctgttataattacatacttatgtgacctatttgttagtaattgcttcagtttcttaaaagagcatcaccttgctgtgcaaagtgtgattgaagcctcaacatctcttgggagtttttttagaattttgaaatcccaggccccacttcagaactgttgaatcagaatccgccattgtaagacaatccccaagggatctgcacgcacgttgcagcttgagaagcactgcagtatcacacatatacacacatattcaacaccaaagagagagaaagaggtcataagctctcaggtggagactagttccatgtatatatgcatagagagaagaacaaactctaccttccagcaacgtaaaattctactcaatcatgtattcaccaaaaaagaaaaggctttctccatataatgtgtattattcatatattggcactcttcagagctcttcattccaccctaatgttatctttcttagataattcacatgacactttgttatcttccaataatttctgtcattgttataagcgaaattattcaggctttatctaagagagtaaatcaaacagtatgcctctctcattccaattctgcaatattttcattctagaatgtctaaaggagccttgaaagagaggagaagtcacctaaggccagctagaggggatatatagcagggaatggtggcaactccactcctcgtagcccagtggggttttttttttttccaatctgtatttgtatgtgagtatcacgtctatgccgattttatgtgtacatatgtaactcaaatctgttcattgtgctagttagaatcttatttccccctcttctactacactctaccctttctctttcccctcctttggcaaccaagacactgagttattaataagcagattggagcaaacattttgatgcactattgtttgatagatttgttggttcattcaataagcattaattgagcacttgctaagtgttaaacaatgtactaattgctagatttaaggatgaaaatgataaaacccttggcctctagagcctagagtgtagttggggagacaaatgggcaaattagtcacacgacaacatattccttgttaaaacagacagttgtgcataagtctgtatacccagactggagatgactctgtttccaatgttgccctgggaaacctcatgatcagtttaataatgatgtttggggtgagaggatactgagacagtttgcttctagcatagtaattacccatagaagtttggggtctttattcaaaagagtttacaggccacatgagccactgtcttgccttttataggatcacatctaagttccgtgtcatataatggccttggccttcttggctttctctgtgctctttgcctgccaataccctaattattgaagtactgtctcccgcagctcctcaaccatgagctgttcccgatcctcccagcagctatgtttctcctttcttcaaacctctttagctttttatttgtactttatttgtactaaattgtatttagagctttggagaacattcttcatagttgtaattagactgtaaagtcctgagaatgtatttttcatcttcgtagccccctgcagtatctagcagaatgcctttaaacaaatgggcagtaaataaatcccaacaaacttaaattaaatttctccaaattgcatatttaattttatagtggcatttactgataacatacattgaaataaaggccagagcataatcctctctgtttctgaatattatttatttaaatattaactttctaatccaattaggtctttcaatgacactttagatctaaatttatttttgcattgttttaaatgtcatcaaatgattcatctcttgtgttttttaatatttttggaacgaacgtgtgaaaatgagcaagtgtcatcagaatatgatgcttgggtttttttaattcaacatttctttgatcatatatttaaagactttttctcaattcctttctggatgtggcctcacaaatcatttcagaagtcaatccatttcaagatttttttttttttttttgcttttttcacttcacaggaagtcaagttcattctttaaaatgtagcaaatgattaagcaaattcaacgaatgatcttcatcaactccgaggtgtttttcccccttgaaaaatttaagttactattatttttttttctttttttttttttttgatacagagtctcactctgttacccaggctagagtgcagtggtgtgatctcggctcactgcaagctccacctcctgggttcacgccattctcctgcctcagcctcccgagcagctggtaccacaggcgcctgccaccatgtctggctaattttgtgcatttttagtagagatggggtttctccttgttagccaggatggtctcgatctcctgacctcgtgatccacccacctcggcctcccaaagtgctgggattacaggcgtgagccactgcgcccggccaattattattattttttttaaacttcacctatcataaatcttttaaaatttcacctatgataaacttcctctgtcatctggggaattacttaaatgcaatgatggccttcaagtatactaccaggcagcctatccaaatcatgaaacagaaaggctcatagaccaaattaaaatacttgaatcacagagtttattaaaatcacagtgagaagcaaacgggaaagatatgtgctaagttaacacgcttagaatagagtgtaagcagactgtgaagattagagtacttgaattctgcagtacacaacattatatgtcttgtctgtctctgtattgcatcagccttcccaattatggtgtgcttacaaggaccaaagttgacttcccaacaagggagtccaaaatgggtggtgcctgattcagtggcatgtggtttatcagagacacagagacaagaatgcatggccacagctgtaacttgccaaaatagcctgatgactagccatgtaattctcaggcagaagacttacggtgctggaataggtatcacctatggatgcctgaattaagaccttgtgaacattaagtgctcatgtgtatttatttgatcttgaatatttagtgcctcttgtatatttggtctcatgtgtatttagcatattatgaatatttagtacccaggtgcctcatgaatattgggtatcttttggtccttctatccctcactatctatgtttagtacacacatgctctgcttgctaactacttatcttctaattaacacattccaagagccaattatgtgtatctctttccactgagttcttcattcaatgacatcaagttagttgcttgaaatcagctattgtgagagcacttacaccacagaaattggcaaatgctacaattagcgccactgccctcccctagagccagttatttgacatttactagcattccactacttacatggcccttcatgctctcactccgtgtgaccactcaagccttatccctctttactgaactctacaatcaaataaaatatctttgtttcttgcttctggccctccatcaaatggctccctctcctaggaacaatctgtctctcctctatcacctttgtttagctagttaataatcccttttcagacagcacctcataaatagattcctgaacatcccaaaccggatctcctgcaccttcaatgtgctacttcagtacatttgtcttaccctttgccatatggtatttcaattgcccatgaatttgtattcctgtttagatcttaagctttgtgaggtctttttgtacttttttgtacttccgtatacctaccacataataaatatttaatgaaagcattaatgaataagtaagtgaatggagtgagtgaatgagtattcaattatgattcatttgtatcaaagtgataacatatacttacagggaaaaggccagagggggaaaaaataaaaaataataatatattttatgtatgaccttgtgtggggaaaggaacatagggccactgcctggcctgcttcttttatgcaaatcctaatgtaaaatatgatcaacgcctggctgggcagaaatacaaaaacccagtactagtgattctcccaaccagataccagctagtacagatcatagccagatttaactactgtgaagtggttaggttagaggtgacctataaggaaatgacgctaatgatcattagcatcatcttggaagcttaaaaaaatgccccagctgtaccccaagccaatgatatcagacttttgtggggaacccagatatcattgtttttaatctttaatgattccaatttagccaaagttgagtctcaacaaaccaagttcttcttactctcatattctcttcttctcgcatagataagaattaacagccagctcttctacatgtttcttagacacatatattgtttcagtggtaattcgttaacagtgcatatgtcagcaaagcatgactgaaaaaaatatctgctcccacacattctgatcccatcttgacactgcatagctgttggcgaaggcaatttcaacaatgaagaagtgggagaaatgactacattttatgtaaatatgtattcattgaaaatcaaaaggacatatgtaatgatattgtttaagattctaaatgaaggacaatacttaagagtcctctgtagtcaaatttctcagcagtaaaaaaacattgtcttttctttacaactattaaccatatggctgtgaaaatgttattctacaagcctttaagatttgaaatctgactttatgttaatacacagaatttaccacacaatcctgtatgatttctaagtagatttaaagagtagctattgctcaccttttcaacataatggtaatgatggtgcaatgtcaattacatgatactctcatgggcgtgattatatgattgttaacacactgaagtgcttatatagacatagatactgatttttatatgtacatatttaaaacaaacaaggacttaaaatggcctgtaaaagtctttctagtcagtctttctggttttggacagagaacaaataatcccttacagctgttaggttggtgcaaaagtaattgtggtctttgccattgcttttaatggtaaaaaaaacgcaattacttttgcaccaacctaatagttatctacttccatctttaacgggccctacccaagactgcatggtatataagtaagaaatgtaaatgaaaatctcaaatgctagatctgcccaggaggggaccactaatgagagaggaaatgttaacgtcccatatgaactaagctcagcttagcatttacccttcctgctattccgctagagcagtgcttctcaaaagttgacctgtaatggaatcttctgaatgcctttttaaaacgtagctggctgggccccatccccagagtttctgtgtcagttggtctgggatggggcctgagaatttgcatctctaacaagttctcaggggatgttgccggcccttgaatcacaacttaaaaacctctgctctgaagaaagggaaagctctctctgctggatttccccaagcctttttcagattttcaggagacttctgtgcggtagcttgcttccttctttccatactactactactaccactactactactacaaatagcaacctctagcatattttcagtactaaatacccagcactatatatacatcacaaaagtcccttgaggaaggtggtattatcatctccattctgcggataaggaaatagataagaaatttgctgaagatcgcagagccaaatgagactcaaacccatgtaacccatgtctgtttgactttaaagcccggaatcttaatttgttccagacaagctcattatgtgctctgatcttcaccactgaaatgttctgaatatgaggctgagggcagcagtgaggttggaaggagcagcccagaggagcaggcactgtgctggtagaatagtagtatggtggggcctgcactccctaataaaagaaggggacaatgactatttcctccttctccaaggtcgtgctgcctcccatttctctgtctgcctggtaagaagcagctctgggccatgtgtggtggctcacacttgtaatcccagtgctttgggaggctgaggcgggaggatctcttgagcccaggaaattaagaccaaccctagcaatctagtgggacttcatctctaataaaaataaaaaacttagctgggtgtggtggcacacacctataatcccaactactcaggaggctgaggtgggaggattgcttgagcttgggaagtcgaagctgcagtgagccgtggtctcaccactgcactccagcttgggcagcagggtgagaccctgtctccagaaaaacaaaaagcagcagctctgaaaagaggatctagcagtttctatatgcaggagagcatttgcgcaattgttcctggggttgaatctgagaaactcacagtgcacattcagatactatttacaatcttctaggaatagtataaatattgtggccagggcaccttcatattgtgaaacacaaaaagacttcagaccttagattatgtgtcgaaagttaggcaccaatgatttttttttccatttgttcttaagtggcaaatctttacattaacatttttggtacttgtctttagggaaatttcttctctgttctgaatgtatatattgtaattcctcatttacaattttgcctgcaaatgcaagtgagtacagatcatccagttatgaaaatgctctgagatttgagtctagctgtttcagctttaagagccctgacctagactttgaaactgacatggttttatatgtatgtggttggaattaaacccaaagcacatcttttaaaactctgaggaacttctgtgccacagctttcgctcagttggtgagattttactttgaaatttaagggatgagtctagtttatatgcaaagaaatgtagggagctttgcaaacccaatcaaatcctttgtgaacagtgtgtgcatctgtttattttgctgtcattttgagtccatgatcctgtatactgttttgtgggcacatattgagggtaatatcaaataccatgtagaacagatgctgcaggtatcctttccatgtcctcttagctttggggtggtagatgggcacatggaccaagcccaaagtgacagggtattaacaggagcaagactcaaccaataagggagagtagatgggtacaaatctcagctttctctcccctcactgggataattttgagatatattccaaagatcctcagagcatccccaacagcattgagccccagttccccagattagtaatctactcaataaatacctcttttttttttttttttcccgagatggagtctcactctgcaccctggctggagtgcagtggcacaatctcagctcactgcaacctccacctcccgagttcaagtgattctcctgcctcagcctcttgagtagctgggactacaggcatgcgccaccacacccaactaatttttgtatttttagtagagatggggtttcaccatttggccaggctggtctagaactcctgatctcaagtgatccgcccgccttggcctcccaaagtcctgggattacaggcatgagccaccacgcccagcccaataaagaactctggattgtttcttccttttcctctcctcctttcctgttccctacagtgtttcctaggatcacctcagtctgctgtatgggaaacccagactgagtcaccataacagacagaggcattgttactttaggactttagtggatatagttacatgggagagagagactgtgtatgtatatataacctttataatattaaaccatgctatactcaaattatttactggccaagatttccaatataaattggaaataaattggatataaatcaagaacagttaaaattggaaatagttaaaatacaaataaaatagctaaaattgggcaaaatacctgacccaatgctttaatatccgattgcataattaaacgagtaaagaggaaaggaaattattagcaactctatatttaaatgcaactgacatccaaggaagtcatgaagaaaactctttgtgttgataaactgaaggcctcttctagcagacttctgtgtttattgttctgttgctgactattttattccaaacaaatgaacttgcttgtcattataccccacccttccctagtacagggcccccattctttgaaacagtaactcattcagttccaaggagaatatgaaaagggagggtaatatataaaagaactgaaatgaaaagtggcctaagtgtggcacatttccattgtggattccatggcaatggagaattgatggcagagcatggtgagagatgtgaagcatcaattggctgtatctccagggaattcctgaagttcagttgccaccctggagggtggcaaatgctctctctcaccttccttgagttattgcttagatgactcaaaacaaaaaactgatgagctataaatgggctgtattatttgtttttacctgctgagtagttcagatatttcaaaataatctcaaacttaacctatggtgtggtttctgtgttaaacaaaataccgtaacttttagttgaaaatactgtgtaagcccacacaatctcttgttcacagataatcttgttgtcaaacattcatgatgacaaaaactcataaacgattcttttaaatatcaagaataacttatgctgtaagtcataatttcataagcatgaatttatgaatgtgttttgtgtttgcaattttcatttaggttgtcttaaaatcatgcgttttagcttaacttaggagaaatatatcttttgtgacaacataggatattcagagaaacgtgaaaactaggtgatgtgttttatgaaagaaggcataaagtatatcaagcataagaactttgaattctatttgtgttttttgtggctttagaaaagattgttctgggaatagagaattccatttgggaaacctagcacatacacagtagcagagttaaaatactgacttggagggttcatttgaagaattctatagaatttttgcatgttgggaataggtttatattcttaaacattgcactcagggtttctattcaaagcaaaaataactttgcatagaccttggccattctttcacattctaaagtaatccatttttttttttcagggtagttgttctcagtcctgattttctgataattcagatcatctttaatttacaccaaaaacttttagaagagtcagataataatttaacataaaatgtaaatgactgaaatatacattttttaaaggagcagatatggaggggtccaatgtacttaactatttgctctctttgtctccttgcattcacgggaatgtttctatgtagttttctaatttcacacaatttcaataatccataccctcctcatttttatgggccttcatgatactaaaaatgttaccagaaattattttgtgttagtctctttgtttagcacattcatacataagttttaacatttaactggcatatttttaaagtaatacatgttttttttttaaaaaaaatcagttatgtttgtgtgtgtgcatattttcttttgtggccaaatgttgcacgccctagtccttctatttaaacaatgagtttacataacaaatgttacatgataaacatgaagacatttagtttgaaaaaaaatgattttctagtttactcatttaaaaaaagctgaagtaaccgggaagaggagtggcagaacatattagtctttttcataatgccatcattaaacaaagatacttaatttccaggcctggtgcagtggcgcagcctgtaatcccagtactttgggaggctgaggagggcagatcacttgaggtcaggagttcgagaccagctttgccaatatggtgaaaccctgtctcaaaaaaaaaaaaaaaagaaaaagaaaaagctacataatttccaaaatgacttcagtgggacctgaggtgagggaataaaggctctggagtaatttcactctctattcctctcctaattttttttctgttcctttataacaacattttcactacttttgagcttgggagttgaggaatcatgaccagaagaaaaggaaagacgggaaagatgttcaagggtgaggatgcttaagaatgacctggcaagcttatgaaaatgcagttgtctggatcccaccacagagattctgatttagcaggtctgtggcaaggcctgcgattctgcattgctaaccagctcccaggtgatgacactcatgctggcaacctatgaaccattgagtggcactgttccagggggcagggcaatgagaaattgaagtcaaaagccccaagacctggtgctacgaaaatactctggttccttccctctcaactgatttacttgtcggtgtgattttgcaaaaatccctgaacttcttaaatcccagttacctcacctgaaaagtatgagtgttgctccagatctggaggctttcagaccatgcaaatcgaattcaaaccatgcaaaccattcaagtcattctagaaagttctgcaaggtgcctcagaggccaaagggagagatgggaagagggattgaatgggctctttccaaggttccctaacccacttgaatactttcatcttttatctctttcatatattccacttttgagtatggtttcatttagaaaataggattttataccaacagatttaaagaaaaactccaagtctgaaaatgactcatttatttaaaactgtatagaacaaagacatttagtgcacaattccaaaaattctctgatccttccacagcatgcccagtatgctgcaagagtgccagcaaacacatgcttactgctcacaaatgtgaaatttaaccccatgcactaggaggtccctagtgtggggtggttttagctaaccagactaagagagtacagggcaacatcgagcctttctctgcggtcatgtctgattcattaaaaatccagctttccccgaagatatattaattaccttctgtttcagaatttgtttttagagcctaattcttaattatatctccagccattgtgtgatttgaccattttggaactaaaaagttatcctatgaaattccacctccaactattgccacactgttagtttgtctatttcatacaccatgccaatcttagcgtggtgctagcatttcattataaccagctttcatttttaataagaccatgtgtatatgaaattgtagacttcagtctttgtatgaattgaaagctattaatcttcccagggttaggttatgttaaacagattgtaatgttcttctttttattatgttatttaaatccccttcatttcatactgcaccaatacatttctactatcttggaataaattaattccagttacgtgatggaaaattttagtgtaaaaatataacctgcagtataattttttctgtcagaataccaactagaactggtatgtttcattctaattggaaatttgagttatcgctttgatttttaacagtgggaaaggaaaatgaagattgatatctttcaatagccgttcattcattcttcattccttcattcattcacgtattaagaatagtctatgtgctaagaacagaaagagtgttagagatatgaagattaataagaccagatccctgcctgcaggcatttcctattctatgtcatagatagggggctattctgtttagaggtaaagcatgacccacattgcctctgacaagaagcataatgtctgtagcagctaactgctggagacaggaggctagagggctgccctggtaattggtattcaagtcttcaagaaaggaaaccagctattccaaaatcagtgggcaagaggaagttgtaaagttaagtgaaatgactaaaatatgaataactaaaggttggaatctggtagaaggagaggagagcatcggtcagcaccttagtttgggaaggtggtgtggccatagtaggctttatttagaaagaagcaattcttaggtaccagctaggtttcagttccttaaggggagaaaactggcaaaatataggcaggtttccagggtgcaaagccacgttctagcttcagctcaggcaaggccctggggtatgaatcaccaccagagtagcccagccaaaatgactaagggatctaagctggttgctaatgaaagaggttgcagctcaaggcagctctgctgacgcccactggatactgggattacattgatttaacacatggaaaccacttaatatggtatgtggcacaacacaattaagtactcataaatatttgcagataatgctgctgccattgctgtttttgtcgttagaagactcgggaaaatcatctaatacaggaatccatctgttggcggggcttgggcttctaatatttgactggttgatttttgtcgacccaatcttaacaatattatacacagccattacttcaggaaaggcagttgtaaagaatggtataaatttcctgtaacttgactgccacattctagctgagtcacctctatatacctcagtttctttgtatccgcagtgaagattaatgacctcatagggttgttattagaatgaagtgaattactacactggacttatttaggacagtaactcgcacatagtgagtgctcaaggaaatctcagaccctgcctgctagtggagggtccagctcctgatacatttgggggcaggtttaaggagttcattgatttagagctgtaagggctgatctttcaccctgcatgtcttcagcaactgtggctggtaaagtccagagcagtcaaaggctgacaaatccttgttagaaatcacaaatgcccattctcacaacttctgtggtgttttccatcctttccctagaatactttctttttaaggcaaaggaaagaataatcactgcagatagcacacagtatttttttgcaacatattttcaaaaattatgatgagaaaagtgtatcattcctgtgaagaaacagcataaggaaaatgatttgagaaagaaacatggttcttaaactgaaacaagtgtcagaaggaatcccagaaggcagaaggaaatatagtaatcatgatgaagtctagagctcacaccggttaacagaatggcagcagcgatattcatctcacgcctcttccatgctgtccctgagtgagcttctgctgaattgcctggctggtgaggattggtttcagcagcagaaggaatgggctgccagctgaaggctctggttctgatcctgggtagggtcagagaaagcaagatgtgaccatcacttttgaccttggtcttgaatttgattccatggaacaacgatattttacaaacccagttgaaggtttatccctttttctattcaacacagggagagtccttagagccccaggaagacttagccctttttcattctaagagtaaaccacatctaggtttccagagatgaaaagaccaggctctgatcttccttctggaagcccttgcctattcaacaagcatgagtattaaatgctattgccttggaatcataattcagttttcacagtttgggctatgtcagaaccattcttgtcaaccccctgttttctgagaacccgaaacctgcttgtttagaattttagaatctacttgactcttacaggggagaaaagatctcttttctcacccatcgctaggttcatggctgaggcacctataatgaaggacaaatcaacaacataaaagcatgcgaatttatttaatataagtttcacatgacacaggagccttcagaaatgacccaaagaatcagggaaaagtgtgtatttttatgctctgatttgaggaaaagtagatgtccagtatgactggacaaaggggaatggtaataaactggggtgaccacagcaaggcctgtttctgcagaacctcctgtgtccctgtgttttcagaggtaaaaattttcctttccttccagtatagtaagggcacctctggtatgatagtctcatgacctgcttcaggggagaagggggaaggggaaggtgagagtgaccatcctgcttctgctgtcttctcaaataccaagctgccatattgtggattttggagtagcgtaacttgaatccttttttttttttttttttgagacggagtctcaccctgtaacccaggctggagtgcaatggcacaatctcggctcactacaacctccacctcccaagttcaagtgattctcctgcctcagcctcccgagtaactgggattacaggcacatgccaccatgcctggcaaattttttgtatctttagtagagatggggtttcaccatgttagccggactggtcttgaactcctgacctcgtggtccgcccacttcggcctcccaaagtgctgagccaccgcacccagccgcatagcttgaatcttatcaataccttaaccaaatgactctgacagttttcctcttcttatctaaattcttgagggtcacccacacttcccaatgtcttttgaaacttgacctcttttctgctgaattgaggaagatacctgatttctttaacctcaccaaattcctacttcttactgttgttcattgctggctgaaaatttactttggcgagttcaccaagaacatacttatcggttcactgtttatatttgcactcaagataacacttgaggccctgctactcaaagaatttagtgacaactttcttcatcactctcatatcttatctgtcatcaagtctttttttcctcgtaaaaatgcttttagctctttaagtatgtttcatatctataatagctaagataggctaacagctataatatattaaacatccaccaaatggactattaaaatgacttaaacaaaatagaaatgtatttctttctcatgtaaacagtctaaggtgaattcatgttagttggtgttggatgtgtgtgtgggaagggaggggtgacacccacataattattcaagaatacaggccaggccaggtgcagtggctcacacctgtaatcccagcactttgggaggccaaggtgggcggatcacctgaggtcaggagctcgagaccatcctggccaacatgatgaaaccccatctctactaaaaatacaaaaaatagctaggagtggtggtgggcacctgtaatcccagctacttgggaggctgaagcaggagaatcacttgaagccgggaggcggaggttgcagtgagacaagatcatgccactgcactccagcctggcgacagagcaagactctatctaaaaaaaataaaataaaataaaaataaaaaataaaaaataaattaaaaaaaaaacaggccagcaagggtcttccatctgcaatagccaattgccgaggttgccctcctgaagatattcagccagcccaaaggggaatgagctagaggactgcacacggaggcgtcccatgtcctttgactcaaccttctactggctagaactctgccctgtggccacatgtaacagcagaggggctggaaaatgaagtctagctagatacctaaaaagaagcagagaaaggtttcaagagcatttagcaaccatatccaccttattcatgccctgccctctattcgcagtggccccgcagcactgctcaactagcttgctgcattggcctcttatctcttatctattgccttagatccatctaaatgctctgctactcttatgcctggaatatgttttcaagatgtgactaatcctctcacagcttgaaggataaaaggtcaaactgctctggtgaatgcatgatgcctggtcacctctgtagccccatcttccctgacactttcacagacagtattccctttactccaacctgtgggagtattttctaattcacaataatagcaggaaatacaatgtggaccagacacagttctgagcagtatattaactcatgcatttcttacgataactttataaggttgacagtagtagtatccctatttcacagagaaggaaagagatacagataagtaatttacatatgatctcacagatagtaagtggtacagcttgagtgcatatgactcaaagggtagaggttctagattcttaatcactgtattgtactacttctcccaatgttatcgtacatgccattccgtcttcctggaatacccttcgtctttcttcatctaacttccactcaaactttaaggatcaatttaagcatgccttattttaggtagccatggttgacatcagcctaatttaattgctactcatctatgtccccatagcgtcctttgcattcctctatatctctctgctatagcagtaaatgtaccaccattccgtaaaatccttaagggaatgtttagttttatgttcccaatgccagcacaatgtccagaacagtgttgtcccatagaaatgagagccacctatgtaatcttaagtattctagtagccacgttctttaaaagtagaagtgaaactaatattttattgaccctgatatatccaacatattattatttcaatatgtaatcaataaaaagtattaataaaatttgctttttccattctaagtctttgaaatctggcatgtgtctttcaattgcatcccatctcaatttggacaccgtattttcattgaaaatatttggtctcacctgcacacgtatgtttattgcggcactatttacagtagcaaagacttggaaccaacccaaatgtccatcaatgatagaccggattaagaaaatgtggcacatatatatcatggaatactatgcagccataaagaggatgagttcaagtcctttgtagggacgtggatgaagctggaaaccatcattctgagcaaactatcacaaggacagaaaaccaaacaccacatgttcttactcacaggcgggaattgagcaatgagaacacttggacacagggtggggaacatcacacaccagggcctgtcgtggggtggggggaggggggagggatagcgttaggagatatacctaatgtaaatgacgagttaatgggtgcagcacaccaacatggcacatgtatacatatgtaacaaacccgcacgttgtgcacatgtgccctagaacttaaagtataataaaaaaaaaagaaaatatttggtctctatttacatttcataaactttatagttgaaaaaagaagattcacattcctaagttgttccaaacatacacaaaagtttttcaataactgaaccaagagtcaatttttaaatttatatttaaatttaataaaatggaataaaaatttgttaaacttcagtctctccgtctcactagcctgatttcaattgctcggtagctacctacagccagtggctcctgtgttagacagagcagcacagccctagaacacagtagatcctaaatcgatgtttattgaagaaattaatcaatgacagtgtagaaaatttgcagtgattatgtcagaatcaatagttctccacccattttctcccacactctcaaaagggccaagttttatatcaccaaatgatattcctcttacttctttctgagcagaaacagttttggaaattaagatctttttcaaattttccagactcggcattttagcagcgtttctatttgtaccaacaatgcctttctacctattttccttgcttcttaataagttaactttgtgcgaaggtcattttgtaggtcagtgtaatattgtgcattaagggcttctaagttttctggtattataagaactccttggtttccttctacttttcagaatggaaaatcctcagagcaattttcatctaaaagtgctgcatttaggttgtttcacaattccccaaccctgagtcaaatataggttggtgtatgagcagcagtgtctcttggctaatcaagagcgtctccttttgctacgctcagtgttagagaaatggagaaagtcagctgggtttagagattaggtgagagactcaggcatatcctttgataagtcataaatcatttcctgtttagaaaagcacatgtttagacacccataaaatctccaaatgaagggtgttttacttttccttcaaaatctcactgggaaaaggtacttctgactttccaagtgaataaaaataatgactcctgattaccatgtatgtttaaactgatttgcaaagcaagtgaaaaagagtctagtgagtagtgataagcatcttttagacatcagaagatgtactgatttaaaggtccgtatcattttataactagtatctattgagattcaaatggttattactctgtgtgaatctgtcttttctaattgtttttacttattttagaatatcgatttgtgaatattaaattcctaagttttccagcaatccagtgtttgttttggatatccagcctggatgcagaatagctgcagaaagttatcacaaattgatctctatattctgtttccgagtggcaattgtcaaaaatttggggtcatcggctacccctcccacccctaagaagttccttgtacttcctctttcaaaacactcacatcattgttcagtgcctcacttctctactaaaatgtaaccaaccacaaagatagggactatgtctttcctgtttactggtggattctcagtatctagcaccatgaccaatgttaatagacgttgaatcaattccagttgttacctcttcacactgggacaaaagtccttgcaagtattctgctgccatttgtatagattcaagccaaatatgtctcaaaacgatattacagatgatctcttcgttgttcctctgacaatttctttcccccctgcattgcttaacttgattgacaatgacccctactacttataacatgtgccttttaggtagtgcacttggcactacattttatgtgatagttttatgatgctaaagactatttgctgtgatgatgctgtgttctcacatggcatatccagatttatttatgctggtgaccaaaggcaggtagttaaccttgaaaataggttaaaatttgaaaggcagcaaatcttagggctagaatttataatttatctttaaggaatcttgaaaccaggtgtgaaggaagggacgtaggctagaagtacagaaacctgggttctgctccagcactgatgttaagagcaagttgcattgcttttctggaccttaattttctcttctggaaaatgaatagattaactggaacaaggaaggaaaatacgtgaatggcttccgtttctgtctcgtttacccctgaaagacatggctagtcagtcagctctgtatcagagcacttctcaaggcaatgctccaggtagctaccactcactaatgagagttagcacataggtaaaacctctttgtcatctctaggctacttcatgtttaagatactctccagctttaaaattctaataactctattagactgaaatttaagaatacgagaataatcatccctcaccatgaagagagagtctgaggaaaaaataatgagaacgaataacccttctcttttactacaattcaggactgccatgaagagccgtccagattgtgaaacatacaactcatgatgtgaatggtacttctttgtttttctcggtgtacaacttgcacagctgttcatggccctctgcttccacaaattcatttctaaatagctgtacctcagttctttgacttctagtatgtctaatttaatacacatttctagatttacgatatataagaaatatctccatgaaggaaaaatgtaatagcccatgcttttcattataatagaattttatgaaacaatgtcttttaaaaacagaaacatatgtactactacttcgcaggacattagcccttgtatataaatcaataatacaaaaaattcaaattaccaaggattagaaaagactgctgtgggatatcttctggtgcaagcatacagttatttatccatttctttcatgaatatttattgatgttccaaacattaggctagacactagagacacatcaataaataaaggaaataggtttgatctctatcttctttgatctgtagtttagtgggggaggaaggaaattaaacaagtaactactacaggttgaacatccctgatccaaaaacctgaaatccaaatgttccaaattccaaaactgtttgaatgctgacatgacatcacaaatggaaaactccacttctgacctcatgtgacaagtcacagtgaaaatgcaggcacaccacatagagtttattcagcatccccaagggaagaaagatcctctcagcccccgttagctgtgatatatcttttccacccacacccagattccatcatacaagcaaacccacaaaaggtacgaaaaatggcacatgtgcgggctagacgcgacaacggcaggtaccctacaatgtccagcatggggccaaaacctacgtgcattaatcactgtgtttgctggtatattctctggtggtgtcaagatattgttgaaaatgccctaaaggcctgcatgatatccatagggtaatgcaaatattccaaaacctgaaatttgaaatactttcagtcgcaagtattttggatatgagatattcaacctatagatggtaagggtattactatgatagtgctacgggtgtacatcaaggtaattgaccctggcttggcaggatgcagaaggctttcccaaggaagccttacctcagctgagacctgaagagaagcaggagttagacaggtcaagttggggatttggaggaggtggagtcccagcagatggaatactatgcataaaggcctggaagtgagaaagtcatgtcatgttatttcaagggactagaggaagcttagcaaactggaggcaagaagatagcttcagcacactattgaaattgtccaggtgagtaatgatgatagtgtaactaagttgtgatacctaggtatgtgagctgaacctatggagaaatgttctaggctagagaatctttaattggatatttaattatcagtatatacgtaattaaaaccttgcaagggtttgaaatggttcagagtaaagttcgtagatgagaagagggcctaggagtgaacccaggaaaatggcaaagtttcaggggtaaataaagaaaaataagctttcagtggagacagggaaatttgcagttcagtagataggagacagactaggttcgtgtgatgtcacagaatccaagggaagagaggttttcaagaaaaagtaacatttagaggtgtcaaatactacaaaagcatcatgaaagataagaccaaaatatatcctattaatttagcaacaaggaaggtattgacaacctttatgcaagtgatttcagtgttgattatggagaactcagtaattacttggtggtaactaaagaaccaagattgcagtacgttcaggcatgattgagaattgagaaagtgggggagcaagtgtaaaacaattattttaagacttttggctgcgatgggaagagagaaagggccatagtagcagaagatggatgtaggggcaggaagaacacactcttaaaagggtagtgacttacacatgtttaaatggcaatgagaagaagatggtagagagggagaggttgaggatgcaggagaaattagagataatcaatagcacaggtacttgagaaggcagaaagatgaaatttagaaattagcttcagataggaaggaaagtacagcttctattacaacatcaggggagaagggaaggaggatgggcatagctactggtagttttgtaagtttggtgaaaggttaagtaggattgttgtattggatttattttttattgaagtggaagctgcagctaaatgcccagtgatgaggaaggtgttggagtctgagatttaaggtgagtggcaatttgaaatagctgctctaggatcctatttaacagagaaaatgttgagtacacaatcagtgagcagttttaagtccactctattctgtttgcagtttcaagtacctttcattgcttctaagtttatgaaaactggttcacaatcttcttgtgcttcttatttctacctcttttccttctgttttctcacctccccagtttaaacagtcccgaattttttacaattaaatatacagcaactgccatgaaatctactgataaaagatactgcaaaatcagtttgggattgggttcattagcttacttattattatcaatcctaggccactaagcaaccttgcataaaatgcataaaatgaggagattctagtggaggatagttttcaattatctcattaatttcaggccatgtgactagtccaaatagatattataggccaagaagagcctatcttgagattttaactcccaggataggttttctacctgatcaaaagaatctaataactattcaatctcttcttaaatggtttggttttctgtgcaaacagttttacccttttagctgattttctaggtgttaaattaagaaaattctctcagatacttgttcatcatgtactaggatccctgatgtgttcagagttgtccaactttcaaagggctttgcattcagagtacctaatctaaaccctgatatcattcttttataacagaaaaccccggattagactgggacagtgtctgtcatgttcatcactgcatctccctcagtatttgtagaatgaatgaagggacaatggcaaactatagtcctaccatcacacttttggtagtgaggagaactgctgtaacttggaagattggagggggaaaaggtggctaaaacaatcatacagtaaactgggctgctatcaagagaaaccatttgtcaattttggcttttgttgccattgcttttggtgttttggacatgaagtccttgcccacgcctatgtcctgaatggtaatgcctaggttttcttctagggtttttatggttttaggtctaacgtttaaatctttaatccatcttgaattgatttttgtataaggtgtaaggaagggatccagtttcagctttctacatatggctagccagttttcccagcaccatttattaaatagggaatcctttccccattgcttgtttttctcaggtttgtcaaagatcagatagttgtagatatgcggcattatttctgagggctctgttctgttccattgatctatatctctgttttggtaccagtaccatgctgttttggttactgtagccttgtagtatagtttgaagtcaggtagtgtgatgcctccagctttgttcttttggcttaggattgacttggcgatgcgggctcttttttggttccatatgaactttaaagtagttttttccaattctgtgaagaaagtcattggtagcttgatggggatggcattgaatctgtaaattaccttgggcagtatggccattttcacgatattgattcttcctacccatgagcatggaatattcttccatttgtttgtgtcctcttttatttccttgagcagtggtttgtagttctccttgaagaggtccttcacatcccttgtaagttggattcctaggtattttattctctttgaagcaattgtgaatgggagttcactcatgatttggctctctgtttgtctgttgttggtgtataagaatgcttgtgattttagtacattgattttgtatcctgagactttgctgaagttgcttatcagcttaaggagattttgggctgagacgatggggttttctagataaacaatcatgtcgtctgcaaacagggacaatttgacttcctcttttcctaattgaataccctttatttccttctcctgcctgattgccctggccagaacttccaacactatgttgaataggagtggtgagagagggcatccctgtcttgtgccagtttttaaagggaatgcttccagtttttgcccattcagtatgatattggctgtgggtttgtcatagatagctcttattattttgaaatacgtcccatcaatacctaatttattgagagtttttagcatgaagggttgttgaattttgtcaaaggctttttctgcatctattgagataatcatgtggtttttgtctttggctctgtttatatgctggattacatttattgatttgcgtatattgaaccagccttgcatcccagggatgaagcccacttgatcatggtggataagctttttgatgtgctgctggattcggtttgccagtattttattgaggagttttgcatcaatgttcatcaaggatattggtctaaaattctcttttttggttgtgtctctgcccggctttggtatcagaatgatgctggcctcataaaatgagttagggaggattccctctttttctattgattggaatagtttcagaaggaatggtaccagttcctccttgtacctctggtagaattcggctgtgaatccatctggtcctggactctttttggttggtaaaatattgattattgccacaatttcagagcctgttattggtctattcagagattcaacttcttcctggtttagtcttgggagagtgtatgtgtcgaggaatgtatccatttcttctagattttctagtttatttgcatagaggtgtttgtagtattctctgatggtagtttgtatttctgtgggatcggtggtgatatcccctttatcattttttattgtgtctatttgattcttctctctttttttctttattagtcttgctagcggtctatcaattttgttgatcctttcaaaaaaccagctcctggattcattgattttttgaagggttttttgtgtctctatttccttcagttctgctctgattttagttatttcttgccttctgctagcttttgaatgtgtttgctcttgcttttctagttcttttaattgtgatgttagggtgtcaattttggatctttcctgctttctcttgtaggcatttagtgctataaatttccctctacacactgctttgaatgcgtcccagagattctggtatgtggtgtctttgttctcgttggtttcaaagaacatctttatttctgccttcatttcgttatgtacccagtagtcattcaggagcaggttgttcagtttccatgtagttgagcggctttgagtgagattcttaatcctgagttctagtttgattgcactgtggtctgagagatagtttgttataatttctgttcttttacatttgctgaggagagctttacttccaagtatgtggtcaattttggaataggtgtggtgtggtgctgaaaaaaatgtatattctgttgatttggggtggagagttctgtagatgtctattaggtctccttggtgcagagctgagttcaattcctgggtatccttgttgactttctgtctcgttgatctgtctaatgttgacagtggggtgttaaagtctcccattattaatgtgtgggagtctaagtctctttgtaggtcactcaggacttgctttatgaatctgggtgctcctgtattgggtgcataaatatttaggatagttagctcctcttgttgaattgatccctttaccattatgtaatggccttctttgtctcttttgatctttgttggtttaaagtctgttttatcagagactaggattgcaacccctgcctttttttgttttccatttgcttggtagatcttcctccatccttttattttgagcctatgtgtgtctctgcacgtgagatgggtttcctgaatacagcacactgatgggtcttgactctttatccaacttgccagtctgtgtcttttaattgcagaatttagtccatttatatttaaagttaatattgttatgtgtgaatttgatcctgtcattatgatgttagctggtgattttgctcattagttgatgcagtttcttcctagtctcgatggtctttacattttggcatgattttgcagcggctggtaccggttgttcctttccatgtttagcgcttccttcaggagctcttttagggcaggcctggtggtgacaaaatctctcagcatttgcttgtctataaagtattttatttctccttcacttatgaagcttagtttggctggatatgaaattctgggttgaaaattcttttctttaagaatgttgaatattggcccccactctcttctggcttgtagggtttctgccgagagatccgctgttagtctgatgggctttcctttgagggtaactcgacctttctctctggctgcccttaacattttttccttcatttcaacttggtgaatctgacaattatgtgtcttggagttgctcttctcgaggagtatctttgtggcgttctctgtatttcctgaatctgaacgttggcctgccttactagattggggaagttctcctggataatatcctgcagagtgttttccaacttggttccattctccacatcactttcaggtacaccaatcagacgtagatttggtcttttcacatagtcccatatttcttggaggctttgctcatttctttttattcttttttctctaaacttcccttctcgcttcatttcattcatttcatcttccattgctgataccctttcttccagttgatcgcatcggctcctgaggcttctgcattcttcacgtagttctcgagccttggttttcagctccatcagctcctttaagcacttctctgtattcgttattctagttatacattcttctaaatttttttcaaagtttttcaaaagcaatggcaacaaaagccaaaattgacaaatgggatctaattaaactcaagagcttctgcacagcaaaagaaactaccatcagagtgaacaggcaacctacaacatgggagaaaatttccgcaacctactcatctgacaaagggctaatatccagaatctacaatgaactcaaacaaatttacaagaaaaaaacaaacaaccccatcaaaaagtgggcgaaggacatgaacagacacttctcaaaagaagacatttatgcagccaaaaaacacatgaagaaatgctcatcatcactggccatcagagaaatgcaaatcaaaaccactatgagatatcatctcacaccagttagaatggcaatcattaaaaagtcaggaaacaacaggtgctggagaggatgtggagaaataggaacactcttacactgttggtgggactgtaaactagttcaaccattgtggaagtcagtgtggcgattcctcagggatctagaactagaaataccatttgacccagccatcccattactgggtatatacccaaaggactataaatcatgctgctataaagacacatgcacacgtatgtttattgcggcactattcacaatagcaaagacttggaaccaacccaaatgtccaacaatgatagactggattaagaaaatgtggcacatatccaccatggaatactatgcagccataaaaaatgatgagttcatgtccgttgtagggacatggatgaaattggaaaccatcattctcagtaaactatcgcaagaacaaaaaaccaaacaccgcatattctcactcataggtgggaattgaacaatgagatcacatggacacaggaaggggaatatcacactctggggactgtggtggggtcgggggaggggggagggatagcattgggagatatacctaatgctagatgacacgttagtgggtgcagcgcaccagcatggcacatgtatacatatgtaactaacctgcacaatgtgcacatgtaccctaaaacttagagtataataaaaaaaaaaaaaaaattaaaaaaaaaaaaaaaaaaaaaagagaaaccagtgctctattatctaggtatataccaaggttacccactgcttgactctcattattagccttctttgatgttctctggtacttgatgtctttcataactaatcaatgtattaatgtatccaatcatttactcgataactttattgaaagcaaaagcagttgcataccagctatcaagctggaagtgggagatacagccgcagacaaggcagatatggtcccagcccttaggagctcccagagtagcaggaggtttccccttccagtgtcttctctctgcttttcttcaaaaggaaaaggctgatgtgtataatataccatatctctttgaagttctctgattatggattttaggtttaaaccagttcttcatccatgactttataaattgaaaatccaggattttgctgtgttgttgtgttcttgttttgttttgatgtccctgttttctctagatacagttagaaatgtctaggaagaaatttttggttagtatgggagccccacaaagccatttttttaaacataaaatctgtattacatatcaggtatgaaatacagggggaatgaatcatttctccgtaaaggaaaatttaaagtaaatttcaggaaagtgaattctttcccgtttgcattaccgacagatgcagaaactttaatcgtcatttgctaagagggatatggcagataatacacaatagatgtcgtagcaacattcactcgcattctttttttttttttttaaagaaatctttctttcaagaagctattctaggatctttctcatgacagtgtcctagttcttatctttgctacacacaggctcacaaagtgttttctttgaagggcattttgttattggccctcttttcatttttcttttccgtagcaaacagaaccgaaggtgtttactccccacggtgagagggcacctgggtgcacaaacagtggtgtgaaccactggcctttctctgctttccgttccctgaatgtaagaaacaggtgcagtgatcaattcactgcgtgcagtgaaccccaggcagaaagagaacgtcgtgtcacagaccttttgttacttggagagaatgagcgggaagaaaggctgcctctgctgctactgagacccttttgcccattttattgactgctataggttcatctatcctaatttgtctccggctgtcccagtttatccctgttattcttgtgttactttactttactatattttattttattttattttatttattttagagacagagtcttgctctgtcacccaggctggagtggagtggcatgatcatagctcactgcagcctcaaactcctgagctcaagcaatcctcctccttcagcctactgagtagccaggattatagctgtgcaccactatgcccacctaattttttttttttttgaaatggagtctcgctctgtcacccaagctgcagtgcagtggtgcgatctcggctcactgcaacctccacctcccgggttcaagcgattctcctgcctcagcctcctgagtagctgggattacaggtgcccaccaccatgccctgctaatttttgtatttttagtagagacagagtttcgccatgttggccaggctgttctcaaactcctttaactgtttttttatttttatttttaatttttaaaacatattgtagagataagagtcatgctacattgcccaggctgatctcaaactcctggcttcaagcaatactcctacctcggcctcccaaagcacctggattacaggcatgagccagtgtgcctgaccctgtgtgattattattagcatcctggacactctcaaaagtgttcaggtttggacaatgaactataggatcaccctaattacatgagattaagagtagagaccttgaccaccagaaatggtcaatactcaccatatattttcttcctgatgttagaacctggtacttttgggaaatgaaattgtacatgagatatatgcagaatgggcgaagggagcgaaaagatttaaaaaattaagctcgatttattgagcgcctcgagtgcgctcagtgctgttccaagtgctgacagcagagaggtaagttctgttctccagtgttcacctcacacgtgcaagccaggtttgaaaacacactgtctttccttagtatccctccacccctccatgtgactatacgtatgtatcaagtttgtgatatttcacttctgggcttcttttcatttggaaatttaatgtcagtgtatcatgttttaattaataggacatcatgttatgaaactgttgaatcgaatattttccctaggcatcaaattacttgtcagtggaaatttgacatctagatatgagggacaaaagagatgagaaaaataatagtaaagtgttcctaaaggatgctggtatactgtttaggtattttaatgcactgttacaacctaaagtgtcttgtaaagtatgttctttagaaataaaataaataaaacaagacatctctccataggtacaaatccacttgccttcctcaattcctatccttctgtgatgggaaatctctgctgtgacaaagaaccatgttaagaaaaccataaagttgtattgtttgtagatttttttaatgactaaaggaagatattgcaagtagtagaaacaaatagaggaggtggccctgaaggtcaatataacggagttcactgcagaaaagagaaactactctaggtacgttagacacatatcaaagttttggaaaggctaaagtagcaggttttagacttggcttcgaggacagatttctaaaactatatagaactgatccaataagaaactaccatctccggggtaccactgaagcaatgatttcaagaacatactttgtaaataggaactaggaaccaggaggttgaaatctagacgctaccacttttgaagctgctgttagcaactgcccttctccagccaggaagctggagaaagaactttggaactctgatgtaggaaatctcatgtttctttgactaagctcgccaacagaaatagccaaaaggggcagaaaggtgacctatgcctcacttccactttccagatctctcacaagtatacacatttggcaaaacgttgccagatttagcaaataaaaataatgcatgcaacatacttaacactaaataaaaaaagattgtgtagaaaatttaaatttaactgggtgccttgtattttatctgacaaccctaacttattatatcctaattcataatcagaacactagctgcatggaagtctggcaaatacagtttttaatttccaacctgtccaactggaaggatggtaagtagatttaggtgagccagttcacagtattaaccaaagtagattgcctaccaagaatagctaaagcctttctgcccccagacgcttatgctaccatctgaatatttttactttgcattcttatattcttggaaatcctatcaatctgtgattcagattggtttggtttaactcagcttccccttttttttggagacagggtcataccctgtcacccaggctggagtgcagtggcacaatcatggctcactgcaacttcgacatccctgggctcaggtgatcctccctcccacctcagcctcccaagtggctgggactacaggcacgtgccaccacaccccgctactttttgtattttctgtagaaacagagtttcgccacattgcctaagctggtctcagattcctgggctgaagtgatccacccaccttggcctgacaacgtgctggaattacagatgtgagccaccatgcccagcccctctttttaaaatataaaaatctcccagaatgtgaaagttgtcagtctatactttgggaataagattttcaacagatagaagagaatgaggattaaaacataaggaagtttgggagtagaaaatatgggcaccagaaggtggaaggagagagcagatgcccatttatatatctcctttgttgggtgttggacaaatccaggtcttaaaataggaagtatttcttttccgtacttcttgaatctttcatatcccaaaagatgcatatttcccaaatcatataacccaaagtcatgctatcaaaatgatataaatcatccatggtataggttaaatagctatatatgtatatgctggtctgagacatgtatatgactattgtgtccatggaaatttgagtttggggttctggaccatttatttgcaagtgatttttggttagagaactctttgtaagttggggattgcttttacttattttatgagtaaagatgtcaaaaggatgactgctaaatttgcactgtgttaattcactatttagtgagaagaaatattagactagctatgaaaagtaaaactgcctctccaaaaagtcaaagctgatgaaaaacagtcatacaagcacaatgccgctcttcggaaacatggaaacactttttccttcccaattttccctcagattttctcttccgcatttaaaacacttgggtggttcaagtttctaggctaccactgattgtaacagcaaacagtagcaactggaagcagtgggatgttgggagaagtaatagaggtagctgctacccaagttatcctggaggattttccatggcaatgaaatcaggtagtagaagcttggctaactgagtgtaagcaaacagttctactgagaatggtgttgtcttttcaatccgtttatctgtgatggtgatagtgtgaaacaggggaattttatccaaggtttaaggaaggttatttggttaaaagaggatattgttacagtgaagtcaaactttccattaactttttgctgtaacaacagattgaacgtagcatttcaccgtcaacgagtaaagtgaaatttacagattaacttatgtgcctcttttaaaatatatcagatttctaaattgcttttatttcagaggtatgggaggttcactttctctttgaaagtgtacattatttttctagtgtcttacatctgcctacaaagatgttattttacttgaaagcacagtaactatttgatgagaatttgtcagcatcagtaaattaaagaccctcaaatgatttctactaattatagtttaattccgtacatttaatgatattttaaaacacatgagttatttcataactcccaacatcacaaggataaattttattctacaaacaaaatattgtgctaaatgaaatagttcatttaggcaaagaaaggagcacagaaaattagtggaactctctgctgtaagtaacgtagacattacatggcatattgagtctccatgaatattgtcatgttatgttttaaaaaggtgatcgaacatatggcatttaaaagttccaagtcctcttttaaatgcttcagaatctattatttaatgatcatcttggatctcaaaactgatcttttgaaagattttattcgccccatgtgttaatatgatttccctgtcatatgatatgattatctatcaatacttaaaaccagcagccaagtaaaaaatcagttcatatcatttaatgaatactatgagtcaggatctgggtaggcaagctattttcgggtttgagtagttccaaagcttaaaaatcttatattgattttacagtgaagaagaaatagtcttagctactttggaggtttcaaacattgactactcaaggagtatttccttgctttctcaggcaccaggcagtttttcaggagcaagcattcatccattcagggaattgtaacctgtagtttccacttttctagcaatcacacttaaaaccatgagagtaggccataggacataaggagctcagcttctcagggcaagcacatcctttcagctttcacctgtccgtttgttagtgttcacttccgtgctcaaggagtttcttgttgcctctgagttctaagagacagaacgaagggagaagggtgcagaagtctaacgcatgttcatggacttatctctccaataaagagcttgttttatcttcttttatttatttattttttctaatgaagccattagcctcaaacaaagccatggaatcttatcagagtgaaaccggggtcattccataggctggctgagtgagagctccatggcacgatgatgtatggtcactgcacaacaacgcctttgccacaacacatgtgccttttaattacactttaaatctcatttgaagagatgttatcattatggaaattgctctgtaaatgtgcccaggatgagacccaataaaagtttgctgagaagaattgaagacagaggagatgaatcagcagctaaaacattaccatcagacagaattttcttggctgtaggcaaaacagcccatgcaataacagaaaatcttcattgactcagaggcgtattttccctagattattatggggcactcctgcctgtagcactatcacttctttgataagctgaaggaagcgttctgctctccagctcagcgggcctttttctccccaacctcagagccatcatttgaatttatagttgccaaaatgaataatacagtattgcccttgtgttcctgacttcatgcatgcatgcagagcggggttaaggttctttaaatgaaagattgccttctattcatgcaataaagaacacctctgcttcctttccagggtcatttaaaaataactataccgctgggctatggaaagcacataagaaagattcttagggtaaagtcaaaatgctcttttctctacaacaggcattgtctcatatctttgtgtagcacagctgatttgaagttttcttttaagcacattcttaattatcttttcctttgatcttgaactgtttccctgggctaccagacagagagcctagagccctacctccgctttccccgaggtgcaaactgctccgtccttccacaggcaggcccctggctgaatgcacccttttctccatggttacccacccacctctctgttatttgttacttcccaagtgaatggcaggttaaaatgggaaaaggtcaggttatctgaatgtggttagagtgaaatgaatttcctcattgcacccaagaactgtcctttgacaggtctccttccccaaatcgggtcattttgtacgtaggctcactgggagtaattctaagacaactaaataagtaaaatcacattttggtgccattttccaatgtattcttcttcttgggggttctcctttaaaatggtactggaaggatacgttgtcttcattaatccattgtatgtcccgggggtggaggtggaggtggcagtagcagaagcccgtgaagtaataggtcgtattttgtgtttataaatatttctgcaggtttttgaggagaagatccatcattcttataaaggcattcatgacctccagaagattaagggctgttatgctagaacagtgtttcattcttaaaatggggtctctggactagcagtatcggcatcacttgggaacttctaagaaatgcaaattcttgagttctaccccagacatacagaatcatgatctctcagagtggagcccagcagcctgtgttttaatgagccctctgggtgattctcaagcccactcaagtttgagaaccactgtactaagggaactactgatgcatgatgcaagttcacgctcacaggcacgtgtgaatgacacaaagaacacagacgcctgagagagcaagaaagacaacatagactgtctgactccctgctgggcccttctttaccgcccctatttcaggctaccatgcccatgagtggatgacacgtaccccccgacaaaggtcaacaccactctcccttccacaccctatcactaagtgacaggctaagcctatgttaaactgctcacatctccttggaaattcaacactttaataataggtagcattatcacccccatcttcttctctaagccagaaacccaacttgcctccctatatgttatccttgcattcagtcagtctctaagttgtattcatgatctctcaaaaatatctccctttttctcatcctgtgtctattacctcagtttagatctccatattctcttgcctctaatgttcttgcctctaatgtaccttttcactgccaccaagatgatgttaccaaaaaatcttaaacagattagacatcttcacaggataaagtccaaacccttagcttgatacacaagccccttcacaatccaggccctccttcctgtgcagctatatatatatatatatatatatagagagagagagagagagagagagagagagagagagagaaattttgatcttaccactctgtctctcttcccgccatgggtcttcccctcttccctccggagttacttagctctgatgtgtattcttatctcgtcttatcttcaacttcattcatgtttttcccactgcttcaaatttcactctcccacttctcccctggccagctgctactcatccctcaagaccctgatcaaatatcatcacttgtatgatggcatctgcaaatcttggggggcaaggctaattgttctttgttcccacagggctgtgttccagtttaacatgatcacatgttattttggttcatttatttgcttaagactttttcagaaggctatgggctctttaaaatagagaacttacatcttgtagttttaagagtatttttagtaaaagtttagagtgacccccatctttctgccagcccacaaaaggaaaacatcaaaaagtgaatgtgtaaaaggaagagaactctgacaaaaccaggcagaaaggtttttcagcaagtctttttattttctgttcaggataacattaataattatccacgttggtttctcattctcctgttggtgaatatttttctgctaaatttaaaaccgtatcacaaactcaagcagagatttacaacatttcaacagcttttctacccctgccttagaagggtggatcaaaaacatttgtccatggtaaagcactatggacatgacttagttaacaattctctgtttgggtcaccatgaggcttcttcgtttatactcagggtcagcgacaatgctgatatgcagctacaatttctcatttcttactcagggtgttatgaagcagatttccactgttctttaatcgttattaaaatgtagtccaggtgcagtggctcacgcctataatcccagcactttgggaagctgaggcaggtgggtcacataaggttaggagttcgacaccagcctggccaacatggtgaaaccctgtctctactaaaaataaaaaaactggccgggcatggtggcaggtgcctgtaatcccagctactcaggaggctgaggcaggagaatcgcttgaacccaggagggggacagaggttgcagtgagccgagatcacaccattgcactccagcctgggcgacaagagcaaaactctgtctcaaaaaaaaaaaaaagtcattctcatgtaaaaattcttgtaaaataatctgtaaagtcatcctcttatctgttctagttcttcataagacttatataacatgtcatatgggcatggaaaggcctaagccttcccaaaccttgctcttttggggatgattttccaaatgtacttgttctcagttgaaaagagcattgcggccgggcgcggtggctcaacgcctgtaatcccagcactttgggaggctgaggtgggcagatcacgaggtcaggagatcgagaccatcctggctaacatggtgacaccccgtatctacttaaaatacaaaaaattagccgggcgtggtggcgggcgcctgtagtcccagctacttgggaggctgaggcaggagaatggcgtgaacccgggaggtggagcttgcagtgagccgagatcgcgccactgcactccagcctgggcaacagagcaagactccgtctcaaaaaaaaagaagaagaaaagaacattgcatcatggcacaaggacacaaaaaataccctggacctgcttcagtgagatggtctaagggtctctagcatcttctgaactgaactgaatgctttgggaagaattaatagatacacgatgtatattagttcgtttcacactgctataaagaacttccctgagactggggtaatttatttaaagaaaaagaggtttagttgactcacagttctgtgtggctggggaggcctcaggaaacttataatcatggtggaaagcaaaggggaaggaagcaccttcacaaggcagcaggagagagagagaaagagtgaatgggaagagccccttataaaaccatcaaatctcatgagaactcactcactatcacatgggaaaacagcatgggggaagccacccccatgatccaatcacctcccaccaggttcccccggattacagttctagatgagatttgggtgaggacacaaagccaaaccatatcacaatggaaagctcatgaatgggttctaagaatgaggaaatgtaccttagcattttgcctacttttcctttatgacatttttttcccggcaaatatgccaaatattacctacctttacatcagtgtccacatgcatatcccctgtcttcctccttttcctcatacattaacaaaagagtaactttgttttctccccatcactgttcaccctattgtataagagaagaaaagcaaaataggatgaaagaactatctaggcacacacacaaaagtcacactctccagaagaaagaatttgctctacttggtagtagacagaaattaactcactgaagatcaccagagaatcagatccaattatatcagcaggactttagtttacatcatggtactagaaccttctttaacattcaaaacttatgaatacctagaaatagttttaaggttaatatctctatgctgtgggctaaagagtacccacaaatgaatacagttgtgtctgatgagtgtctgtgattattttggaaattgtcctgctatttaaaatgaaaaaaatagaaatgtcttagattttcctatcattaacctattgtaaacaattacatcagtgtagggttgttttgtggttgcgtgggagtattttgaggtttttagggggtaaagtgggggatagaatgaagttgttgtttgcatttacaaccctaataattaaaacaagccagagggaattacctacatggctgttgtgatttctagtgtatgatcaaaaataattatggcactttgccatatgttcttgctttcttcttagatatgtgttattgggaaaagatgagacttgacatcaactaattgcttttttctaatatacaaccttgaaccacagtgattctctggaggacaaaaaatagcttagtgacaaagagattccagaaataagagcttttcgagcttttaactctctatgtaatatagacaaattgcacagattaatataaccaaatatgtattggtccatgggaagagagttacctatttgaagaataggagtgtattgtgttcatttagaaccattcagaaacatcaatgatattagttctgagttgactaaggataaatttttaaaagcaatacctaattggaaaattattcagttgttgaccattcctatcagtgctctgaaactaaatatctcacagatgccttaatgagttattataattatgttgctgtgatacatgtagcccaagtcagaagtcacttgctttgtatttaatggatggggaagacactggagcttggagggaagagaataaaaataacctagtttcaggaagatctatgctctaaccctgcttctgccacataacaacaactctatgatttgtataagttactttacctctcaaactcgtggtttcctcgataggggataaagaaggcctatttcatagagttggtgtaaaggatttataagggctgtaagtattagttcctgccctgtttcatccccctaccctacccccacccctcatcatggctctgcaaaaacaaatatgtctcagagttggaaagacccatctggtctttctcagataagggtagttttcttcaaacagactgattcctgcacataaaatataatataaaaaaccaaaagtaccttcaacattgtagacttttcatatgtggttgtctctgtgacttaaatgtacaatctagggtttgcatgttaaggtctttcaagattactgttggcactgatctgaaagatgtctcatgcaggaaatgctcacccaattatgagcactgaggctgtatagcaatatcagaaataatattgcagcacagtattttctatggattttagatgcagtattaaaaaaagaaaactcagcctgtctttaagactcgttttctctttcaacaccagaattaaaaggcatgccattcttttttaaagtttatgtgcagagccaaatgaatatcaacattagttctccactgggtccacggcttctttttaaaaatatctgaagcagtgttactctacccactttttctcaggaaattgtgtcctttagaactggcacccatatagtttaggaatgcttgatagggtatattttaggtgggagtcacctgtgcctatatggagctttgatgtcaatgcccttgtcatttggtgtcaatggttttgtcattctaatttatttggccccaaggtgtgtgtgtgtgtgtgtgtgtgtgtgtgtgtgtgtgtgtgtgtgtttgaaacacagcatatgtatttttttcttactccttgagaaatagaactttaaataacatttctatctttaaaatgtacttgtgaatagttatcactttcctgaattctaccttccaaaggtaggacaagagaaggatggaattaaatcacacatgcagctatttttataacttatgagcactcaatgatggtagcatccctcttctttaccttctctctgattctgaagccactgctgttttggttcctgtatggctgggactgcctgtccactagacttcctgccttcactctgaccctgctacatttaccctgaacaccatcctcccaataatcattaccagatgctattttcacaatgttacacctttacacaagaagctacagtggaatattatccttacagaatcagataaaaatctccaggcggcattctaagctctcattggctacactgtaccctttgaacctgaacttcctgagaactacctcttagctcctgcctgtagctctggctcccatcttcatgcagtaggtattcgttttcttttgaacggcctcatatcttctctgctagcaggattggagtcatggcagaaagtgagagggggactagaaggatgcaacattaatgaaacctcacaataggttaggcattgggttaggtacttggttgatctactcacatcatctcatctaatctttgccaaaaccttaaaaggtaggtattatcggccctacttatagacatacaataggtacttaatgcacatttttgtgatgaataaatattcgggaatttttgcattgtgactggatgagaagaaactaggaaaaacaagacgtagatgagaaagatacctctcatcttacttccaacctaggagatcttaaatgaactcatcagttttaaaaggtaatcttaagaatggagtcagagggtcacacaaggagagaaagcatcacgtattaccagagttcgggattgcttaaggcggtttgacagtttcctccgggggtaatccaccctaggccaggcatttttaaagattagattttgaaatgaagctttgcacttgggaatatactgaggcaagaaagcatatcccttctccctgctgagagagcatatcccttctctctgctgttgcagtgcttaagtgtgagaattttcgaatgagatatgaaagcaaagacaacaaaccctgcaggataatagtctctgaggactttaataacagccgtttttaaagcaaagcctgtggactcctaaatccatagctgctcgtttaagatgcaacgcaatgcagtggacctgaaaacatactccttatctacctagagcaaccaggctccaagccaaacagcagtcctcaaattaactcttgtttctcttgggacgacaactctgctgcttttaaaggtgttgcgtggccacatatagaataagaagggaaaaaacagtcacaccctcttgtgagtctgtatccaactgcattttctgatctggttaggaacctccggtggttagattagaatcctgataaggccaagactgtgggtccaatttcttcctatggattcttctcgaaaaacttgttaggaaagatccacttcgggtttttttttttttttttttgcgcttgttttaattcccaatccataatagactgatacttttgtaacatgcaataaaaatgaattattttaaaaattacaaataccagacatacaaaatttaagccgatgctttttatttttagattgctgtacacgtttctaaagatttgctttcaatttctgttcttatgtcttcataatagaatatctgtttctgtgtgtgtatacgtatgagtgtatgcaagtgtgctccaaaagctctactatttagagctcatgtttaatgagtcatgttggataaccagtctaagggagttctactttcatataattgtttttgttttatttttatttaaatcattaacaccttttcaaaacaactgtatcaaataacagtcatttggtcatttgaagcatttacatacactgctttcttcttaaacagattttactgaatgtaaatctgctttccctggctaattcagcatcatcatcctgagcattaactattttgcttcgctataaaacgaggtgatgccttcaagggctactgatgcatggagagctgttagtttccacactgtgtgaccctggtcaattatgcatgcccatggctccttttacacctttctgattctctgtaaggtgtcacttcttcctactctcaatttagccacttaggataatttctttactattttgaattgtatgttcctgaccttctaagttcttagaaatcagaccactttttttcccatcaagctaatttaaattagataaaaattatcagtaaggaggaactaatggccttataattattcatatactaactgctttcagaaaagcttagagataatctgtctataataaaattcttaaggagatttggtcacttattgttattctttctacaccattgtgtttgtttccttacttctcagctatattaaaatggggaagttttcatttgctgagtcctattttagagaccaataattccatttacataggaaaggaaatatgtggatacgattattcatgatgttctagaatagtatcacaaccatctgcttaatggttaataaaatggttaataataaaaagaagggtacagcactaattcttgacatctcccttctttatttttcttctagtaaaacatccataacttttcctattcttccccagttgtattattacttatgaacaccatggatcattctactttttgaatgaaatagtacaaatttaatattcgataatcttgtctttgtacttttctttctaaacttttattctcggtggcttcctaaaggaagactttattctacttggtttaagcagttggtctgcattctacctatttctctcaactctcattgtccattccaatcaggttgtgcaattcattgtccctgctcataaaccaaattcatttcacctttactccattcccatgctattctttttacctggaatattttcttttgttccaatttcccaatcgtatacatccctcaaggctcaagccaagtcctgtaacttcatgaaatctatttctaacatctgatttccacatggattatcttgtaatagtaagccctgcatttgctattatttattaaagatctcttgtgttctagacgctattcaaagtattttacaaaaattccatgtaatattcaaaaaattcagcaggtatgtattattatttcatgtttagtgaaaccaaagtaatgaaagagttttcatcattatgtggctaataagggaaagagaagagaagggtcaaacctatgtctatttaactgcactttgccatgagttttctctggaagctgagaaaggagattcacaacaagagtagatgagactcagataagaaggaagtgtggaatttgaaaaagcccttcagaaaacaggatctcccctactcctaaaactgctatactgtgaacatattgcttgtctcataactgaacttttttggtactctcagctgaaatttgctctataattgtacagaactttaggccaaatgtttcttttatggggacacacattatttgtttcgtttgcacccattttctcaattactttgtgttttctcttgttgtattggatgcatctctatccactgctacaaatctgtttaatagtctttatattaataagaccatgaaattgctctttgtgtgctgacatagttatcctttattttctaatggcagtgctagatttgctaaaatttaggtagtagcattattaataggaaaaactaccaccaacaactaaacttgaaaggtaatatagcctagtggctaagagcacaatccctgaagtctgactgacgaggttctaaatcttgctgcatttattagctgtgtgaacctgggcatttttagttaaccttacagtagtttcattatcttatatggaaaatgaagataatagtagcccctaccctagagggttgttgagaggagaaaatgagctcatgtatatacagtgctttggacagcacctgatgtacagtaaggttcatgtatgttgttgttcttgctgctgctgctgctgctatggtttttgttatgtaacaactaccttttcccctttgttcattcgttattgcttttcctaaagactacaatcacaaaaaagaagaaaaaaattagagagcatacagtgaatgcagtaatgaaggcttgaatgatcttttctagttaagtcagaagtgaaataaaactatccaaaaatttctatgaaaattatcctttgtccagattggctacccactgagaactccacttgattctccatatcaatcttttgctcttttgtgctacctgagtctgaggtgtagtctttaaatgatgagtttattggcacaagacagggatgccctctctcaccactcctattcaacatagtgttggaagttctggccagggcaatcaggcaggagaaggaaataaagggtattcaattaggaaaagaggaagtcaaattgtccctgtttgcagacgacatgattgtatatctagaaaaccccatcgtctcagcccaaaatctccttaagctgataagcaacttcagcaaagtctcaggatacaaaatcaatgtacaaaaatcacaagcattcttatacaccaacaacagacaaacagagagccaaatcatgagtgaactcccattcacaattgcttcaaagagaataaaatacctaggaatgcaacttacaagggatgtgaaggacctcttcaaggagaactacaaaccactgctcaaggaaataaaagaggacacaaacaaatggaagaacattccatgctcatgggtaggaagaatcaatattgtgaaaatggccatactgcccaaggtgatttacagattcaatgccatccccatcaagctaccaatgcctttcttcacagaattggaaaaaactactttaaagttcatatggaaccaaaaaagagcccacatcgccaagtcaatcctgagccaaaagaacaaagctggaggcatcacactagctgacttcaaactatactacaaggctacagtaaccaaaacaacatggtactggtaccaaaacagagatatagatcagtggaacagaacagagccctcagaaataatgccgcatatctacaactatctgatctttaacaaacctgagaaaaacaagcaatggggaaaggattccctatttaataaatggtgctgggaaaactggctagccatatgtagaaagctgaaactggatcccttccttacaccttatacaaaaatcaattcaagatggattaaagacttaaacgttagacctaaaaccataaaaaccctagaagaaaacctaggcattaccattcaggacataggcatgggcaaggacttcatgtctaaaacaccaaaagcaatggcaacaaaagccagaattgacaaatgggatctaattaaactaaagagcttctgcacagcaaaagaaactaccatcagagtgaacaggcaacctacaacatgggagaaaattttcgcaacctactcatctgacaaagggctaatatccagaatctacaatgaactcaaacaaatgtacaagaaaaaaacaaacaaccccatcaaaaagtgggtgaaggacatgaacagacacttctcaaaagaagacatttatgcagccaaaagacacatgaaaaaatgctcaccatcactggccatcagagaaatgcaaatcaaaaccacaatgagataccatctcacaccagttagaatggcaatcatttaaaagtcaggaaacaacaggtgctggagaggatgtggagaaataggaacacttctacactgttggtgggactgtaaactagttcaaccattgtggaagtcagtgtggcgattcctcagggatctagaactagaaataccatttgacccagccatcccattactgggtatatacccaaaggactataaatcatgctgctataaagacacatgcacacgtatgtttattgcggcactattcacaatagcaaagacttggaaccaacccaaatgtccaacagtgatagactggattaagaaaatgtggcacatatacaccatggaatactatgcagccataaaaaaaggatgagttcacatcctttgtagggacatggatgaaattggaaatcattattctcagtaaactatcacaagaacagaacaccaaacaccgcatattctcactcataggtgggaattgaacaatgagaacacatggacacaggaaggggaacatcacactctggggactgttgtggggtggggggaggggggagggatagcattgggagatatacctaatgctagatgatgagttagtgggtgcagcgcaccagcatggcacatgtatacatatgtaactaacctgcacgttgtgcacatgtaccctaaaatttaaagtataataataataataaataaataaataaataaataaaaaatgatgagtttagacaaatatcattatggtagtattatattatgttatgttatattatattatattatattatgtataatgtatattccttgcagcctgccctgcattcccaatctatgactcatgctgccttattgatactgaaaaatctccactacagcatgccagcttttgaaagagagccttgggttctttcccaatacttaccttccttttagggcaacctatctgagtcctgtagcttgaaagatttcctaccagcctgccatcccaaaggaacatggatgaactatgtttatgctgatgtgtcaagtcatttcttggtatggttcatagtagtccacatggctcttgtagacaaagagatgaattactgatggcagaatttctgttctggcaacagggaaatttgcagaaaggagaccttttcagtgtgaacattttttgctcacaggtggtccaggatgcccaatgctaaatgagaagtgaaaagagcaatcagggccaggtgtggtggctcacgcctgtaatccaagcactttgggaggccaaggtgggcggatcacgaggtcaggagatcgagaccatcctggctaacatggtgaaaccctgtttctactaaaaatacaaaaaaaattagccaggcgtggtggcgggcgcctatagtcccagctacttgggaggctgaggcaggagaatggcgtgaacctgggaggcggagcttgcagtgagccaagatcgcgccactgtgctccagcctgggtgacagagcgagactctgtctcaaaaaaaaaaaaaaaaaaagagcagtcagaattcaatttttcattcagaacaaatcaatccacgtgggtaaacattttatcaaactcaagaatgctgtctttcagggtgcttttccctcaacagtcacttatttcctcttgcaagtagtatcttcgttcaggttcagtgactactgtgtattatatccaatgcttctggcaagtgggttggtggaggcagcccaagatcttctagaatcaagagaattggatccatttcccagttctaacacttatcagctatatggcttttaggcaagtcagttaaacatccgagtctcagtgctctcatctgcaaaacagaaaatgtgatgtacttcacagagccagggggaggaataactaaggtggtacatttgtacgtgctttgtaacctgtaaagccctttactgtacacgtgtcatttacagctctgtatcaccatcatgacctagaaaagcagtactgacagaagacttatcttcttgccaatgctaagataactttagccatttctgcatttctaaaggaaggagtctttatcccagtatctatgaagacttggcaggaattgccgtcaatatttagttggtaatataaacgaattaaacaaaaatgcacactaggttttaggaaaattaaagacagaactatcatttgtactcctcttacatttcccaaagtgctaaaactagacaataaatcagtcctcaataaatgcttgtttatcaattttatattcatttatttgttgataatacaacaaagatgtttatatgcagtataatatatatggcaaagatgaaaagtagcaaattcatgaatcaacatcctatttatgcttgagaagacaaagaaagtgttggtgacttcatggtatacataaccttaaggagctcgtgattgagcctgggtctctgctatcaatgtaggatataaatttcaaatgtactatcctttatatgtatgttaatgtagtaaacatagaaaactgatgctactagtgagaatacttttacttgaacaactaaaagtttgtctttaatcccctaagtgcatacacaaaaggaaagtactgtacaaatcaagtacaacagaagaagtaaagtaaaagacaagtgaaggaattatctggaacttagatctggttggctttttctcctgaagtacttagataaattaactcacttttctcttttgctgaagaagtgcaaattaggcaggcatgttattccacgtaggcaaaaggaaaaaagaaagaaaaacataaaatggctatatatttgaccaaacttcgttctgcaagaatcccaatactaaccttctaccatataaactactttcaaaatcaggctatatccttccagtacaaacctggtttgtactactcagagatactactcagaaatactttcagtatttcccttctttcaacttctgatgtgattctatccatattcccctgcctgtctcccagtcaaagagaatgggacacaactctctttagagtccatcagtgatgctttagctgccaaaaatagtgacaatagacattcattgtctgtctaccttacttgttcaacattcagaattctgcatcttaagaggctgtggctgaaaacttgagccagttcttcagaatttctaacatgttatttctgccactttttctcccttactttagcagagtaatttaattcaatttgagagagagagagaaaaaaaaaacttttctagttacacagatcaatccaattgtttggagcttcagaatgaatttttaaacttgttgaacagaagcatacaaatctctaagagcaagtcagataatatacaaagcctccattcattgtgtaggcagaaaggaatgctggtacccggcagctctctgaggaatgttcccttggctttgactattctgctgggaacaaggaaggaaacacatatataaaatgaatttataatgtctctggcttgtaatggcagaatgataagaaaagttggctgtttaatataaactgtcagttgcatattccaggcctcctctctttgaggttcctcccacatccacacgcctggctactgtttagtgcggagtacaaagtggccgtttattattattgactggtgaggcctgtgctccaaaattcattctgtcaacagaatgtaagcaaagttggcattttaaagcagggctctttcagtttctgggttttctcaggattgctatgcaacaggatcagtgctgtagtgcccggttcaagctgaaaatgttacacaggaagacataccatgtaaaggtcagattcttctactataataattttcttgatctgtgtgtatacaagtgaagttgaatgcataacctcttatcataactcttaccaaggtcctatgtactttccacctgtcaagcctaaaaatgtgtattaaatgggaaatcaaaactaataaatgtatgatgctgtactatatgtatgatgctataataccaaggtgaacttaatttgtgttgtcaagaagattttctctcccatgacagactcccaggaatgtgctggtgctgtgggccaagtgcaatcttgtttattagtctctccacgcttttatggtcagagttaactctacagattactacgtaaatagaaaatatgacttgatccatatagtaatgaaattattggcactggggtacactttatcatagaattttattgcctatcacttccataaaataatacattttgtccatagactagaagatataacttgtgaactttataaagttataaatacattactttccaactcataatggcaaggaataaatctattacaactaataagatgcccattttaaatctacataataacaggagaaggcaatacgccaagaaaagggatttgagatgtatcttcttgttagtttagcctgattgaaatgtcttttgaactaataattatttatattttgcaattctccaaattcacattcatcgcttgtttcttttgtttggtaattctgcacatattcttcttcctgctgtcctgtaggacctccaaggtgaaattgaagctcacacagatgtttatcacaacctggatgaaaacagccaaaaaatcctgagatccctggaaggttccgatgatgcagtcctgttacaaagacgtttggataacatgaacttcaagtggagtgaacttcggaaaaagtctctcaacattaggtaggaaaagatgtggagcaaaaaggccacaaatgaattaaaatggccaaattttcctcattgtcttagcacaagtaactggtatctcacatgtctacgtaaatcatccaatttcagaatgattcactgtattttgaataaatgaatcatttatttgcttggtatggagatgatacttgaggattcagattagattaaagtggtaatgttttataaacataggagacatgcatattaagacatcagagtgaatttaaatgaggagtgcagctattctagtttcataaatttctctcttggcatatcacagggttatacaaaaagtgataaaaaattaacggatatgtattatggaattatttttggcattagtctaaatgcataccagaggacagtctttaaaaccctttataacacattacaattatataatataaaacctgtaacacattataattaacagtttagaggagatagctcctacagttaaagagagactatagcaacttcctgtcttttgcttcctctcagattttgttaaaacacatcctctgtaaactaagcttttagttgtagtatactcacatactttatattttgcccccttctatgtgccagctttctttggagaagttagttaatggatgcatcatagcatctttgtaaaaagggcagagggaagttcttgttataccagttttgcaatagttccgtggaggaacaaaaggatagagatagtaagtaaaacgcccattgtaacttaaatgatctagcaagggcggggaatgaaagccaggcttcctgctttctaagcagttgcctttcttaattcatttctctttattaaaaatattttgtgctttcttctgtgtctagagaaaaagtgataatgaagggaggtagaagatgaccaaatggacttaataatagttatgggagtatacactaaatgacgggagtagttactacctctaggtagaaagattacagaagggagattttttttcttctttatagttcttctaacttgtccaaaattttaacatatatacttctataaggaggaaaatctgcatttttagtaattcagaagcactattgtaaatgtctgcatcaagtatgaaataatgatagcaactaatatttacatgatgtacctacataccacgcaatgccataagcactttccattcattgaccggtttaatgctctcagcaaccctaagaggtagattttattattgaattctttttacatttgaagaaagtgaggcacagagaggctaaataatttccttagggtcacttagcaagtggaagatacaagatgaaaacagggagtctgggtgggccaggcgtagtggctcacgcctgtaatcccagcactttgggaggccgaggcaggtggatcacgaggtcaagagatcgagaccatcctggccaacatggtgaaatcccgtctctaccaaaaatacaaaaattagctgggcatggtggcacgcgcctgtagtcccagctactcaggaggctgaggcaggagaatcgcttgaacccgggaggtggaggttgcagtgagccgagatcgcaccacttcactccagcctaggggacagagtgagactctgtctcaaaagaaaaaagaaaaaagtaaaagaaaaagaaatcagggagtctgacttcagagtctgaacttttaaccaccatatgataccgtagcatataaagaaagaaggaaacttctacaaagaaatgcatactaattgaaaggatgaaatagagagtagattttttctaggagtagaaaaggatttgtttttatgagaagtagattgctaggagtagaacaggtttatttttatgtataaggttttgttttgttttgtttttcacaagtttgcaccctggcttcccagacattgttccttatctccctattttgtatatgaattttgtgtcaacttggtggtggtacactgggagcaacaatggcaatagcattttcaaagatagggaggctctattagctttctacagcttaaactcttaagagaggtcagtatgtgtgatgacgtaggccactttgataaccttcgtcattaaaaaagaatgaaaatgtgagatggaaaaaatattggcaggtcaagttaagttattcttttctgcacaaaagaaaaagaaagatgctataattgttccgagtatcacttagtgccttttctctgcctcatgtgaacttgataaaataaaaggagaattgaaagtggcaaatagcatgtcagccaaaatatggactcttcattctcagcagtttcccatgtcagctaccgcagtttgattcttgctgtcattaatcaggtagaaaacagttagcttatctaaggtgctgccaattctagaatttaaatattcagatcaatggttttggcttttatataggcctatgtaataatacaggatatgttataagcactcataaaaagcaaagaagtaattctccacatcaaagcaatttagcttatttcctgacacttgattgaaattagggtattgatcaatctacagcaaatggcagggttcaattgagagaagtacagtataggcagtaattagggatgattatgaaatagaatagaataacactggaagagttagatatagaaccattagtggcactgataaacctgcattatgaatcttgtcacttcttccatgggggttattttaaaatgaaaagttgccacaattaaaaaatagtttcaatgatatactggaaaaataggcctgtgtttgcccaagttataacatattataaaaaattacagttggcccattgtttggtgagcgattctgaaactgctcttatatttcaaaaaaataaaaccattaatgtgtccatttttaaagaaacaaaattgaatttaaatccaaatgatttcgaagtttccctttgtattccattggctcataagagatatccttgtgcttccaaatacaagtccatattgtatcgttttccttccatttatttttcttctgccatacatcttttctcttcctgtgattaagattcttatttaagtcatcatgttatgccatattgatacatttgcaagaatactctaccttggacgctgtttatatcatattactcttttgttcaaagcttcaatcttgtaggtctccatatctccctcattcatttatttgttcattcaacaaatatttaatgaatgcctactatgtactaggcactcttctgggcacggaggatgcaaccatgaataaaacataccaaaaaaaatcactgctctaatgaagttatatttaatcattagaatctagtagaaccttctctctctgccaactgtgcctaataagtccttgctaactccttcccttctcttttctttttctgcctccagttcctttctcaccaagcatcattctgttactccccaacatagattctctgagccaagagaatcaataaattctattttctaaccccattcctactctccaacaatttcctcactctcccatatgagtatgtacccttgctggttctcacacttgcaacattctctttcctcttattctccaaattttgattcatattccataacaaatcttttcttttctggctgtttcctcactaggtcttcccaatactattctaatttacacttgataacatgtttcttcaagtgttcaagagttgctttatagggctatgcttactgcctccagctaacttatatgaatacaaaaatttcaaactcgaaatatgtgagtatggtagagtagaaagacatgggccagcagctgggcaacccagtttcccttctgttctattctgtcactaactgtcttagcatataatcttgatcaagtcacttaactgcttcagacttcaattttctccttcactgaaatgaagagtttgaccagaaatatggacagtctcttccagttctcttgcaatcgtacaattttattcttttagttctgcaatcacactttatgaacctggaaaattgtttaatttttctaccttggttttcttaattaaaatagaactgattgatttaaaaggcattatataaagtaattaagatgtctttgagagaaaagaaatttaattgaaattgtataatcctatctcataatttaattcaagaaaagtatatgctatcattccacatgcattattacatcacatgttggccaagaggtataaggaagaaaagtaagtagtcagtgataatttaagttccatcaaacaaaacgaaaacattaactgctttaagtgggagaaaaagagaaaattatttacttaaatgtacacacacatgcatacacacacagttactgatgacgttatccaatattaagatggtaattagtcaaagaaagtgtttttcattctaaaattccatatccacaatccttgcatttttaattttagaatattaataacttgagaagtggtcaagtcaattgttttacataagaaatatatatgaagatttcaatttagtctactactagattatttttccagatcattgtatatactattaactatgaaaatcacataatatgttatcaacataatttcagcagaatttacattatgtgagatttttatatttggcagaaaaatttgtaaatgttatataaaatgttcacatttatacaattgtgaacattaagaggcaaggacactgacattatatagtctgtagaagccataaatctattggggagtgcttgctattagaggttagaatagttagtgtctttgtataatggagaacaaaagaagggcaaaaagaggtggggtctacctttgagagaaaactgcaacttggacattgaatatctctgaccttctttctctctcttttagaatgttaattatgtttggatgttggagttcaagacctgtctagaaaaaaaaaatgttgacttctctttgggattctctctatttaaagagatagctcccattttaattctgtggttctttaattttttttgtttctgaagtacaaattcaaattattcatctgttgatgacaccctggagatttttctcagtgttctcttgtagtagtttcatggtttgaggtcttacatttaagtctttaatctactttgatttgatttttgtatatggtgagagataggggtctagattcattctgcatatggatatccagtttttccgcaccatttgttgaagagactgtcttttccccactgtatgttcttggcacctttgtcaaaaatgagttaactgtaggtgtgtggattcgtttttgggttctctagtcttttccatgggtctttgtgtctgtttttatggcagtattgtggttctttattatttctgcattcctcccttttctttctgcatgtttaagtgctattttattacatgagggtactaaagatttatagggatatatcattagttttataaaggaagtcaaagtgaaaaatgaattcaatataacacatttcactttaagaatgcatgcctttcagagtaaagttttattaaggatttcaaactaggcattaaccaaatcacagttgaaatatctgtgtctagagaaataacaatcactttatcagcccctataattcttagtgtcctgacactgaggagttccttaaagaccaagcaatatactccagcacatctaaaggctctgcgttttacctaaaccttacaaattgtggaaattatcagctttttagagattagcacttgccttgttaaacggtagtaacccctaagctcttgtcttcactaataaagattaatagacatagatagaagctaagcatgcccctttgaaccacctcttttattttccgttgagtgggtaggagtaagcagaatatatttgacaattagcaatgttaaaagacaaactttagacaaattccgttttgcagagtttatttgagcaaaaaacaattcatgaatcagacagtactcagaattagaagttcagaaagctccacccagcaaggtgggcaggcagtatttatagatagaaaaaggaagtgacatacagaaacagcttgactggttacagcttagaatttgccttacttgggcatagtgtaaataggcatttgccttatatggacatgagctgatcagtttacagcctgtgattagctgaaacttgactgctgggattggctgaggctcagctatttgttacaagaatgtactcttaagttgcatattgcttacatgccaagctgggttgcagtttgctatgtacagagtcagctttaggcccaatttaatttaatttaacagcaacaagcctttttgttcagagatcaaaaacatttggttaaaaccactaaggtttaaggattttctcatctaacaaaggtttgtaatttctatttcccatatctaaataggacagctcaagttatgtttttcagcagctgttttatacctttgcaatcttgatttctacatatgcaaaacaagaaggttgaactataatctctcaggttccttccaaccccaacagcctatgtatgatataaccagaaaaaaaagtcattacaaatacaaagaaacattttcaggaggagatattccacatgcaaacataggttaatcatttcaaaatatctggtatatacactcatgaaaataaaaatagggcaactgcttccgataaatgtattagaaatgtgacttgaaaacatttcacgggcttaacatggtcaaagaaaatgttttgagctcacaatgttccttacatttagatcttcaaaatcaagtcactgacaaatgccacctttgccctgtggagaccaagaagtaatgtttggggcatatcagaaatgctttaataaatgctttatcaaagaatggttctggagcttacctgtggaattgtgaaggttcttgttgaaagcagagattgttgatagaattatagaaagtctggaggtggcacctagcaatctcaattttaaacaagctactcaaatgtttcttatacacactatagtttgagacccagagctttaggttgaatacatttgtatatgctgttttaattcattctctggctgcctttcacctcttcagttcttactcagtgttctctgtcctttgtaagtttttcgcttcagtttttgtcctcctatcacatttttcctttcactcttgagctttaggagaggaaaaaaatgaagcaatttgatatgtagttaggatgatcaaacattctgaaattttatctaactccacagcttagaaaaaaattaaaggaagtccccttacccagatatgtgagagcttttcgtcttttgaggttccaggtccgtcttctgctgctgtattagctctcttgactgtcctctgtccctggcttctaacaacttccctatttcatgctattaagtttctcttagatcctttagaactgaattcccggctgggtgtggtagcttacgcctctactcccaacactttgggaggctgaggcaggtggatcacctgaggtcaagagttcaagaccagcctggccagcatggcgaaaccccatctctactaaaaataccaaaaattagctgggtgtggtggtgggcgcctgtaatcccagccacttgggaggctgatgcaggagaattgcttgaacccgggaggtggaggtgcagtgagccaagatcgtgccattgcactccagcctgggtgatagatcaagactctgtctcaccaaaaaaaaaaaaaaaaaagaactgaattccctaggtctcagttattttgctctctcttaggggacctaaaggggttcattgacccactaataatgagtcagcaccatttaacctagaactggaattttagcacttccttacataaacaaagccgcagcttgaggtcttaacataggcagcctgcccttcactatatcctcctctagacctctctgccacaaggatattttgtttcctctaccaggcagacagaggccaaacattagtcatcgttatattctctcttcccttcctctctccctactccccaatgtatcctagagacttaggggcagtcaataaatatttatttaatcagtgtcttttctaccatttgctgcttttccatgtctgagccctacctctctccacctacttttcaatatgtcctgcttgacagcctcttttcactctcaaagggaccaagctgtgaattccagacaccccaaggaattcgtttaaccattacacattacatgctattaaacagctaaaatcttgcatggggaattgtcgcttaggcttatcatggaaaagtggtaactgaaaggatggtacagaaacataaaagaactgacctctaattgtatgcaatctgcatgcactattatattcaattcatgacatttatggtatttcacgattcagttcttgggaaataatacccttagagtctggaacaatttaatttatcttatttgatggaaatgccttcatttttcctggacatattgtttatactgcaattatagaaagaaaatcttgacaatttggaaaagtagaaagattaagaaataaatcacctgtaaatctacctctgagggataacctggttgtcattacaaaattttttcctagtcaagcatgtgcatacaaatacatacacatacacaaatgttttagaaaaattcaaaaaatgtatttgttttgtaacctgttttctcatttagtaactgggatgatgaccttttccatatccataaatatttggctatgtcatcatattgaaccttgcaaaggattttactgtatgaatgcaccattatatatgtaataattcccttttaaattaagagctatttaattaaattcatatataaatttcattaatttctaaatttaaagcatatacaagtttcattacatttgaaaacaatcagtaggttggggttttgcatttctcaagcaattccctcatattgaatatttaagttgtttctgttttgttttatcaatcataaatgatgctatatataacatttttccacctatatctttgtatctttttccaatttctttgttagtataatttccttgaatttaagcctgtgggtcattgtctttgcacattttaaagacttttatgtattgtcaaattatccttcagaaagtttggaacaatttaatttcagtagataagtattctttggtgattctgtttgactaaggccaaaaggagaattgtatttgtaatgtcaagctaagttaccaaatggctaagggaaatgttgctccacctggttgctttgctttacatttcaatctttgcagcgttaaagtctttattatatttatgttataggtagcgttattatgaattaattagtaattgctgataatagctgagtgattgagcataatttctaatttacctgaagataaagctttgctaacactgcgtttcctctttgttttctggatgatgatttattttattaatttagcttctcatcttcaagtgaaatgtggattttatagcacagatcattcatttgtgtattcttaaatggcttctaaggattaacgtgttctaaatacagttgacggtaaagcactcagtctcctgcctaaattattcatgttcgggggaagctttcagataaatgtctgattttactcttccatgtgagttgttgtcttagtactttttacacaaaggaaacaaagcagaaaatgttgaaacttggtgaagacaaatcccaggtgcacacaaataaagaagggtagggggaaaggagacgcatttgggaagaggagcagaaaggaacagacgccagatggaagaactcaatggaaaaggctgcctagggtgtagaaatggaaaagtcaaaatgtggggagagacctttccatttctcaaggcaaaaagaattccagtactagcatgagtcacatgaaaacgaagtgtttttcattagtcactgcatccaattttttctaccagaaatattaagaattgttgactacaacagtatggaaaagcaatagattccagtgtgtatttcatgccaaaagtctcagcattctgcatgtggaaataaacatatggctaaacactgccttttctcaaaattgccatcaaactatcctctgttttgtggctctcaaaagtaagtagccagatttttattcaagactgctttgtagttcacaataggtttattgtactttttcaatggaattgttagaatcatcaattacacttctagatattctgacatggtacgctgctgttctttttcaggtcccatttggaagccagttctgaccagtggaagcgtctgcacctttctctgcaggaacttctggtgtggctacagctgaaagatgatgaattaagccggcaggcacctattggaggcgactttccagcagttcagaagcagaacgatgtacatagggtaggacatttttaagcctcgtgccttgcacatgttaagcacatagtaatccagtgactattttaaaattaattttgtttgaaattaagttgaatagaaatcttttttactcttctcacccaagggtcaattataaataatctaagccattacactgtaaatgtcaaacacatttgtgttaataataccctttaagaaatcgtccatctcttttggctatataaaaaaaagcttttcatgatgaaaaatattgaacatatacaaaagtagacagaatgctataataaaactcgtactcatcaagacatcaacaattatcaaatcacgtcagatcttatttattctatagctcttcccagattgttttaaaacaaatatcaggcgtgtgttattttattgttaatatttcaaaaggttaaaagataggattcactcttttaaggtaatcaccttgctactataatgcttttgaaatatcaataatttcatcatatcaaatatccagtccatattcaaatttccatttttctcatacatattatgcattttttaaactttttctggttttggtttaaataaaaattgaaatcagacccacaccttactttggttagttggtctttttattactttttgtttggaagtaattacagattcacagtaagtttctaaaatagaatagtttccctgtatctttcaccctgtttcttttcatcattatatgtcatgcaactgtagtacaattcttattgtcatttcaacatgcaatcaatagaaaaaatgtacatttacagcacatctcaattcaggctcattacattccaagtactcagtagccagatgttgccagtagctaccgattgaacagtgcagttctatagtttgattgtatttgggtttggctttttttggcaagactgcttcacaggtgttcgtgtattcttccatcatcaggaggtggtatataatgccttgttttctctttttgtgtgatgtttaatagctgttcacgatcagtggctaggggttgcagtgtgataattgcctatctctaccattccttcttcatttattcactggggtaggtctatgaaaaaaatgttttgcacttgtctcctattttggtactcagtatacctttcataccgaacaagcaaaatacgtttcaattttaccaatttttataataacaacttgttcactagcatcctccaacgatgaccaattatttctttgtttgtttgttttatttttatttacatttctatcttctctactaagctctgagtgaaaaaggcagagattttgtcttgttcacctccaagaccctagagtctagtaaagtgtctggtgtagagtggatactgataagtgttttggaaatgagaataaaagatacaagaacagaaatgaatagcaaaccaaacaaattactaccaaataataaaaacttgataaaatggtaccacttttgtatgttgagcatgtaaaggaaagatctctgtggagatacagccaaaggtggcatcttgaggaaaggtcaagggtttatattattctggagaagaggatataggaaattataaaaagggaagagaacatgaaagaagacccagggatctttgcaaaaaaaaaaaaaaatgccagggaaactgccagtttctcctttagccatttgccttcatatatttctgaatattaaattagcttttgtggtagggtgaaatgtaatggtgctatgtgttttaaatgttctgactttgaataaacagccaaaacactctggtgtacatatagaaaagcactcattgagaaggatgggccttttttaaaaaatgcattatgcgatatagtgaaatgagacagaatttctacaaaagatgaattttatgctagttccagaaaccaaagaaaatgaatcactggacatgtgcactaggagtcaggagactgagattctagtcatatttcttcataagatggattctgattgctattttgttcttcaactgtaatatgaggaaattggtccaaataattgctgtggtttcttccagccagtattttgttataaatactgcttcactattcctggttattagttttggttgcttgttaagagtggtaaaatgtctgtacttaacgcagtccttactcaggaatctcatgacaaagaacatgacttggggagatggtgatgctagagttatgagtgatactcaccagaatgaagttaatccgtccccacttggttagtgtgcttgctcagatagctacctgttaacctttcgtgaatttcacaggacttccagcccattgattactctgtgttttatacattagttcctctgcccttccatatttacctccttccaaatacaacttagattcaatcatctaaattttaataacttgttttcaaaagtctgaaaccctttgcttctttatctttttgttgctgcaatctacaaaactccaaaactctagctaaatattccgagactctaactaaatattttctcataccagacaacaatgtagttgtctggtacagtaccttttccggatgaccagccttcagccttccactaccaagacatcactgggtcaatttttttttttttttttttttgagactgggtcttgctctgtcaccaggctggagttgcaatggcacaatcttggctcactgcaacctccgcctcctggttcaagcaattctcccgcctcagcctcccgagtagctgggactacaggcacgcgccaccatgcccacctaatgtttgtatttttagtagagacagggtttcaccgtgttggccagatggtctcgatctcttgacctcgtgatctgcctgtcttggcctcccaaagtgctgggattacaggcgtgagccaccgcacctggccaatttaccttcaaaattgtttttgactgtctactattgttatcatcataattatagaagaccatttctcctaacctttctgcatctactcttgccaccctacaatgcaatctctacatttcagtcagaataatctgtgtaaaaaacataaatccaattatatcagtccttatcttaacactatagtagtcttctcagtgctcttggaaaaagaccaaaatcctcaacaagggtgacaaggcactatctggcttgtctggcctcagcctcctctttcctagatgctcttcccttgctgtttggatgccagccatactgcctccatttactttttccaattctgcgtgtccctcttatgtggggctttaaatatgttggtcctctgtctcaaacccttttacctatacccacccactcataatatcctggttatcatctaataatcctttacatcttggctcggacattgtgcaaacttttccctgttgtctacatttgaccagatctttctttacacacttctaaaattgtctacttttctataacatagcgttgtttgtcatcacgtacatgtgttactatttgataaatatcgactactcttgctaaaccatgtccttcaagaagatttttgggagggggaaagctgtcatttttctactcagcacattccaaagtgcctagtatacagtagacactggttagataaaggaaggctattgagaccaagagcagggaaagaaagaatagagtggtattcccttcttatttacaggagttttctgtttatttctaattaagcatctttttgtaaagtgtgtagagctactttgatgcacaggtttttttttattattatactttacattctgggatacatgtgcagaaagtgcaggtttgttacataggtatacatgtgccatggtggtttgccacacccatcaacccgtcatctacattaggtatttctcctaatgctatccctcccctagccccccaccccctgacaggccccagtgtgtgatgttcccctccctgtgtccatatgttttcattgtttatctcccacttatgagtgagaccatgcagtgtttggttttcggttcctctgttagtttgctgagaatgatggtttccagcttcatccatgtccctgcaaaggacatgatctcatccttttttatggcttcacagtattccatggtgtacatgtgccacattttcttaatccagtatatcattgatgggcatttgggttggttccacgcctttgctattgtgaatggtgcttcaataaacatacgacatacagcttttacttgtagtttggcgcaatgctttttcaagcttctcttggtatctttaagaaaaattcttgacacaaaacactctccttcctcaaacaacatcatcgctcctgagtgctgatgagagaacagtttagtagcctgtttgactcaaagttttgtcacatgtatgtggtagccctttcatatatggactgtctagttagtgatgctcttgaagcctatgggcaaaagaacaatggaaaatccttgaaactggatctgcgtatcagatctcctgaactcagttagaaaaagagaaaaagaacagaatcagtacaaaattccatcaagatctaatagttgacagatcttatatttgtggacttttgttttactttgccatgtttccagaattgtacattgtattgctctttatgggtttcttgatttaattgttgtttgtatagaatccttggtatcaagatgggtcactgtaattgtaaacttattccgcaagtatttagagtgccacttttttaaaaagtcatctgcttactctctattctaaattattaatatcctttgctgatgctttttatggggatacaaatcccattaaaatgtcaatagttgaaactaaaatcaaatgttgttcattttcactttcattttctataaatcaggatgtttacaaaacaggtaatttgtgtttttctttgtataccatttcagattagtgataatattttgtagcaaaatattacatatcttgtactcttttcttgtagagaaaatatacagtcaatatcaattgctgtcatggagagatatatggttcttctgtaggtaaaattccaagatactccacagacatatttggggaccatagtctcactcctcaaagcaattttcacacccatgggagtagatctgtgctccccaaaccagctgggcagcataacaactgcaactgaatggctctcaagactaattaataaaataatgctccagatgcggtgaagtgttataaataattaaagctcaaatatgccttagcaaatataaactgaccaatttttatgtcttttgaatacattatcctggcttttacagttcctcattacttgcctcactagactgactcgttttcaattagtgggtgttattctggtccagatatattttaaaaactgacttcctttgttttacttgagcagtcactaaagtgatatttattacttgtctacttctgtgattaacctagagagagttttaaaggagcaaatcatagtggggaatttctaaggagaactgcaataaaacatcagcttattcaactcccttcctcctaccccaaatccaaatggagattagatcttgattgtaacaacagtgtaggtaatgactttttgtttgcctttttactaatgaaattgtttgtcactaggttttcatctttcaattaaaaaaatctctataatcccttccctagagatcattaaggataccttcaaagcttcccgagattttctggttaagatttagatggaagtaatcaatacatacattattaaaagagtggacagaaagccattattgcttggatgctgttgacaaatgaaaaggcttgaataaagtagtttacttgttcatttgtcaggtcatatattatgcatgttcgatttcttcagaagtcaccacaaagtgagagacaggctgagaaattcaataaaattatcctgaaatcatgttgtagattatacatttatttaggctcattctgttatcagtgctggcctgcttacgtgggatacattttagtatgtatgttagcttgacgagttttctgtgttttctttttacagaaagagaaaatatctttggatgtcatttgtgaatgttaagatttaagtcagctctgtgttaagaaaaatgcgttgttccctatcacctctgaaaaacaaccaaaagttgcgatagagtgattcattcttttttcttttctttttatttattttttctttaatttttttttgagatggagtctcgcctgcagcccaggctggagtgcagcggtgcgatctcggctcaccgcaagctccacctcctgggttcacgccattctccttctcctgcctcagctgggactacaggcacccaccaccacacctggctaatgttttgtatttttagtagagacggggtttcaccgtgttagccaggatggtctcgatctcctgacctcgtgatccacccgcctcagcctcccaaagtgctgggattacaggcgtgagccaccgcgcccggccagagtgattcattctaacattcaatgacctggcctcttagagtttctaaaccacttgactgttagttatatctactctaaggtgtctttttagccgcgttggaggaaatagacgtctttttgatctattcttcatcatttttgtataagtttgatatcctatgcagtcatatttagggatgctgaatagaaatgacttaaaaattatttttagaactgcatttctaggcatttgagtcttctgaaaactaagtctaagtcttctgaaaactagctttatcatcaaaactgaagaactgagtcatctaggaattgctgctttgctttaatgactgtaacaagatgagatgtgaataatttacaaactgacttctctaccagtcttctctctcactttgtcaaaatattttgatgtcctgacaaatactctttaaaacagtatctgcatagtgttttgccttgacaaagcacttttacacacattattcatttaattacaaatgatccccttgatttttttctgtgctcttccttttgtcccccaaaaacattattttaggaaaaattataccataactcagattcctagaatttattggttctttcaagaactttttttatgaagagcctactctatgttaagcatatgttagggaacaaaatgagtctctgcccctatggatgtttagattttagtgacagaaatacatagtaaacccataaattaatatatgaaattatgttgggtagtaagtgctatgaagagaaaataaacaaagcatgaatagagaaagattgaggagtactggcctatgtgaggaggttattttggggtaaagacttgtgtgaggccgggtgcagtggctcatgcctgtaatcccagcactttgggtggctgaaacaggcagatccctggacgtcaagagttcgaaaccagcctggccaacatagtgaaactacgtttctaccaaaaactagctgggcgtggtgacacgtgcctgtagtcccagctacccaggaggctgaggtaccagaatcgcttgaacttgggaggcggaggttgaagtgaaccaagattgtgccactgcactctagcctgggtggcagagtgagaccctgtctcaaaaaaacaaacaaacaaaacctgtgtgagtgagtaaaccatgcaaaaaccttgaatgaagaggattctaggcagaagaagcaccaaattcaaaagcccaatggtaagaacaggttttgagtgttgtagaaatagcaagatgagctgtgtatctcaagggaaataagatcagtagacagtgataggttctagaaagagggaaaggccagataatgaatggtcttgcaggccatagtttggaggtggattttattctgtgagtaaagagacatcactggaagtaaggaaacatcactggaaggctctcagcagggatgatgtgatctgatttatgtgtttagaagttgactcttgctgctatggagaattgactataaaaagagcgaaactgaagacacagaaaaggagggtggtggagtcatctcagaaggaaatgattacttggactagagtggaaatgataggtatggtgaataattatttgatcgaagatatatttggagggtagaattgatagaacttaagatagatagaatgtggagtttgagaggaagcaaagagtcaaggaaaattctgaggtcaatggcttgaacaaataaaataatgatgttgccatctgagaaagacttgggaatgatcacgtttgagtgtatgtgcttagaatgaaccagggttccatttttggattatgttgatagacagacacaaagggtatgattcagatattatttaccacttatacttgacaatctcaaattttggctcagtatcttgagaacatacacaaattaatttgtcacagggttttctaataatccattcatttctactaacatttcagaagtaatttccaaatcttaaagtttaggcttaatgacctaagacctaattccctaaatggccacgggaactagattgagttttcaccagtgatctctcaaggtcagctcagaacttaacaacattattgtcagtaggaagtaacttccccagtgattgttggaagcagcccagccttagaattaagagtcaaacagctgttcaagatgctgtgtgcgcagtaaactattcctccatagtatcacagacctgcaagcaggctggactattctagcccgtgcccttgatctcagagaatacaatctttgttttcaaagacttccagaaaaataaatctcaacacagagtttgttaaacacattttccccttatacactcaaaaatgttttttcattgactataattagatttttaaaaaaaaaacataatttcaggcctgaaatatgttcatttacttttcaattttacatcaaatttattcaatctcatttataaattaatattgttgttcatgttgttgactatctgaaacaatgaatggatgtatctgatacttcaatcccttatcttcacttttattcagaagtggagtgaaaataaggcggagctttttgtcatcttatttagatgattatttagtcaaactcatagaagcagagagtagaaaaatggttgccatacattgtaagggcgagttgttgctcaatggatataaagtttcagttatgcaagatgaaaaagttctagaggtctgctgcataacattgtgcctatagttaacaataccgatttgtgcacttaaaaatgtgttaaccgaggtccggagatcaagaccatcctggctaacacggtgaaaccccatctctactaaaaatacaaaaaaagaaaaaattagccgggcatggtagcaggcacctgtagtcccagctactcgggaggctgaggcaggagaatggcgtgaacctgggagacggagcttgcagtgagccgagatcgcgcaccactgcactccagcctgagtgacagagcgagactccgtctcaaaaaaaaaaaaaaatgtgttaacagggtaaagttcatattaagtgttcttatctcaataagaaaagatgattatggccttttctttatagcccagatacccatgttcataacttctgtaatactagctgtctcaaatgactattaagggaaacctctctttctgttgtttgctccattgcctctttcttcaaatttttttcttccatgaacccctatgaatttgctttagattactgggggcaatattcttgccaccctgccatgtacatcctggattgcttgcccttttccaagacctcgcttttaagttaactgagcattgcttgtcccgaagtgagcatttggtaaaatattcttatgtgtttgagactcaataaatatggtggctctttaaataaagaaggtccttttggtgacagaatatattcagcaactttcttgtcagacatagaaacaatacaggagacataaaaaataaggtagaaataacacaggaacaagaatgatgacgtaggatggcaaaactagtaaatacagatcaagttacagatatgactgttaacatcttgttctatgcctgctcggtatccatttgttgaatgaacagaactgttggatcatcctacatttcagagcctgtctagtgtcctctcatctcctacctaatcctgcagactacagaaaaagccccaagcagcagttcaaaccatggaacttctgagtgtttggacatgaaaatctcctttaagaaatcactaggttgaagaaggcaatgctaatgggaccacttcttgaggaaattccacccagtaactcagcagtgacactcagctttggatctggaacatgagtagacctagaataagatctgtccatttttcccaatttacagcattaattttttcacttatgattcatgagtccaggctttcccctgcaagcctgttttgcatctaaatcaacttggccttcatataacacactctagtgttctaactgggtgttctgtatcttagtcaacaatgtttactgagcatttactatatgccaagctatggctatggtttttaagcatcgataataacgatgcttagcagagactctcaaactgccaccatagagcaggcctgtggccgattaatgatcttaacaaattgattatagtatatgagaactggatgttagaacttagataaggttttagcaaatgcccacattttacaaatgaggacacagaggagcaggaagagtttatcaccttttctggatcactgcagccaggttctggcccagcccaggcttgaagcccaaggcttctgccactcagaacagtgctcttttcaccacttcagcctgcctcccaggatgattctaggaagttctgcttacaaatatgggtagtatttctagtcattccatcagattttattctgaaaaacacaaatttaccatttcaatatgaatacaggtaaaattcagcgccaggcaagctgtacatgattgaaagacatctgtgttttgaaaagcacgggcttttactcacatccatagtaatatgatcctaaatccactgtccccaggagaaagcaagatagcttttctccctgtcatgtcattacctatgcccagagttctcctcttgttcctctcatgaagcaaatcaatatctcacctttcatcccctccatacgtggttctgagctacttctatttatggcattatttagatatttttataatataagcaggaagcaagagggacagaaaaaaataatcagtggccaggtgtggtggctcacacttgtaatcccagcactttgcgaggccgaggcaaacggatcacctgaggtcaggagtttgagaccagcttgcccaacatagtgaaaccccgtctctactaaaaatacaaaaaattagcagggtgtggtggcgcgtgcctgtagtcccatctactcaggaggctgaggcaggagaatcacttgaacccaggaggcagaggttgcagtaagccgagatcgtgccactgcactccagactgggtgacagagcgagactccgtctcaaaaataaataaataaataaataaaaataataataatcaataacttggttcttctctattactttcaggaattttttaagtttctgatttcttccatggccattaggattttccacttatgtggcttccaaattattctaagtcagggagattttatgttttgttatcactcactttcagcttcactttagaattgcaagatttagattcaaagtgtgtaattaactgatggccttaggtaaaccctaacttatctgtatctcaatttgcatggatgaaacattcataatataaaagtatacaccacaaatatacctactcaaccaaactattggctccttaatgacaaagattaagtctctatatctttcctaactttgtacctaataggttcaaaataaatattttttgaatgaacaaattagtgagtcaacaatcagtcacccggttggccagtacctatggtgttttaagtgcaatctaccagataattcaaccttcataataaatagatttatcttgagattatcattgctataatagtgtagtagcatacttcatataagtttattttgtgaaccttaagaagctcaaggacaaacatctgtgtagtattcctaacattttctaaattgcatattttattttcatagaggtgctctacgtctttagtattgcttctaattctctcatatcactattttggacccttgggtctggctgtcttggaaaggtgaaaagaaaggtatggggaagaggatgtgttttaacaaagataattttatctgttcaagggattcaggaagtaattatcttaacatctgaatgctaacatctgaatattgtaaatacgtattctgtatgtacatgggagaaaatatctatatctgataccttttctatcatcacataaaggaactgacttctctggtttaaaatattaaccaaaatttatatgacaaaatcagtatatatgagtatatattttctcaaacctctttcaaacaggcctttttgggagacaagacacttatcaaaatcaaggctcttgacattaaatattcttgtttgtctttttttaaaaaaaagtcttcatttttctttcttttaaaatgcaataaattatactacaacatgcagtttatggtgagttattagatactgaaaaattggctttccattattttaatgcagattctacattgctttttttttactacataaagccatttgttttaagctccatgctacaaagaccacagatgttcattgcctagaacagtgtctgatacatagtagttgcttgaagtttgttaagtgactaaattaaagaggatcttacatataaccatgtttaaaattacatattgttatttatagtttttcccacatgataagaattattgccattttctttaacctctgacctccttgaaccaactatttctctctttttgtgggagttttatccttttgtatttaatctgaatcttttgaaattctaaagatacaatcacttaaccctctcttccatccactttcttttcttaatttcaggcaacaatgtgaaaataatggtgcttatgtctttgtaataacagaactttctttgtcttttctttggcctcattttaatcttcaatgactcatatttaagaaatgaactgtgcagctgtggtggatctaagtccttggcaacaactcgatgggcaaacacgtggtctctcacaatggatgctccttagctttgaattatttactgtccagttttaacaatggaattatatcatcaaatagtgccttggactttttaagtttttagtgccttaagtttttaagtttgatgagacctttaagatccatttccggccgggcgtggtggctcacgcctgtaatcccagcactttgggaggccaaggcgggcagatcacgaggttgggagatggagaccatcctggctaacacggtgaaaccccgtctctactaaaaatacaaaaaattagctgggcgtggtggcgggcgcctgtagtcccagctactcgggaggctgaggcaggagaatggcatgaacctgggaggtggagcttgcagtgagccgagattgcgccactgcactccagcctgggcgacagagcgagactccatctcaaaaaaaaaaaaaaaaaaaaaaaagatccatttccttattttacagaccttgttccaacaattatctccaccttctgtcaaggtcgtaacatatatctagggtgaccaactttcctcgttttcctgagactgtccaattttcctgaaactattctggttttaacatcgaaagtctctcatcctgaaaaactcaatgctggacaaaccaagatggttggttaccctactgctagcttccgtctttcactctaggttcaaatcattcctatgctaaaaagaacttcttatccctttgtcttgttatcctctctgtcctcctgtcgtgtcttcctcttttccttctcagaaaaagaaaattgaacatttgattttcacttgaaatacctactccttcttccactcactcctcagctatgcctacttctgaggcttctgccctccactgaaattgctctcagcacatctagtgaacactctgcaatgctgatcttactttacttctgtgtttcattggactcacttggtcaccctcttcctctcaaaattctcactctctccttgaaatttctacactcctcatttcccctaatctctccacctatttgttccttttctatctctcaagagatcctgttcctctgtttgcccattaaactttgatatgtaggcactcaacgtatattagctgaatgagaaaataactcctaagtattttttttctcctcaaacctcagaatttattatttccttgtggaaggaatgttagctttccaagctgagcatatcacagtcccttactctgtcccccatgcacagaacaccccccccacacacacacacacacaccatcatgttgcatttttaatattactcttcaataattttatcctgaatgagcatgaggggttctgaatcagaggcagatttcatttaattaccttacagtaaatattgttgctgtgcccttcctttgcccaaagacttacccctagggcaacatgatgaacgctgatgaaacattttcctacttgagtggctgggtactccataagtgggagactaggaaaaatcattttttctgcttataaaggagaaggaggctgctatccatctctcattctgaaaggttctctgtggaaacataacaggcctgagtcctaattccagcttctgcagaaaccagctagccctgtgtgtctcatgttttacaatctggaaatgtctccaaggtatgggcttcatattttttgaaatgtaaatacctagaaagatacccactccagtctttctaacaacatagagttcagcttaggaacctaccctgagctataaccgtttgaccctcttggatcagagaaatgaactagacaaattgctacagatctaatctccatggtgtgggaagtttctcaggaggctagagctttctgtaggtgaactgagacatccaggaaagtttatttcctcatacttagttgaattgcacccagcgtttgctcatctactcaacctagacactaagtgtcattcttgtttctttttctctcttctctccagcatctattcagtcaccaaattttcacacttcagatttttagacatttccctatcctatccctgtcatttttcctggtaccattgccctgagtcaaatcctcataatcttgcactgaattcttacaattgcctcattatctctctgattccatttctgttcttctcaaatacatactctgtatttatatcaggaagatctatttgaagcacacatattcctgtgccactcccttggttaaaaccgttcaaaggttcctgattaccttcaaggcaacacctaagcctcttagtggaccatatgtgatcatagagaggcagagcttcaaattctggtttaaaaatctaatgtatttccagatagcaatagtgtctttttcatctttggacatgccctctccttgttctttatgctctagaaacactggcctgcttgagattccgatacataccatactgcactatgtcctatgactctgcacttgcattttcctcttcttggaatgttctctagcatactcttccttgaataagtcatgttcatgcttttgaattctatgtgattactagcttctcctggaagcttttcccgattttcttccccatattgcgcaagtctatagcactgtctacattgtattgaaattatttacgtgtctgactcttctattatatgttaaatattcctaaatagaaagggctgttttgcattcaactttgtatttccagtttcaggtacaaccactgacacatggtagttcaatagagggagccattattatttttataattagtaatgtcagtattaattgcctcccttcaggtccaaacagagaaactaggcaaaatgataatttacttgaatttgggaaacttaattgtatgaaaaaaaacacaagaatacaacaactgaacacacacacacacacacacacacacacacacacacacacacaaacatggagatttcaagtgaaatatcaggagaatcagctttatatgtaagcagagtaaataactcacgtatctagcatgattttagggtacagaaatatcccattattcagaaagtacttccctatctgtaggctgaatcctaatattctacttacagaactccagtattttggttcaaacgccttccctttctctattgaattgtaaatagctgtggatgatgaatcattttgcaaagtatcagactcaggattcttttgaatggtgaacaccgctaagattttattaataaatgtgtcatacaatacagctctggaacacttctgtaacataatggcatatctgaaattcaaggaagaatactgctaatttgtttttccccagtgaaagaacagggcttaaattcagcaggcaacattgctaaaagacagagttgaaaaaagttacaaaaattaagccctagatcagggcaaatattactgttattgttaaacagttatattagcatttatgtagcatgcacttaatacttttattaataccctcacttctgagatcaaagaatctgggtcaataactctcttcaatggtgtcagagtatccgttaggttattctaggctcacggtatacctcacgatccttttagcactcgattatgtgtgaacttactgttttcactctgcttctagtgttaattttctcccttctttggatctagaaactttttgaaggcagaaactattcattttgtttttctcttgatcccctggataaaggaagattacagattaaagattaattctagatctgttcatttatagaaactagtgtccgcaattcctacatccataatagctcaaaacatttctactattctcaaagaggtcacaatggatgatgtaatgactatttttcaaaagtattgagacttttctcttagcttacctattttataccttgtcagacattttgacagaattaactggtgattgtcagttggattcattgtatactttaatatagcctaaggtcctgcaaatggcccttaaggcttcccattatgttctggatatccactatttggggtatgtttaagtcctcattagccatgctagagttttgcaatatataccttgaaactttagctgtagatttgaagtatggctgtcaggttacataaacaaagcactcttatctcaatgagagggcattaactatccagaatgctccccccatctccccagaatagctttacaaacacagcgctttcctcattaacagatagacccatatagcctttaaaaaaaatcattttataaccatcagtgtataaataaaagagatagaaattgacctgggagtttcataaacaagttctgagcacccaggattaattttgagaagaatgccacaagccaaataagcacttcttttcatctcatttcacaggccttcaagagggaattgaaaactaaagaacctgtaatcatgagtactcttgagactgtacgaatatttctgacagagcagcctttggaaggactagagaaactctaccaggagcccagaggtaattgaatgtggaactataataacatattgatagaaggatcagtggtgacggagcagcccatccattcttgctgccagggtctggatagctctcatattttcttggttaaatagaatcaattcaaattaaacatagatgctgaaaaaaaaataaggactcataaactaccatgcataaatcagtttgtgcattcataaataaacatcaaaagagattagcaatcagttattggaacatttagaaaataataaacaaagggagttatctgtgaggaggaattctattgttgcaaagactacaagttaattttccatttaagagcctgcctgaagtaaattagagcttgtggtatgcatcctaacgtttttctcctcaatagcttaagtgaatcttaaattgtcggattgatataaggtagaaactcaggaagatatactttagatgttctgggctgtatcaaaatttatgccaaagtataaaaaagccgttaatcagtaggttaccctcttgttcaactgtactctttctttcttccagtatgacctttttgacaatgtttaaaaaaaaagaatgtggcctaaaaccttgtcatattgccaatttagagctgcctcctgaggagagagcccagaatgtcactcggcttctacgaaagcaggctgaggaggtcaatactgagtgggaaaaattgaacctgcactccgctgactggcagagaaaaatagatgagacccttgaaagactccaggaacttcaagaggccacggatgagctggacctcaagctgcgccaagctgaggtgatcaagggatcctggcagcccgtgggcgatctcctcattgactctctccaagatcacctcgagaaagtcaaggtaccgtctacttctttgcttcagggccctttgagagactcaaaagagcttctaatctgaacttgagtgcagtgttatcttcccacaaagttaaagctagagaaatcagtccgtctttcacaaattcagtcttcattcacatggtattttctccaagagaagacagtgatctaattatttgtctgtcttcagttatatgaaatgaaatattaaaacagttacagggcaagaaatcactttgactttgatattaagtgattgtactaaagtctgatgtgtgtgtgtgtgtgtgtgtgtgtgtgtgtgtgtattggtgtattgcttgtgttacttagtatcagaatacagaaaaataaaacacttaatcaaaagccaggagtctaggtgttggcccttttgctaaccaaattacatgacttgggtaagttatggtttggtgaaataaggctgttaatgtgttgcccttcccttggaaggcaacatttgtaatacagtttcaagtttcattggcccactgcagaaatgagggaaaatcattatatatttggaagaccactgtctataagaccaaagttaaattcccttgtggcacaaagatggcaaatatattctgtagaaaaaaatacatatttaggagtatcattttgaaatcagcaactactcatctattgtcaaaatcacaaaaatcctcctagattaaaattcaaaagaagttaaattccctcatgcactcagcatgtttgccagcatctcagcatcctcattctagaagttgtcctcttccttggctttcatggaactgttccatccatgttcttcttcctatatttttctagattcttctcctagccacccctcaaatactgttgtgcccaagtttctaaccttagcctaattctcttttgattgtttaaaccctccctgtttgagatggcctggatggtgatgtatctacatctctagtccgcatctctcttctgatctctgaatccatgtggcattacgatcacaaatgcaactattctgaaaccaagttcatttgttctcctgttttccatttccctacttctgtcccctcttatctgaccttttttttcctgtttcctatttcagttaatgaatcatcatccaacaaattttccaggctagaaactttaggttcatccttaaacccttctgcattttcactgatggcacatgatggctcatgttacctcagaatagctcttttgtgttttctctcctcttttaaccaatgtcctttttaatccccagcatcttttacttagatgataacagtatacatctttaaatcccattcacccctctgtgtgcctggcatatctcagatactgcattttaaacatttggtgaattaatggatggatgaatggtttctttgctgatgttcctgcattacccagcttcttccaattccaatccaaactccttgcgggagaatacttgcctagagaatgaaatccaatgaataaggagattacgtggcccttttcttcctagccttgacttaccttctcagccatagctcctattctccagaccatttaatacactctgcccatatgatatatatatatatgtgatggcatatttgggaaaaaggggtgatatgggcagagtgtattgaatgtgtgtgtctgtaaagtatgtgtgtgtgtgtgtgtatatatatatatatatatatatacacacacacacatacatagttagatatatacatagtatatatacatatatacatagatatacacatatatatacacatagatatagatatagatatatctgcctttgcaaatgctgttctctctgtctggatccccctacgttgtctacttggcgaattctccttcagccctcaaggaccagccaaaatgttacctatctttgttgtctttcctgagtgtctacaacccccaactcccaccaagcagaagaaactgcttacagttggtactctcatagatcaccaagcatgctaaattgtcacacttaaatttcacatatattgtagcaacttgcttatgcatttttttttctcccagagaaagtgaagttgctaagagcaaggatcatgctgtacatctttgggctgctagcccagggccagcaacatatgaggaatctcattaggtaccttcatttattcactcaacaactgtttatgagtcattatataatgtgctggacaggtagttataaaagaaacagacttgatcattgccttcatgaagcctatggtctaatgttgaattgcatagctcttcattaaaatagtaggtaaaatttttaaaaagaaaagattaaaaatttgactctaatacttgtaaaatcccttctaccccaatgttttatgaccccatgtctaacatttaaagtaagggttaaccttgctgtgtactggaaaactaagggttttgaaatgtattacctagtattttaaaagcattaaatatgttgattttattcaaaaatatagggactaattttttgacagacttctccaaaaatgagaaataagttaggaaaatgtcccagtggaactaaattagttaatatgtcaattaaattgctcaatagataggctgtagagcagacataagggattcatttttagccatacttgtcacacaggtgcatttgtaagatactgagtatggatggagaagagaatgtgtacagcataatttaataattaaaaataactaaaagcataacagttcaagtatcagctggccttcacccaaccctatttgcggtattccttttagtttccctgtcttatctgttcttggtcttaagacaaacttcattttccataccctgattggtaaaactctcattctgatcccaatgatagcaaaacatataaacattaaacatacctttcgaaaaattatatttataacccagcacatctatctttctcagacatatatacacttaagttatggtacttatctgaatttttatgtactggtaatagtagatgtgattgggcttttgaatctgtgttgtattttatgcgtgtttcaaactatgaattacatgaattcatatatatttatctcccttcggtagctcttctttaattttgcagtggaaataaatcatttttctccactgcatcttattgacactgggtttgaaactctgaagctttgggggtagtagtttacaaagaatgagttttattaactaaaatttatttcagaaaaaaagtagaagtgtacttgaaaccactcttcccatttttccactcagcaatttaagccctcagaggattcatgctgtagggaacttttctaataaaccatggtttctctttttttattttattttattttattttattttattttattttattttttttttgcgacagtctcgctctgtcacccaggctggagtgcagtggtgctatctcggctcactgcaacctccacctcctgggctcaagcagttctccgcctcagcctcccaaatagctgggactacaggcgcccaccaccatgcccagctatttttttttttttgtattttttagtagagatggggtttcaccatgttggccaggctagtctcgaacttctgacctcaggtgatccactcaccttggcctcccaaagtggattacagcactgataactaggcagctagctagaagaacattttatatatccatatcagttcattttccttacccctagacactctatcatagtaccccccctccattctgatcttatgtgttaaataacttgttattcaagaaactaagtaatatgtgtttctgtgagatttagcattctgtaattgtattagcaaatgtggcttttggatttaaagaatgggtgaaacaacaatgactaagtccctggcctttatggaaatggcattattgctagctgatcatctgcgggtggtgaacatggtaaattaataaatggaaacacaatattaatattgactatattgctcactaagagaatctcagccttccaaacatagcttccataggaaaaaacagtagaatcaaatttaagttttaaatgcttctttacttttaaaattcatgatttatactgcttatcaaatattttaagggcaagatcatgacttttcactttactgaaaatagcaccagtgcttatttgactagacaaatattctaccttccttgtaatggggaataggaataactttttgaattactaggtgttccacatagatctgtaagtggaatatataaaggctttaataaagtagaataacttttaaacctgtagtctggatacaagatttttgttcttcaggacaatcccaaggtgaaaaggtttgtggattgttgttttctttttttttttttttttgagacagagtctcactctgtcaccaggctggagtgcagtggtgagatctcggctcgctgaacctcctgggttcaagcaattctcctgcctcagcctcctgagtagctgggactacaggcgcgcaccaccacgcccagctgatttttgtaattttagtagagacggggtttcaccatgttggccaggatggtcttgatctcttgatctcgtgatccgcccaccttggcctcccaaagtgctgggattacaggcgtgagccaccgctcccggccagattgctgttttttaatgttttgtttttgttttaataaaccatggtttctctttttttaatttttttttttttgagacagtctcactctgtcacccaggctggagtgcagtggtgctgtctcggctcactgcaacctccgcctcctgggttcaagcaattctctgcctcagcctcctgagtagctgggattacagacatgtgccaccacgcctggctaattttttttttttttttggattttttagtagagatggggtttcaccacgttggccaggctggtctcgaacttctgacctcaggtgatccgttcaccttggcctcccaaagtgctgggattacaggcgtgagccactgcgcccagactataaaccatagtttctctgtaccaaaagtggtatgtccttcttgagccaggaatatttcactgttcttagtttacctgttgactctgaacacagtttttcatacactgtaaataactctcccaggctgccatcttggaatatgcaaatctgtcgcatctatgtagttatgcatatcgcatttttgtcaaacttttaacttgcatttcttactgtgaaaagtcagggcagggattctatgagttttttctttaaagttcctacaatgaaatgttttgattaaaccttttttggcattcaaattgagattgatttaatgatgtgtgtagtaggctagaaattatgatgaagtgacgatgccatccttatttatcttcagcattcacatctaaagttttaagaagaaaactggcaaatccacctttttaggcttaccatcctcagtccctgtggctttgggtttttttgagaaatttgtcaaagaaacgctatgttagaatttgacattgaggaagccaagcatatttcctctgaatagataatgtgaaatgtgatataatgtattagaatttcatcttcactttggcaagcaagatacttgcaaccatgttcatgcaactatcttcccttattgcttttctcttcttaaccttggttctaaagttttcttcttattgtattaattttgttatgcttcccatttatatgagtcaagtcaaccttacttgatttcttatatatgagttatgtaaggaaaacttatcttttcttatagaattaggggatgaatgagcagatagaaccaacatgaacagggcgatcctaaaaatcattcaaaacatgtaagctctcccaactctgaataaacttgtgatatcttcataatgaataaggtatactgcctatagtaggaagaggaaaatttattaatgttttgtgcattgttaaagaactacaaatgaattgccgtgtggaggctttcattgttgttgttgtaaaaatgctatgtgtattaagtaagcctttgatggagaagaaaaaacaaagaaaaaatatttaatccttcataaatctgggttaaatatgaagctaattcctgttatttggagtaaccagggttttatctagtttacaaagcatgcaattgcaatgtttaaaagcatatgatttggcctttaatatctgaaaatatgtctatcaaaggccatattatagcgagtgtcactccatactttataagtacggtatatttttaatagaatgtttatgtactggtgataagagatgttactgggtttctaaaccagtactgtattaaggattttatgctattgtaagattatggattatgtgaattcatatatattgatttactttcagtagcttttcaatagaatatctagggtttaatacagcttagaaactaaagcaggaattattcatctttaaaatcctgaccaaagaagtggctggcaagatggctgaataggaacagctcaggtgcgcagcccctagtgagatcaacacagaaggtgggtgatttctgcatttccaactgcagtacccggctcatctcactgggactggttagacagtgggtgcagcccacagagggcgcagaagcacggtgggatgtcgcctcaccccggaagcacaaggggtcagggaattccctcccctagccaacagaagccgtgagggactgtgccctgaggaacggagcattccagcccagacactatgcttttcccacagcctccgcaacatgcagaccaggagattccctcgggtgcctacgccaccagggccctgggtttcaagcacaaaattgggcagctgtttgggcagacaccgagctagctgcaggcgtttttttcatatcccagcgtcacctggaacaccagcgagatagaaccattcactcccctggaaaggggactgaagtcagggagccaagtggtctagctcagtggatcccacccccaacggagcccagccagctaagatccactggcttgaaattctcgctgccagcacagcagtctgaagtggacctgggatactcaagcttagtgtggggaggggcacctgccattactgaagcttgagtaggcagttttcccctcacagtgtaaacaaagccgtcaagaagttctaactgggcggagctcaccgcagctcggcaaagccactgtagccagattgcctctctagattccttctctctgggcagggcatctctgaaagaaaggcagcagccccagtcaggggcttatagataaaactcccatctccctgggacagagcaccacggggaaggggcagctgtgggtgcagcatcagcagacttaaacgttcctgcctgctggctctgaagagagcagcagatctcccagcacagcactcgagctctgctaagggacagactgccttctcaagtggggtcctgacccccgtgcctcctgactgggagacacctcccagcaggggttgacagacaccctcatacaggagagctctggctggcatctggcaggtgcccctctgggatgaagcttccagaggaaggaacagacagcaatctttgctgttctgcagcttctgctggtgatactcaggcaaacagggtctggagtggacctccagcaaattccagcagacctgcagcagagggttcctgactgctagcatcaacatcaacaaaaaggacgtccacacaaaaaccccatctgaaggtcaccaacatcaaagaccaaaggtagataaatccacgaagatgaggaaaaaccagcacaaaaagcctgaaaattccaaaaaccggaacgcctcttctcctccaaatgatcacaactcctctccagcaagggaacaaaactggatggagaatgagtttgacgaattgacggaagtaggcttcagaaggtgggtaataacaaactcttacgagctaaaggagcgtgttctaacccaatgcaaggaagctaagaaccttaaaaaaaaggttagaggaattgctaactagaataaccagtttagagaggaacataaatgacctgaaggagctgagaaacacagcacgagaactttgtgaagcatacacaagtatcaatagccaaatcgaccaagcaaaagaaaggatatcagagactgaagatcaacttaatgaaataaagcatgaagagaagattactgaaaaaagaatgaaaaggaacaaacaaagccttcaagaaatatgggacgatgtgaaaagaccaaacctacatttgattggtgtacctgaaagtgatggggagaatggaaccaagttggaaaacactcttcaggttattatccaggagaacttccccaacctagcaagacaggccaacattcaaattcaggaaatatggagaacaccacaaagatactccttgagaagagcaacccaagacacataataatcggattcaccaaggttgaaatgaaggaaaaaatgttaagggcagccagagagaaaggtcaggctaccccaaaggaaagcccatcagactaacagcggatcatttggcagaaaccctacaagccagaagagagtgggggccaatattcaacattcttaaagaaaagaattttcaacccagaatttcatatccagccaaactaagcttcataagcaaagtagaaataaaatcctttacagacaagcaaatgctgagagattttgtcaccaccaggcctgccttacaagagcttctaatgaaggaagcactaaatatggaaaggaaaaactggtaccagccatggtaaaaacataacaaattgtaaagaccatcacactatgaagaaactgcatcaactaacgggcaaagtaaccagctagcatcataatgacaggatcaaattcacacataacaatattaaccttaaatgtaaacaggctaaatgccccaattaaaagacacagactggcaaattggataaagactcaagacccatcagtgtgctgtattcagaagacccacctcatgtgcagagacacacataggctcaaaataaagggatcgatgaatatttaccaagcagcaaatggaaagaaaaaaaaagcaggggttgcaatcctagtctcagacaaaacagactttaaaccaataaagatcaaaaaggacaaaaaaaatggtattacataatggtaaagtgatcaatgcaacaagaagagctaactatcctaaatatatatgcacccaatataggagcacccggattcataaagtaagttcttagagacctacaaagagacatagatgcccatacaataatagtgggagattttaacaccccactgtcaatattagacggatcaacgaaacagaaaattaacaaggatattcaggacttaaactcagctctggaccaagtggacttaatagacatctacagaactccccaccccaaatcaacagaatatacattattctcagcaccacatcacacttattataaaattgaccacataattggaagtaaaacactcctcagcaaatgcaaaaaaacagaaatcataagagtctctcagaccacagtacaatcaaattagaactcaggattaagaaactcactcaaaaccacacaactacatggaaactgagcaacctgctcctgaatgactgctggataaataaggaaattaaggcagaaatgaataagttctttcaaaccaatgagaataaatacacaacggaccagaatctctgggacacagctaaagcagtatttagagggaaatttacagcattaaaatccccacaggagaaagcaggaaatatctaaaattgacaccttaacatcacaattaaaagaagtagagaagcaagagcaaacaaattccaaagctagcagaagagaagaaataactacgatcagagcagaactgaaggagatagagacatgagaaatccttcaaaaaatcaatgaagccaggggctggttttttgaaaagattaacaaaatagatagactgctagccagactaataaagaagaaaagagagaagaatcagacagacacaagaaaaaatgataaaggggatattagctctcatcccacagaaatacaaactaccatcagagaatactataaacacctctacgcaaataaactagaaaatctagaagaaattgattaatttctggacacatacaccctcccaagactaaaccaggaagaaatcgaatccctgaatagaccaataacgagttctgaaattgaggcagtaattaatagcctaccaaccaaaaaaagcccaggaacagatggattcacagctgaattctaccagaggtacaaagaggagctggtaccattccttctgaaactattctaaacaataggaaaagagggactcctccctaactctttttatgaggccagcatcatcctgataccaaaacctggcagagacacaacagacaaagaaaatttcaggccaatatccctgatgaacatcaatgcgaaaatcctcaataaaatactggcaaaccgaatccagcagcacatgaaaaagcttatccagcatgatcaagttggcttcatccctgggatgccaggctggttcaacatacagaaatcaataaacataatccatcacttaaacagaaccaatgacaaaaaccacatgattatctcaatagaagcggaaaaggccttcaataaaattcaacaccccttcatgctaaaaactctcaataaattaggtactgatggaacgtatctcaaaataataagagctacttatgacaaacccacagccattatcatactgaatgggcaaaagctggaagcactccctttaaaaaccggcacaagacaaggatgccctctcccaccactcgtattcaacataatattggaagttttggccaggacaatcaggcaagggaaagaaataaagggtattcaaataggaagagaggaagtcagattgtctctgtttgcagctgacatgattgtatatttagaaaaccccatcgtctcaacccaaaatcttcttaagctgataagcaacttcagcaaagtctcaggatacaaaatcaatgtggaaaaatagtaagcattcctatacgccaataatagacaaagagagtgccaaatcatgagtgaattcccattcacaattgcttcaaagagaataaaatacctaggaatacaacttagaagggatgtgaaagacctcttcaaggagaactacaaaccactgctcaaggaaatgagagaggacaccacaaacaaatggaagaacattccatgctcatggataggaagaatcaatatcgtgaaaatggccatactgtccaaagtaatttatagattcaatgcagtctccatcaagctaccattgactttcttcacataattagaaaaactactttaaatttcatatggaaccaaaaaagagcccacatagccaagtcaatcctaagcaaaaagaacaaagctggaggcatcatgctacctgacttcaaactatactacaaggcttcagtaaccaaaacagtatggtattggtaccaaaacagatatatagaccaatggaacagaggcctcagaaataatgccacacatctacaaccatctgatctttgacaaacctgacaaaaacaagcaatggagaaaggattccctattcagtaaatggtgctgggtaaaccggctagccatctacagaaaactgaaactggaccccttccttacaccttatacaaaaattaactcaagacttaaacataaaacctaaaaccataaaaaccctagaagaaaacctaggcaataccattcaggatataggcatgggcaaagacttcacgactaaaacaccaaaagcaatggcaacaaaagccaaaattgacaaatggaatctaattaaactaaagagcttctgcacagcaaaagaaactatcatcagagtgaacaagcaacctacagaatgggagaaaatgtttgccatctattcatctgacaaagggctgatatccagaatctacaaggaacttaaacaaatttacaagaaaaaacctaatcaaaaattgggcaaaggatatgaacagacacttctcaaagtaagacatttatgcggccaacaaacatgaaaaaaagctcatcatcactggtgattagagaaatgcaaatcaaaacacaccagttacaatggcgatcattaaaaagtcaggaaacatcaggtgctggggaagatgtggagaaataggtgtgcttttacactgttggtgggagtgtaaattagttcaaccattgtggaagacagtgtggcaattcctcaaggatctagaaccagaagtaccatttgatccagcaatcccattactggttatatacccaaaggattataaatcattctactataaagacacatgcacatgtatgtttgttgcagcactgttcacaatagcaaagacttggaaccaacccaaatgctcatcaatgatagactggataaagaaaacgtggcacagatacaccatggaatactatgcagccataagaaaggatgagttcatgtccttggcagggacatggatgaagctggaagccatcaatctcagcaaactaacacaggaacagaaaaccaggcaccgcatgttctcactcgtaagtgggagttgaacaacgagagcccatggacacagggacgggaacatcacacaccggggcctgtcgaggggtgggaggttaggggagggatagcagtaagagaaatacctaatgtagatgacaggttgatgggtgcagcaaaccaccatggcatgtgtatacctatgtaacaaacctgcacgttctgcacatgtatcccagaacttaaagtataataataataaaaaaaaaatcctgaccaaattatttattcaatgtgaaattaattgtaagttagtgttgccaggagagcttattacttagttaccatgtattccctctcatctcctgctttgtttataaagctaaaagcaaattacttaggacagcaatgtcaaatcactttctttccccaaagcatctgattttagatagcgctgtgtgtgttttaaaagcccctacctcgacttaggcaaacagaaccttcgtttaccatgctattcccatcccgcctttgaaacttctgaaaaggcagagcggagtaattgtttcagacatctgcttagcatactttgaagtgcatataagttctttttcagtttcatttgaaccccagctgtcttcaccgaagtctataatcaatctgaattaagttgtcctacttctcctaataagtctcttattaagttctgcatcagcctcttagggagacttaaaagctaattcatgtagaattgccattttctactaattcacttgtcagctctccaaattccaacaaaaacaattgcaaagactattaatttggctcttcataaacaacttatgtaagtgtagtatacattggaaccaaacaaacgatttaaaacagtgggtgggaggaaatgagttgatggcattcaaaacgcttccttttttgactgttatgaaatgccttccacatcgaaagcataaagccatttatttaataagggaaacatccttctgcttttactttcatagatgagataatgactgaatgaactttgcttaaagacaggaaaaggctttagaacagttggaaaaggaacatgttctttttgtcattgaacttattttaatttggacttctttgtgttattttgatggactgtgataaaagaaggagctagaattggttattattgttattggattaaatcagagttgtacagctactcttctggtcatgggatatttaggagaacacgggtaatcaaaatgttcagctaatgagttcatctgattctactcaagaagtgtttaatcagataataaaaatttctccaaataataccatccttcctactatttgaaaacaaccatatcaacatctgatcctataatatgccaatcctgtttgctaggattttctgaaagctttgtttgtggtgggtaataactagaaatactattcctcaagagtctcgggtaataaaagattattcaaaaaacttaagtaatatactctcagtattagaggatatacaaatgcactcattcattaattcatgatatgattgaaacctatacccagagaagtctgatctcattatagagtgtgaacatttaatttatttcaaaaacaaaaattatattgagagttgtatagatggcatcttagttttcctgggaatattattatttagcaccaagctgagggagcaagaatttgtattagcttgtgtatacatgtgcatgtaccacattaactagaaacagtgctaaaatgtgagttatttatttaactgaaattccatatttcctaagaaaatggaatcacacagccaatatatatttttaattattttttgacatctaccaaagttgtgacaagaataaagttcacaattctgttactctcctaccgttcagtaaaacaggaaatgctttaagatcaaataacccaaggagttcgcttcttcctgtcatgcttgacaattacaattttcaaaatttaacagttagcattgacaccagtattatgccttacacaacctgaaattaactaagttaagtaatggcattgaataatttttcttggtaaatcagttttctgggtattatgggaacagttgtgtctgtgatactaatgtctctctcattttaatggggcctaagaaagaactttttcataataagattttttcatgttaaaataatatttttagttatagtttacacttactgcaggtttttctatttaaaagcatcttccgagagcagtgattcttaaacttatttacttcagttatcttaacagcatagaagacatagcctgacatctcccgcttccacttacctatctcctttttccatgagcatgaaatttctttgatgttcttgttttattttttaaatctcacatcaattttatggtattttccataatggattcatcatgttttaatatgaagatgctttttcttcaaattctgaagtaaggaatctttcagcacattcacctatggacatgaaagcgtaagttgagaatcacagtataaaggattgcccagtttttgcaggctttatctttttccatcaacttctgtcttttatgtacacagacaaaaagagcagacccttgctatttcaaatttatcttttgcaggttcatctgattattgtgatccaaagttccatgactagcagctcttaattttgaacatgtattatttcaagcttttgtgcatagtcacttaactaatgagttaaatggcattttaagtcaggttccatgaacgcagaccctgagaacaggggtctaggtgcctgtgatttatagagggtctgctctcaggagaagcctgtattggagttagggaaacaatacaggagaagaaagagcccagcaagtatgccatttcaggtgaaacctcacattgtgtctgatccagagagagagcaagccctcgagcagaaacctcgctgtggagttgtactctttattttattttatttttttgagatggagtttcgctcttgttgcccaggctggagtgcaatctcagctcactgcaacctccgcctcccaggttcaagtgattctcctgcctcagcctcctgagtagctgggattacaggcatgcaccgccacgcctggctaatttttgtgtttttagtagagatggggtttcaccatgttagtcaggctggtcttgaactcctgacctcaggtgatctgcccacctcagcctcccaaagtgctgggattacaggcgtaagccacaacaccgagccggagttgtgcctttataccagtcattgtctgtgtcactgaagtgctggcaaatatttgtcgactagctctgaggtgggatgaatcctggtgtgtatcaaaaccagttttcgtggtgtaaatactccctctaccactgatctccagctaccgacataatgccactgagtatggaattgggaggagatgcacacaattggctcttgggctctgctgcagcacaccactggctgtggtccactcctgggatatgggttacttcctgggctagggggctcccataagcagaggtcacatgtggagaaggcaggtagctataagacattaatagtcaaccatcacagcagctgaaggatggatgcccaggttaggtaaagtgtcccctgcaactaataagtaaacctagtaatccactcactcttcatattcaacttggctttttttaatgctgttttgtttttgcatgtacagtaattctttataaataatgagaattttgtttctttatggaaaatccacctaccctccaccctaccatgaatagcttgatagctgttcatcagaattagtgatggaagagaagagttaatgaatgaaaaagtctaagaaagtgatcactattagtaagaaaatggcctcataagtgagtttggctttatagttatggaatctgtaaatgtctaggcattcagacatgtccagacatcattgagaatgtcaagaattttcagtggcaatggttctcacctcagcatacatcagaatcacctggagggcttgtagaaactcaggttggtgaaccccttccccagagttcctgattcaaaatgtctggggcaaggctaagaagtcccaacttgttcccaggtgttcatgatgctgctggttcagagatacattctgagaaccaatattccatagtaaagctactgtgtatgtacctgaagacatattttgtgtagtgttagcgtttcttcaattacaagtaataaatatatcatttattatttcttttatatttatcaatatccagaagatttagtttaaaaatgaatgcaggcacacagcctcttgttggattgattaatagtttagatatgggagcatcatagggagcattgtttcgcttaggaaccttgaaatgaataaatggcttcttttctaaatctcacttgtggaagactttgacggtggtttatttcattttttcctgttggtattttaatgacactggtacaattttggggttgcttcagatgaccaacagcataacttgccttcccagtattaatttttaacgttaaaaatatttagtcatggccggccgtggtggctcacgcctgtaatcccagcactttgggaggccgaggtgggtgggttgcatgagctcaggagtttaagaccagcctggacaacatagtgaaacctcgtttggacaaaaaatacaaaaattaaccaggtgtggtggcatgtgtctgtagtcccagctacccgaaaggctggggcaggaggactgtttgagcacaggaggttgaggctgcagtgtgccctgttcactccactgtactccaggctgagtgacaaagcaagaccttgtctcaaactatatatatatttagtcacataacttttcactttgtgtaaatattttttgcatttaccaataaaaacaattacatttaaaaattctccttacacttttctaccaaacatactgatgataaaatagtactttatagagtttctgaatctaggatattaaaaatagttgggatcagtcaacactttttaagtaaaatctacttgctagatatgaatagctaacagcttctccaggagtgcctacattttataacttactttgtccaccccttgaggctctgtgttcagggggagggtatatttttgtgtatagaaatagagatgaggtgaaatagagatgaaatagagatgatgtgggatcaactgggagaaagtagaaaagagtcttagctgaagtggttgaggaaggaggatttttcccaaaatggtgcaaaaaacaatgtattaaatatctgtgaaaaagttcatggttgtggtatagggtgagtggtatatgaaaagagaattatgggataaactaatggaaacagatgtcttaaaatttgcttttaactttaaacaagagacatgaaacttaaacttttcccttatcctagaatctgggagaggagaaggatgagaaaaaatgaaattttacattagaagcaatttgattaatgttcaatggaaaatggaaatagctatggtcaaacccactcaaatcaagtgtacattaaataattgagttaactgaattaggcagagtaagggcacattgattttcagtgttgttgaaaattggtccacatatcattgttatgctttttgtttgtaaacctcaatatttattaagtttccacagtgtgctcagccctgaaacgccaaattctcttaaccagaatgaggctggaggatctaacactaagacagatttctattttcttttaaggaattgatttttatggtaattttttttcttcataaagttaagaacctgccagtcctgtttcgaaacacacttatttttagaagtttggttttccgggattatgcatcattatagactcaaatgactcatttagaacttttccctatcaaatattcacattctatcatcatgatcttaacacggcataagcaagttagtgaacagagtgaagtcaatttattggcaatatatgccgaagtacaggaattaagtagaaacaaaagtgaatgagagtctttggcaatacattgatgtgttttttttagaaccaatgataaactactgctgagtttcctttcatttacttttttcctactcttaaaacattgtaacccattttgagatctatccattgttgtgaacctaaagcctattaggtcttattaaataatacccatttaactgacctgtgatttaagtttcttatctgcccccaagcaagcagactgtatgcaacggcattttacctgcttcaccttctgcttgccagttggtttttggtcttcacatgtttctagcagggatggggctaaagcaagggagagaatggtccattgttttagactttcacaaacccaatatactagaatctccacaaaggttatccaatatcagggtgacttttgtgcatccaataaagcataaggttaaaagaaatacaggctaaacaaatgagcataaattactccgttggcttatgctgtgaataaaatattacctttggaaccatctcaattttttttttgtataaaggttgaaggaagacatttgcaaagtcgtttctcctataaaactgcctagggtttggggttgattgttgtatgcaagaggggtcttggtgaaatctgacccactttgaatctaaaattactgaattattagtgaaaagattattttaaaaagagttttgaactctttttcctactgaaattgtattctcctttagataatcaatgcagcatcacccccacagatttttgagggcactaaatcatactcctattttgaaaaagaaaaaagtctattactattaaatatatctgttagttgaatatcaatcactttttctaaagggtagatttggccaatgagtgatttttttttttttttttttttggaaatcacatctgagaacgttgtttagacagcttgacacttagactcatttgtgtaagtagtaatttattcatcatttgcatgtacttaactggacattatcatgatagcagttgtcataacagactattacaggatatgaatttagatattaccttaagatgtgatcataaaaatcagaataatatcttgaaaatatcaattttatggtgagaaaaatgacaaactgaataaactcttgactcaagaagctagacttttcacaacctcatgtattcacagaagtaaaaataacaactaataatgtgtccagagggcccacattgctcagaaatgaatacataagactttcttttcagcctcagaatatgatgaaaagaagatgaaccattatgatgttgcatagattttaatgaagaaaattcgttttctgttcctttcgtttgactttaagtagttgaacatcctgcttttttattttgtttgcaagaaataagaccattttagaaaggctaaaaacattaattacatttaggaactacaataatctgaaagtaaaattggatattaaaggacgtttttgcaatcctttttagccctcttctgtgtattatttttatcactgctcttaaaaatttgtattaatctttggttcatttctgccttagtatttctaagttaataatatattgaatgaaaaatcaaatcagtaaaaatccattttgtttcagtagtgagtgccttccccctagaaccaaaactaaataaatgtgctccatataaagcaaaccaggtacagcatattgcacgggtaactcacaattctagattcctctattaatcattattcagacatgcagaggtagcttaatttgctttaataagtgaaaacagaatctctttgagactgctatctgcaatattatactttgtcctgcattttcttggtcaaaaattgtattttatagccatgatatattttggcttggaatttgcttctttataagcctagttattaatagtcatcatttaaatgaaatgatatccattagccttaagctgcatgattacagagacttggtctatcttacgctgtatttccagtgcctagaacattccctggcatataataggtacccaataatagtttttggaataaatgaataaacaaatttgtgcaaaagcatagggcaaaatgctatcttttagatagcgtgacccttaaaaattattttgcaaataatttgctccatttgccaccagcttatttctggccattgttacttcttgtctctgcatacaaacactctgtgtctcttctcctttccacaatgaccacaagttatactgatctacttgagattttccaggtgactatttcatgtccagaggaacatgcctcttctagtgttcccctctgtgaatgatttcagtcaccttatctactcaggaggtctctcttcccctccatcagcatctttctctgcaccttccaaacccctatgactcaacttctcataatatggattgcattttttttaatgacccattaaattgtgtacctctgctaatgattgtgagtgtgttgagacttccatttttccagtggatgataggtatataatatatatatatatacacacacacacacacacacacacacacacacacacacacatatatgtgggcacagtatctagtggatataaagtaagtgttttcaagtgagtagtaattaaatctaagagttgccgagaaaatgccattcccgttttgtggacatcttcattctacattgtaaaggccacctcattcaagacccaccacaatcttgatcccagaaaacacccatgattcatcttttacagctgccctgtacttcatattttaagttattaaaggctatttgcttttcctcagacacacattaaactttcctacctcttaccctttgttcaagttctgaacacatatctttcttccccacactatgcttcctctttatcagtttcatgtacctactttccaatgtctagttcgaggagacgtttataaggctacatgatagaggttgcccctggggcgatgtgagaaatcagctccaaaaaggtagctacccggcaaaggatcttagtctgtgactctctcatggatgaacttattacctactgctttgcagagtctccctggactagcctgaataggaacttgtgtgactatatgtgaactaaaagaaggagaaatatgcctaaacttctcatccatctttgtaacagccctaaagtatgcatgttactatcccttttctacacaagtggaaaatatttgtaaatgaacttcgttacagtctaatatttgatgacttcttagttcatatcattatttaagtaacttttctttagtggaaaagcccaaaaattagggaggcagggagagagagagagagagagagagggatcatctgtaatctcagccccagcatctataatcccaatccctgcaagggcctctttgggcaaagaagaaaaaggcactgtgtttttgaagagatccccggtcctatgccaagcctaaccaatttggtagtagagcccaggctggatttcagttggtttgtagtcttctagtcttttcatatgtaaatatttttaatgcttttattcagtgttgttaaaatgccctccaaaagatgcactaacttgtgccaccaccaccaagcagaatatattttccttgaataggctacttcctctttttttcccactcactccatttttattttaaaaatccctggtagagaccaaaaactgaaatgttatattcttgcccaaagaatgagagatgcttcagaaattagcaaatgctccaatataaatcaagtgatagatataaataattcagatatgggataaggaaaatgggtagctttctcttatttaggaactctatgtcaggtttctgtgagaaactgtttacgaagcagtctgacaatagctattggtctgaagtattagtaattagtacagaagtgcctaattctcttgactgcttgttctttaataaaaatgtattgagggattatcatgtactatggcttggcatatactggtgaaaaacaataatgtaggattgccttaataaattttctggtcttgggaaggaacagacaatgaataaatgaataggcaaatatatatgtacttgcaaattgtgatcagggttcagaaggaaaatagggtgttgagagtcaaggaaaaaggagacactttacgtagggcaaccaactgggaataggctatctttaaaagtcacatctaactgagatcagaagtatatgaataagagccagctaggcataaagtggatatataaaactccaagcagagggaacagtgtatctgaaggttctaagtcaagagtaagcttgggccaggcacggtggctcatgcttgtaatcccaacactttgggaggccgaagtgggaggatcacttgagcccaggagtttgagaccagcctggaaaacatagagagatcccatctcgcaaaaaaaaaaaaaaaaaagaaaaagaaaaaactaacttaaaaatatatatatatcaatgccagtggtgtgtgcttgtagtcctggctaacttgggaggctgaagcaggaggatcgcttgagcccaggagtttgaggctgcagtgagctatgatcgcactgctgcactccagcctgggcgacagaaagaggccctgtctgaaaaataaaataaaaataaataaagaaataaaaagcttgatgagttctaggaactcaacattttctaacttcttattagaaatgccaaattctcaggcccaccttacacccactgaatcaaaagcactaagtgggactcagcagtctctgtgttaacaagccttccacatgacaatgagatgcacactattgtgtgagaatcactgccttagactgatgttttgagctatttaggggagggagagggcccattcagggacaatggtggttaacacatgtggctcagaccaagaaatgattgcaagcccaaaaacttgttaaatgtaaaacttcaggcgcagtggctcacgcctgtaatcccagcactttgggaggccgaggcgggtggatcatctgatgtcaggagttcaagaccagcctggccaacaaggtgaaacccagtctctagtaaaaatagaaaaattagccaggcatggtggtggtgtgcgcctgtaatcccagctacttgggaggttgaagcaggagaatcgcttgaacccacgaggcggaggttgcagtgagcccagatcgcaccattgcactccagccggggcgacaagagcaaaactctatctcaaaaaaaaagtaaaacttcatctgtctgaagtaacttctgaatttgaagataaacatcctcatggttgatattttaatggtttatggattattacttacttttaaggaagttaataggtttcattaactgccattttgcttcattttgtcacatataattaaaatttttcagacagaaaatattggtattttttctgtttccttagcaacctaaagcatgacctgcttaaatgacttatttgtgctcattaaaagcctttttgtgttaattgtgtatattttgtatttagcctctgtgaaacactcatgaactatctttttatttgttttaattgtgtcattggaaagcttgaagtattttgtggtttttttttttttttttttttttttgcttgttttttgtctataaaggggagataactggcagttgcagttaggattatagaaacattttcccaaggaaattaataaaatttgttcaagtttcttcttttacaaattgtacttatttttgattttttaaatagtggtaaaatacaaattacatgaagtttactatcttggctctatttaaatgtatacttccatggcattacatacatttacgttgttctgctgccatcaccaccatccatctccagaactcttctcatcttgcaaaactgaaactctatgtctattcaacgataatccccaccaggcatggtggctcacacctgtaatctcaacactttgggaggccaaggcaggcggatcacctgaggccaggagttcgagaccagcctggccaacatggtaaaaccccatctctactaaaaatacaaaaattagctgggcgtggtggtgcacacctgtaatcccagctacttgggaggctgaggcagcagaattgcttgaacctgggaggcggaggttgcagtgagctgagatcgagatcacaccactgcactccagcctgggcaacagagcgagactccatctcaaaaggaacaaaaaagaaaaaaccacagtaattccccattgcttcctgcccccagcccctggaaaccaccattctatttcctgtctataaatctgaatactcatttctatatcttctttggagaaatgtctattcaggttacttgctcattttttagtcaggtgatttgttttcttgctattgagttgtaggagttccttgtgtattttgaatactgaccccttaccgggtgtatggtttgcaaaatatcaattgctcctgctatgttcaacttgttcttaaaaataaaaacttttcctttgtggtcaatacttccctgttcctcatttccaaattttatacatgaaggaaatgtgagcacccagaaaagaaagaagatagacactgttaatatggccaagatataattcggcttttattataagaacattggagttacaagcttcatagaaagccatgtcctaaaagatgaagaattatgatcagtgcaaagagaaaatgttaaaaagaaaaagttatccttttatgtttgggtatatattctttttcgatattgtaaagagaaactagagttttttgttcttgtttttgagacagagttttgctcttgttgcccaggctggagtgcaatgttgcaatctcagctcactgcaacctccacctcccgggttcaagcaattctcctgcctcagcctccagagtggctgggattacaggtgtgcaccaccatgcccggctaatttttctgtttttagtagagacagggtttcactgtgttggccaggctcgtctgtaactcctgacctcaggtgatccacccacctcagcctcccaaagtgctaggattacaggcgtgagccaccgcacctggttgagattgttttttataaaaagatgtggattctttatggaaaacacagagcagttaattgctatttttttaatgtcacaaatttggaagcgtgttgagtctgagaagaaaccatagttaaaatataattactgataatcgcttgggaaataaaagccctaaatttcttcatgcctacaaacttaatattgttttcccaagatcttttttttgactttaacctttcttaagtgtttctgattatgctaaatctaggccattagttctgagtctgtttcattatttatattgttattcagtttactcgtcaaaagtgatcatgcccaaatatgaaagtttacaagaattgccctgaaaactgaacggaaggagacaacgaaaagaaactgcataatattttgccttcaggctatcacaataaaaactgttgctggaaaaaaatgcaatcacatcccttttttttttttaaagtacgtttcaatggcataatttattgtcgagaatgtctctaccagaagcataagtgatactaaaggcagagggttgtattcgctcagtctgcaaagtatcccctttgtcttagctccacacagtccctcagaatttggcagaaatgagggactcaactttcgagaaagggtgacaatcccagttttgttggagagctatgaaatagccccatagtgttagtaatgaaaattcacttaagaagtctcctgcaggcccggcacggtggctcaggcctgtaatcccagcactttgggaggcctacgtgggtggatcacctgaggtcaagagttcaagaccagcctggccaacatggtgaaaccccatctcttctaaaaatacaaaattagccaggcgtggtggcgggcacctgtaatcccagctactcaggaggctgaggcaggagaatcacttgaacccaggaggtagaagttgcagtgagccgagatcgtgccattgtactccagcctgggcagcaagagtgaaactccaccttggaaaaaaaaaaaaaaaaaggaaagaaaggaaggaaaggaaggaaggaaggaaggaaagaaaaaagagaaagaagtctcttgaaaaaaagaaaggaagaaagaaagaaagaaagaagtctcctgtataaaaaaaggaaagaaagaaaagaaggaaggaaggaagaaaagaaaagaaaagtctcctgaaaaaaaaaaaaaaacaaaatataagtgcttgacaactgaagttcaagggtaaaggctattgggaaagcagatgaagttaatctaagtaatggatgctgttggtgccccagtcagattcgttcactgggttggtgcacccattcctcagtgactctgagtattagctgctaaagcctcatggtttcacccctttccagagaacctccctcagccaaaaggaagccaccttgactggcatgtcccaccacaccttctctcttaaaaccaccaggggtacaaagggaaaacccctttgcctcatcatggcacctgctgttgtacaatttgtgatctgggaattcccatggggccagattgatgctggtctccagcccataccacatcccaacttaactttcttgccctgtcttcctgcttctctcactccctttttcttaagagcactcagactctgcttctcttaaacctggctgaaggcagtaggtatctgaaagaaaagctgtacctacattctgggcatcagagcagtcagggaaccaaccagaatgaaaagtcaaaaattacagataatgatggaagtctctgagcctgatacatttcatgaagggcttgcttacagctcaacttgtgtttctttttaattgtttcaacagcatttgagtagctcattccgcccaggtatttgagagattccagtaggcctctgatcctctggaaaaagcaagatacagtccttgactctcttggccccatgaggatgatatatctgctgagaaatgcaggagctgcaaaacatagctgggctgtacctgctgccaattcccgggtaattgcattctgtgagggcttccctgaaccacgaggaagagccccggaataagtactaaacaccagtatttataggacatgatttctaattgctcatccttgccttctcatgactagctcagcatgaagaatgctgggacttttctttcctagcacctcctctttttaggctgttttccaagagtcttggttaacaaacatttgtttgacaaggattcatggtagacagcaatgccattagtccctacttaagtaatatttgtaacataaatttctctgcacgtgtatgtagcccaagaataacacttcatttttggaacctagtaattttgaattcctagtaagtgagataggacgtctatgagttagcaggttaagattttaggaggaatatttaatatccctaagaagggaagtttttcaaacactgagtagcactatatatatttatatatatatagccagatttctatctatctatctatctatatatatatatatatatatatatatatatatatcacaccatttataaataaactcataagtggcaaatccagtagagctaatctgagcatcccagagtctcccctctctgtcgcttgtttgtgcagctactcctgctgtggccttttatggattatcctggacttctacaactgacccctctactttctctccatctacaagcttcattttgctttgctttcctcctaatccagtttagattccacagtatattttttcaattacatcctggctaatatcgaaactcccttatccctaaatgtgtgagccacagtcatctgacgaaaccccaaacctggatcaactgttttccccatgcttacatgcaacactgttggagaaaatgagaaagtcaggcagattggttctgctaaaaaatgttgaacctcatcctcaagtgggccctcaacactgtttgccaacctcattacatctcttaggtcaactccctctcacagtctctattacgattaattcaaatgttcccacttacccttaattcatgttttcattcagtgactattcattgcacaccaggcactgcacgctatgccaggcactgcagactatgccaggtctgttgattcctacttcacagaggaaataaaacccctccaagcagaattccctcaatttactctttctagtctttccaactgaccttctgtgctttgcagtaggaatgttctcttaactgtcaagtcaaaattcctccctcaaaaataagattcccttgttaatagacaattcctttattttcttagaaaagtagtagatgactataattttaaatgtgtatttgaacaaatccttagctacataaagataagcaaagatatgacaggcaatttaattttatatgaagaaaaacttattatatcagacttacctatcattctaaatcagtacttttgtatctataatcagacaacatttaatgaactgaaaattctgcctgtgagaaactagtcataataaaattagacttggtttgctctttcatggagaacatattccagatgtttaagtgattcaaagaaaacccacaatataatggctttcttcaatgttttctcacttactgcttccaaactagaaaaaaaacctaatgcaatcctgatatcacttaaatagcacctcgtattgctcagcgttaactgtgctttttgacattttaggtgtagtgtttaataatttaaacacaaatttatgtgtgtcatattaaaagctctaatctgtgaaatatagccaaaccaatgtcacatctatttaaatagcaaagtacctgtgttcaccctttacagggtgaaggtcttgtgactctgtgtttaggcggccatacttcttgttatgtatgctgctgggcactgagagcccacagtggtgagccatccttgggtggtaaaagctgctaccaaaacctaaatcaaatgccaaagtgaagactgacatgagcattctcctgcctccttttcctttttatctttcctaccatctgttatctcctttcttccaccttcatgcgttgagtgccctcatgatgatttctagctgactgaagtcctttagtctgctcaaccccatctagagacttccccaaagtgaacctttgcccccagttatctgtttatcaactgacctcacaccagtcaaagcttccattgtcaaatattttaacagaaatttaggaattcagattaaactgaatatttggcattttttcttttttttttttttttttttttggagacagagtcttgctgggtcacccaggctggagtgagtgcagtggtgccatcttggctcactgcaacctccacctcccaggttcaagcgcttctcatgcctcagccccctgagtagctggtactacaggcatgtgccaccacgcccgaataatttttgtatctttagtagagacagggtttcaccatgttggccagtctggtctcgaactgctgacctcaagtgatccacccatccacccacctcagcctcccaaagtgctgggattacagtcttgagccaccccacctggtctgggttgttttcttcatctttagcagttgtcttgttcacaactacttcaacaatatttattttctttttctttttgaagcaactctccagagtatttggcctggtttttatagaaataataacttttttcttttctttttaaactaatatttttatgatttaggaaatctttctttattaaattacataatcacaacagttactggcaaagataggtttgagaacatacacacaactgacggttgtaacaagtcaactgatgggagcagaaggtccacacatactgacaggcacctcgaacattttattgaggctgtgagaggttcccatcactgctgtttcacaaagagaatgaagactttggctaatttggtgagtcttaagtggagattagttcagagaacttccactatcattgcttgaaagaagcaaaaaaaaaaaaaaaaaaaaaaaaaatcccaagatcttatggtaaagtttaaagaagaaaagtaaattttaaaaagaaaaaaaaagaggaaaagggagagcattgcaattaattatgagtaccaaaacttatttttgaatccccttcatcctccaaaacattgaagcaggattaatatgtgtgctcaggaatttgggagagaaaatgaaaatcaaaatattctaataagagacatttgaaaatgtacattgtgtcacctaaagggaactgaaatctagctatggcttaacgaggtaggataatcaacttaatggcttgagagtcttgcttgtaaagagagatgattagcacaaaggactcacctgtatcactgaaagatgctgcctgctggcttgccctctctgcagaggttcctgtttacagtttcccctcacatgatatttatttgtggctactagaaatgcacgttattatccagaagagaatgatttcattttgtaaccgttgtccttgtccaagtttcccccattgacatttaagaaatctgttttctaacctttctattatgcaaaacaaaattaatatggatcatttccttttagagataagtattcatatatatggatttaaaccacctttctccatgggcccttattctgatacttttaatccatgtatttattcataaggaaatggaacaatatttactatccacccctataaaactttctgaatttcacactgattccagtgacattccactaacacgaagttgaatacagatgaatacatcacatatgattttttttttgcatgtgtatggtcagaaggggctctcttttgtttgtttttattaatatataattcacatactttaaaattcactctttcaaagtgtacaattcagtggtgtttagtatattcacaagattgtgccaccatcaccattgtttaataccagaacattttcgttatcgtccaaaagaaaccccctgattgcttaacgtaatgtttttaatgaccactttttaaaactttaagttcaacagagtgattatcacaatgttttgtattatctaagaactacacaacagtgttatgctctatacagcaccacggtttactgatgaagtattcaggttgatttgagaggataatgtcgttcttattttgaatgttcatactggctccttttatttggagtgggaggaaatgcaaggcttataaatgaggtcagtgtaaccaatggttttatcaacatagtgaaccagacagagaaataacacctgcccagatcaagcaagtcaaaacaacacgtatagtcaagtggtgctgtccttgtacacagacattacattacacaaactgttctcctaagtgagggaatttgtcccttagaaattgcttattggaacatttggacatcatgcatcatgttaaagatccataaatgccatctcgatagggtagatatgaggcgtggtaatatcctccccatatctgcatagggttcttctgctcaacggattgctatgatgtattgcatcagagactcctgctctagtgcttcaaagacagctgagaagccccacgggagccttctgaagtcattgctacaagggctaaaataccaggagatcaggaagtcattctgaggacttgacaaaataccctactccctaaatgaaactgttatgatgtggttggtgcaaagtatgcatgcaatattttatgactgaatatatctttctattgtaaaaaataaggatccatttctggttgtgacatgagtagaatttagaatccagcagcaatatatttttcttgttactttgccaatccagaatttcttaggggaagcatataacataatagttaagaatatatattctagaggcaggcaaacctgcatataggtatcccaggttcctcaatttttacccatgagagcttggcaaggtttgtttgttttgaaaacaaacctctgcaagtttgttttctcatgtataaaattagaattctccaactactggcctcataggattgttgggtagaaataaaatcagtttatgtatgaatagagctcatcatggcattaggcacctaggaagtgctcaacaaatagtagttatcattattcccccattaacaaatatccattgttataatactaccacaagagactgtcttagtctgttccagctgctataatagaaatgccataaattggatagcttgtgaaacaacaaaaacttatttctcactgttctggaggttgagaagtccaagatcaaaataccagcagatttggtgtctggggaaggcccattcctcatacaaagcaccttctcactgcaccctcacatgctgaaaggagctagctagctctctgaggtctcttttataagggcgctaatcccaaaaatcacctccctaaaggccccatctcctaataccattgccttaggtgttttgatttcgtttcctttttattttttaggatttcaacataggaatttgaggggggacacaaacattcaaaccgtagcatagagcaaacattactggcactgcaccctaaagagaataagcccaggtatcagttcttcttgttttaaatattctcatcttccaatttgcttttgactattgcacacaggcacttcgaggagaaattgcgcctctgaaagagaacgtgagccacgtcaatgaccttgctcgccagcttaccactttgggcattcagctctcaccgtataacctcagcactctggaagacctgaacaccagatggaagcttctgcaggtaagcacattgtaaacattgttgtcctttgttacagtaaaataatatacagataaaatttgtaaagaacaatgaaagtacttttttcatgtaatgttcatggtaatatttgtgaggataggatattttatattagtttataattcccatctaaacattttcaaattattaatattaattttggaagcaactaagacttagtatatgtcttagtctgtttagtgttgctataaaagaatacttggggctgggtaattcataaagaacaggtgtttatttggctcagttctgcaggctgtacaagaagcatctgcttctggcgagggcgtcaggctgcttccactcatggcagaaggcaaaggggagctggtgtacaaagatcacacggcaagagaggaggagaaaaagagggaggggaggtgccagttctcatgaaaactgctagagcaaaacctcgctcactaccgtgagaatggcaccaaaccattcatgagggattcactcctacaacccagacaccttccactaggcctcaccaccaacacgggggatcagatttcaacacgcgagttagagggaacatccaaactctgtgtagcagtattcttacgataaacagaaaataatgctgaatcatgatggaagatgtgaattgccaccatgcagttcctttgtactcttactgcttggattctcaaaaacatctttccctttagaatcctaatttaaacaagagtcaatagtaagatgtgtccaaaagtcatttaaagaaagagcatcctatcacaaacttacatgtggaagtttttcgtaggtttgcgtaataaatacaggcaatgtaagtgtgctgctcaaggtcacacttactagccatgggacctggagcaaattacttaacctttctgagcctcagtctttcatcaaaaaaaaaaaaatgcgataataaaattctctgcaatatcagtttattattaggatgaataagtcaaaataaatggaaagtgctcgggagcgaacatgccaaatgataaacactctacaaattctagctcttgatgttgttattattattattattacagtacacaggttttggaatccaacatattagctgagtgaccttgaggccacttaatctctgtggttgtccatttactcatctctaacatggttactgtaacatcgaatgagttaattcatgcagagtaatggttgtagtggtggaagaggtgcgtctaccttctcagtgtgaaggacaccatgttataccccaaaaccctaaaattagtttaaccgtagaattagagaatcattttctctcctttccaattttctcctttccaacaggatgcagaaggtatgcctctgaggaaactgggtttaaaactatttggttttaactttttaataagaaaaatataataaaccaaatcactttcctattgtcagtccatttaggggtgtgattgagaggcctgttaaagaattgctagatctttaataaagataagttgcaaatcccagacctcttgagatctcacataatttaattcttgttgtgatggatagtcctgaaagatttgtattctagattgttataagtggcatcgactaaagcaaggcgatatagctaagtgattatatgcctttctctgtttgctccatagtagttgagtactattaaaattttatctgttccatccttagtatgtttttcatcttaagtataaataaggaaagtaataaatgtccaaagaaaaccaatggccacattagtcccatataagtgttctagaagtatattttataatttcttttagagagcagaatgccacgtttgctttcagaacgtggtaaaagatttgtgacagtggcaggtagatttccaaatgaggtcaaaggattatgactagtaagaaaagtttttttttttttaatcaatgctaagtgatccattctagttgcactatttatttgcatttaaggtatcaaaaacagtaaatagcttactatgtagccattctttacaatgagtaaaaacttggttataagtacaggaaaacacatgtaaggagatagtatgatatagcgaaaagagcattggattgactattaggaggtctaacttcaaacttaagctcagccattatttgaccgtgttattgtgagaaagccatttaacctctctcagctttaattctcctcatttttaaaatgcagaaatctattttgtctaaggtcacatacagttcaatcttatgattctgtctctagatatctgggggagatacacatttgacagaatttagtttaaaaccaatgaagttcctttctttattcataatacaaatgtggtttgttgaaattatatttctccttgtataactctaacttttaatctcttcttccctaaacccacatatacacagccttctcctattaaacagttcagtttgtggtgtctgctctatattgtagcaaatttcatgtttctatttttgaacatgaccttaaagatatgcttaaaaagtgtttttagcagaaagctgataaatccaaggttttggtttgcatataaccgagtcaagttagttccattcttttctttgatagtaattctgctacattataaatgtgaggccttgttcagaaagagaagaaagcaagaaatgaggttcacatcaagcaatttttttcccattactggaaaagcaattcatacatcctgttgagaatattttatatttagaacaatgtatgtgaggctaacgcattatccaagttctatggcgggaagcttgagcccaccaccattatgacatcatatttttttaaatagtaaatgtcaaaaaagacatatttctatgaaaataaagaatttagtcacaatgctatgtcaatctttaaatcgtgataaaaaccaagtacaagttcatctttgcctctgtccactaagacaaagaacaatcaaaaagtaaagaactctctgggcatggtggctcacgcctgtaatcccagcactttgggaggccgaggcaggcggatcacttgaggtcaggagtttgacaccagcctgaccagcatggtgaaacctcatctctactaaaaatacaaaacttacctgggtgtggtggtgcgtgcctgtaatcctagctactctggaggctgaggcaggagaattgcttgaaaccaggaggcagaggttgcagtgagctgagatcgtgccactgcactccagcctgggcgacagagccagactcggtctcaaaaataaaataaaataaaataaaaatagagaactggagtagtagaaaggcagatgtaaacctgagaaaagaagaagagtcttaaatttgggcaaaatagtataatagaaagattagagttacatactatcaggccgtgtctacttgatatcagaatatcctgggttctttgcattatccattcatttaattttcaaggaaagccatgctagttttttagctgtctgtaatatcagtcaaaatggtgaaaccagttaagggatgtgagcaccaacaatacagtcaaacccagtcacaatttacctatgtatagaatcataatgtatagagaattccaaactgactttgaatcttctaatagaaatgtaagagacattggtttgcctgtttgaaattttctgtgggaatgaagtcctattttcttcctcaaagtagacacattggtatgcatgttactatttgaccatttgactttttgtggtgtaggaaaccatcactccttgcagttagaaaaagtcctcatgtgcattctctcatctaagaatcacaaccttgtgattttgtattatgattatgattacctattatcattattcccttttacgtgtaaggaaaccgaggcttagaaacatgaagtaccacagtcacagtcacataacttgtatcagtcaagatctgagtcaggtttttcgaactgctattcccatgctctttttgtctcctcttctcaaaatcctattacgtttggacttaacaaagcaataatggctgggtgtggtggctcacgcctgtaatcccagtactttgggagggtgaggcgggtggatcacttgagatcaggagttcaagaccggcctggccaacacatagtgaaaccccatcactactaaaaatacaaaaattagctgggtgtggtggcgcacgcttgtagatcagctacttgggaagctgaggcaggagaatcgcttgaacccgggaggcggatgttgcagtaagctgagatcatgccactgcactccagcctgggcaacagagcaagacaccatttccaaaaaaaaaaaaaaaaagcaatactttaaaactattttggacaatacaggtgtaaaatacttcacttttttacatgtatcttcttttttgaaatgattcttaggtatattaacttttaaatcttccttttataaaccaatggattaatgaacccagttcagtgtaccccttagaaatcacacttgtttcaaatataaaattttaaagcattatattcctcattgcctttagaactcagcaattgtactaaaatcagccaaaagtgatttcagtgaatcagctcttaaagccaaactaatgctaatatttgaccaagtagaaacgaatatctaaaccaggtgagaaaaaagttaaaatgatgataaacctttctaattttgaaatagtacacacactgagtaatgcagtcaatctctttattcaccaagcgcaagtagtatataaaggaatattataccatttttctttactcatgagtaaacccacaaatagcacaaaagctgcaaaaacactttaacataaggagtatttgttttattgactgtaggaactcatggaatgcaaacacctttaaaatctgaataatatgaaggcatttccagctattagattctttacatatgtcaaagaacagtatcataaattatgtatgttttttaaaggtttcctaagcttcttccaaagtcatgtagacatcattacactccatctgtatacctctgtggtaacttgctgtcgcagggatctagagcctcatcttttgcaaacttcattccttctttcatccctttgttctttcattcagtcagcactgattgagcatctactgtgtacctagaagacattgtaatgatcctgtttggtccaaggacatactaaacaaaactccctttactgcttatgctatattaagtaaagctttaaagatgggttctcttttattacttccatgatggcccacccctctcatcctttctcagtgttaaaaaccagaaatatacatacttacatactatcataacactgatactacaaaagcagtacccattattatctctggtttacaaattattcaataatttcttactggaaacttggtctatatagtcatagtagtaagctttgtgagaggatgtgatgggatcatagttagctaaacaataggagtatttgtgtggcttcattttaaaaaaactaaccagtttttttccaacaagcaattcttatatcagaaccatttatattctttactttggtgagataggattttctaagcaggtcttttatctgtatctatgtatgtttgttcttaccatcattgagcacaggatttgatcctttaaatgtgttgacagattttgaacattttcctcatatctttcttttttgttttttaatgatcctgtactaatcattttgcattatggggtcacttctggacagagagcctagccatctgctcttacaaataatgtcggcctatcactaactggggataaggagaagacatctaccgatgtctttctagcatgtccttcttgactttttctttctttaagaagactaaaatgattcagcttgtggttctaccacagaactcaggagaaaatgataaatatgaggccattctccaaataaatatgttttcctacattagtggttctcaaattttaacaagcatcaaattcacctggaaggcttattaaaacacagataactgggctccacataccaagtttcaaatgattcagtgggtctggtgtggagcttgagaatctgcatctctaacaaactttcaagtgaggctaatgctgctgaatcatggaccacactttgataacccctgttctatgttaagtacttgtcaggtacagacaaatttaaaagttaaaaaaatatatatatgacttctgtaagacactgtgaagggtttagactctggggaaattaagtataatgccatcccaaaaactctgtgttggaggagtgttcaagtgctgcaggatcatggagaaccaagcacttaacttttctatgaggcagaaagaggaagataaagggaaacgtggaggatgaagggaaactgttaatagatccccagaaacacaatttgctgctatatggatttatatttactgtatttcaaatcacatggtctagaactgtgctgtccaatatgatagctacatatggccattgagcccttcaatgtagccagtcgaaagtgagatgtgtagtaagcgtaatatatacacatgtaatatgtatatgttatatatatgatatagatgtaatatgtatgttatatatatgatatatatgtaatatgtatatgttatatatatatatatatatcaggatgcaaagacttagtaccaaaaaaagaatgtaaaatatctcattatttttatattgattacatgttgaaatgatagtatttttatgtatttgcttgggtaaaatgtcataatgaatttcactcatttattatgattattcaaacttggttatttttcttgaaaatgaatgaagtgagcctgttgcttcggctacaacaatgggcagtgtttctgcaaaatttttacatgtgcctactagaacatttaaaattgtacatgtagcactcattatatttctgttggatagcattggcctaaaagttttcaaaatctagcatggataagaatcacctgcaaagcttgttaaaccaatccgcccccagaaatttagtatcgggtgaggcctgcaattctgcatttctatcatgctcccaggagatgctgtctatttgtaaccacatatagaaattcattcccaaactacagatgatagagttttacagagaggtgcaaaaatatatttttgcatcaagcattgtctgtagcttgaatacaaaattatgttgcccatataccactggtttttgtaagtaaagcagttgtgttacaaagcatacaagtttttatcagctaatagccttttctcaattagcagatactaagtagtacttttattatgtggcaattctccagtttttggaatgttattgagaaatacacagggttaaaacaaattagaaagcacctctcccaaaatactgcagtaagatgtaggaaaaactgctctaacatattctaaactataggttgctcttatgtaaatatttcaactataatatctagtctgatgtgcccactggccagagttttgtaaaagctaaaagtaaaggaaataaaaaaaagaaagaagtatgtgtttgtttttgaaaaggttaggtcacagaaggatttgttgatattaggaatagaatgacccgtgaaaaaaggacaattaagttccaggaaaacatcttttcagtaaggagagaataatcatttatgcttaacctcaactctgttaggaaaaaaaggatgtaaacaaaaccctttaaagaattgaagaaggagagtataaatttaaatgcccaggttagtgaccacccttagagcatactgaggtcaaagcgtactgtcaagcttaagaacatttggttttcaatgtttgtacaactaattgtactttagtcaagaggactgttatcgaaattgctcaggtagccttgaaactaatatggcccaaatattccagagtctgtctttctcaccctaggagaagaatggtctggttttcaagggaattctctattttttttttttgaaggcatcaggatgtgtgaaactacagggggataaatgaacgatgtacagaatgtgatgaaaaaattatatgaagtataaaatgggaatgaagccatcaggagccaaagaaatatttatgaatttaagagaatgaaaagcatattattattttcagatattttataaagtgaacccaaatcattataaagtattaattaggctacttgattgcttgatctttatatactaatttctaatttgttttaatcgggaactatttttgctagttctaaggctagctattatggtaatccatgtaagtgtgtttattattgtttttaaaaatggaatgtgttcctagtaaatgtgtttaaatagcaaaatgtatttatgcatgcatgtatttattttagtttcctgagacctctagttccttactagaaacatgtatataattccaggcatttaaaattgccatgatggtcatgttttcttgtccttttcccttattctgcaactgacatttgcccttgtctccaatttctcactgctttattctttgttcttgtaagtgttcttgtctctctgggctgacctctctccttccctggagtttgaccccgccccaccctttcttctgcatttgtttgcactggttgttttcttcattgcctttcccactgccccgctgcgctgcatgtgaaacactccgccagtagctgctcacagttcccatgctacatcatacccagcattcaaagagctgctgttctcacatggccgccagtaagattcccgactcctccttcacagcacattcctctagaaagtagaaagaatcccctttcaggccacatgagaagctgcgtgttaaagccaactccataaaggggaatggaaactagcgtatgaaattcagaaatgctacttttaaaggtaaataccacaaagtgaatttcaaattcatacagtttatcataatacttctttatttttataaatgctataatgtccttaatataatgatcactgtgatataagttgtcctctcccttaatatattaattaatttactaaaggagacgggagggtggaaatataataaattagaagatgattcttatatcagaagtacagcctttatacatagttttactttattcagacaatcaatgtagtcatatggtataaatttgaaaataattttagtgagcattacgcttactgagattaatagtgagaacttacctagcacttactgtatgccattcacaattataagcacttttgcatgtgctaatgcttttaagcctcacgtaacccagtgagggaggtacaattttaacctcattttacaggttagaaaaatgaggagcccaagggttaagtgacttgcctgtggtcatatatcaggtaagtgagagagccaggatttgaacccagacagtctgcctggggaatctgtcagaactcctaactatgcagtaccactcctctgataaaaagttgaattgacatgacaacatttcctattcatttatgattcgaccctttaaacaaaaagaacagcatcattctcacatttattaatttgtcaggaatcacctggatcatgagttgaggaaatttaaagtaggagggttgtatgaatttcagaccacgatctcaagaattgcctgtttaactcagagcctgaatcattcacagactaaaaactagaatcactcttctgtaggaccaagagggttgaatcatcaaagtcttgctgaagtgaacggaaatcctcctttgttcaatcattcattcaataattatttttttctggtgtctactctttaccaaactctgtttgagatgatagggattcagtcatagacagaccttctctgccctcatggaggttatggtttcttgggatgacagacagtaattttttaaatctcataaaataattacaaatgtgtcaggaaagaaaatacaggacactaccagaatatatagtaaggacctaaatgtgtgtgtgtgtgtgtgtgtgtgtgtgtgtgtgtgtgtgtgtgtgtgtgtgtgtgcgcgcgcgctgcagtaagggtgagaggcaggaaagggcaatcaggacaccctcccaataaaagtgacctttgaccgagatctgaaggatgaagacaagctgagtgactcttctattcatctatatcttttgttttaaatggcctgaagcctgggactaactaaacagggttgtaaaattccagtatgtaaattgaataactagggatcatttgaagtaatggactgcagagttaatgtataattaagtcacatctagggaagatttcccatcattatcacagagagcatcctgtttgctttcttcacagcacttacgaaaatctatagctatgtgtttggtggcttgtttaatgaaagtctgtttcccctatctgaatgtgagctccataaggacagaggccctgaataccacatctactgacatttggcagtgtctttcatatagtaagcattctataaatgtcttgaatagatgaatgcataaaactaagttaaaatgttactgaaaactataaaaataagcagaaagttataccagaggagaaaaattaggggaaaaaaactataatttctgaagacgtagtacttacatctaaatttgtggcttcataaggttaaccaacacttaaatagttttgccaaaactccaagaaaaaaatgaccgggtgtcgtggctcacgcctgtgatcccagcactttgggaggtcgaggtgggtggatcacctgaggttaggagttcgagaccagcctggccaacatggtgaaaccctatctctactaaaaatacaaaaaaattagccgggcatggtggcagacacctgtaatcccagttactcggaaggctgaggcaggagaaccacttgaacataggaggcggaggttgcagtgagccgagatcatgccactgcactccagcctgggcaacagagcaagactctgtctcaaaaaaaaaaaaaagaaagaaagaaaaaaaagaactaccatttgacccagcacttccattacttggtatgtacccaaagaaatataaatttttctaccaaaaagacgtgcgctcatatgttcattgcagcactattcacaatagcaaagacataaagtcaacctaggtgcccatcaatggtggattggataaagaaaacgtggcatatatgcaccatggaatactacacagctatgaaaaagaaggaaatcatgtcctctgtagcaacatggttggaactggaggtcattatcctaagcgaattaaagcagaaacagaaaaccaaataatgcatgtgctcacttataagcaggagctaacctttgggtacacatggatgtaaagttgggaacaacaggcactagtgacaagggcaggagggtgtgggacaagggctgaaaaaactacctatcgagtactatactcactacctgggtgacaggttcaactgtactccaaacctcagtgtcacacaatatacccatgtaataaacctgcacatgtaccccttgagtctaaaataaaaattgaaatctaaaaatataaaatatcaaatcataaaaataaataagaaaacaattgaatctactgatatgtttcattgcttttaaaatatccactttgaattactgaatattttaatatttttagttttacacttcagcacagaaagtccagaaatccaacccttgagtttacaaagacaccacatgatagttcatagttcacacagctagttagttgtggaactagaacccaaaatttgctctctatgtctctcacataccttttccctttattctaataaaggcatttgtcagtctaaatgtacaatattcgaagacattttttaaaggaactacttatccaaatcccacctgtcttacaaggtccatgtgaagcaatgagataaggtctgtgaaactgcttccgaaactatcaaatgttataaaaatgttaagttttattattagaactgcagttcatctctatgaaacctttctaaactttctcacttttctgaacttgactacgcagcgtcttttctaatctatttgttctccctttataagaagaatttaatcctttccgccctgctgggttgtaagaaaaaggactctcttcttttctataatctattgatatttgattatattacacatctaatgggttcccaataaatacatagtgaatagaattgaaccaaatttctttctagacatgtgaaaaaaaatcctgatctttaaatagaaagggtactttcaaagattatatatagaacctcttggtattttgtatttgcaatgaaaatattttaatttgggccaggtgcggtggctcacacctgtggtcccagcactctgggaggccgaggtgagcagatcatgaggtcaggcgttcgagaccagcctgaccaacatggtaaaaccccgtctcaatcaaaaatacaaaaattagccaggcatggtgacgcatgcctgtaatcccaactactcaggaggctgaggcaggagaatcacttgaacccgggaggtggaggttgcagtgagctgagatcatgccactgcactccagcctgggtagagagggagactccatctaaaaaagaaagaaagagagagagagaaagaaaagaaaagaaagaaaatattttaatttgtcttatgttcaacagttgcatcatatctgcatccttttgttaaaattgaacaggcttctagtttcatataataatttctggccaggcgcagtggctcacgcctgtaatcccagcactttgggaggccgaggcgggtggatcacctgaggtccggagttcgagaccagcctgaccaacatggagaaaccccatctctactaaaaatacaaaattagctgggcgtggtggcacatgcctgtaatctcagctactcgggaggctgaggcaggagaatggcttgaacccaggaggcggaggttgctgtgagccaagatcacgccattgcactccagccggggcaacaagagcgaaactccgtctcaaaataataataatcataatcatcatcatcataataataatttctaccaacagctggcaggaaaaaaatatgagagcatagtcatgaacttcagattccactccccttacttttggcattccattcctctgaattatagcttatatttctttattatctcagtttgatttagtctttctaaatattcacctctgtttccatccataaatatcgactgaactaccttttaatatactatctttttgtaacagagaaaatcaagtgtaggtggattattgtaagtgacactgaggaaatataaaaagaccttgacttgtccaggcgcggtggctcacgcctgtaatcccaccactttgggaggccgaggcgggtgaattacgagatcaggagatcaagaccatcctgaccaaatggtgaaatcctgtctctactgaaatacaaaacattagccgggcatggtggcaggcgcctgtagtcccagctacttgggaggctgaggctggagaatggcatgaacctgggaggcggagcttgcagtgagctgagatcatgccactgcactccagactggtgacagagtgagactccctctcaaaaaaaaaaaaaaaaaaaaaaaaaaaagaccttaacttgcttcaaacaagtcaggacccccaattccaattcttaggtctggcattcccatcagacacttaaactgtaggggcagtaaagttgcccatgtggctacagcttttgtggctgtgctgtacttgggaattttaatgttaccctctttgaattaggtccttcattgatcatgcatctcaaagtatctcagtgccacataaaaattttctttcagagtcatattttcccattatgaatgctacctactgcttatctgttgagtgtacacttttaaaccttctgtgggtggtggcccctttgccactgggtgagttagatgctgatcctggtcattatcgctgcctttccagccttttctgctcttacaccaagcacaagaattctctgctgatagtcaggatctagggctgggaaaatgggatgagttgtcctgttagacaggcccaaaaggagtattgtttaatccccagggtgtggggaagaaagatactcttgttttcttttccccaaatgtgtccatatacacccttctcctttgctggcagccaccaggcttgttgaggatctaccctcctctgcatatcatgtgcatcaagggaagccccaacccaagggaatacataatgatagtcctgagctatttcatggtgctctcgcagtcttgattgccctcttcggaattggacatggtcatattacgcaattttaggtaataaaatacaaagggcattcagctaagggaccttctgagaaaggtttttctcgtctagagaactaaacaggcatccttctccgggcactatgcgtagttctttattctacctggaacattctttctccagaaatctttgtgactaactctgtcatttccttcaagtcttattcaaatctcaacttaaaaaaaaaaaaaaccttcttaaaatttgaccacactaattagacagcaactgccccatctccctcttcccagccatctgaatccatttcccacttacctttttatgatagctcttctaggaaggcactccctcctccctgtgaatcatgtctccaggcaattgttccttgtgtagaggaacacaccaaatctgggctgctcctgtacaacaaactgaaggaggtagaattgattctgcaagaagttcaaagctaaataagaaggagtcttgtagcttctgtcttggtcttctggaatgctcactctggggaaagtgatctgccctgtactaagtctactctaaggccactgtgctgtctacatgaagaagccacaaatctaagctagccacatggggaagctgcatggaaagacaaatacgtggctagcccccagctgttggccgaagatccgcagccatcccaagtgaggagccagatgtacaagtgaaaaaactgtaacagccattccaatggagccttcagatcaattcagctttggctactatctgactgcaaacacatgaaagaacccaagcaagaaacacccacctgagcacagtcaactcacagaaccatgagcaatactgataaatggttatttttagccagtaagttctagggtgatatatagcaaaaggaacatctgtcctgttttttctggtttttcctatcatacactcattctgcaggattaacatgtgtaatatactttttttttttttttgagatggagtctcaatctgtcgcccaggctggagtgcagtggcatgatctcagctcactgcaacctccgcctgctgggttcaagtaattctcctgcctcagcctcccgagtagctgggactacaggcatccaccaccacgcccagctagtttttttttatttttagtagagacggggtttcaccatgctggccaggctggtctcgaactcctgacctcgtgatctgcccgccttggcctcccaagtgctgggattacaggcatgagccaccactcccggcctaatatacttttttaaattgtctttcactatgagaaggtgagctccatgaggccagggatattgtctgttttgttagctaatgtatccaaattacctaagaatagatcttagcgtggtaaatatttgttgaatgaacgagtgaatagatcagaatttcagtagctacgttgtgagtatgtggacagttcaccaagaatggcagaatggaaggatgggaggaacctggaataatgtcattgtgcttctggattacccagtcctggagcagctttgcctctgtgggccttgactagtcaagacattttgtgttgggtttttatgttaattccatttgcatcactataaaggaatacctgaggctgggtaatttataaggaaaagagatttcattggctcatggttctgcaggctgtacaggaagtgtggtgacagcctctgcttctggtgagggcttcagcaagcttacaatcatggtggaaggtgaaaggagaaccagcgtgtcacatggtgagagatggagtgagggggtgggaggtgccacactcttttaaacagtcagatcccacatgaactcactctgagtgagaactcacttattactgcaagaatggcactgagccattcgtgagggatccagccccatgatccagtctcccccaccgggccccacatccaacactggggattacatttcagcatgagatttgaagggaacaaacatccaacccatatcagttttctacaacctgcagcagaaagcatctcatctggcacatggtcttgcaaataattctgacttagatgcatgggactcagatatgactgaaccagaagataaatctaagtagcagacaccacagtattctcaaaaccactctttctctttctcttgttgaccgaggcttttctactgagcaaagcacctggtttataatatgttctttcattacgccttctcctaagagacctccttagtgtccctgcaatggatgtctggggagccaccaatctcttagagatgactagacatgtagccccagaaatggttacaccttgagcttttctctcagtgcagatgagatacattgcccatcccaccaatttgccacatttatctaaatttctgtgttaagctgggacctctaccactcaagctgggatgcccctcaccaccaccacactgcaaaaactaaacatttttcattagcctcctacttgcaattaagtacataaaacctgcaaaacaagtaataaaattaaggcactatttggttaatgccttttctcagaaatcacttttgcatgaagttcagttcagtattttatcagtgactacattagtctcgagaccctctacccaataggagggacaaagatgtacatgacacaggctcccttcaaagatgattaatacatgaactacatacagtattacaagggctccactagagatgtgagccccccagaaatgatattaatgtgcagaagagttagcaataaattttgcacaaggggtgacatttgagcttagactcgagcaatgagtagggttccaagaggtaaagaaaaaaatggaatggttttctaggaagaaaaccaggtctgggaagatctgatataacctgaggtagtttataagtctggaatgactgagttatcgggtatatggtggggaaggcagcagaggtgaaataagtaatatctaagcaaatgaaaaacatgtaattaggggagatgaaatataattaaattatttaccttaattcctcttttgactctttacatttgtcattcataaggaaacaatttcactaagattgttttgacctttttaccttatttggccaagtaaacaagggacagaaagtttttaatgtaaaatattcattcaacctgaaagaacattgatgattccagaccatttaaagttaaatattttagagttctcaattatttctatttggatgagtagaaccttttttcagacttcaggaatatatgtttagtttttaacagactaattgttcctgctttcatgccagcctcatgggcatcagcaggttcaaggttagtaggtaggaatctgccccctaagaatgcagcctaagagttaaggaatgcatgattacccctgtaattacttgagaggggctctgaaattctggcagggttggtgaggccaccagataacactgatcaagaatgtacacgaggttaggaattcagactgtagctgaagtggggagttcgggtaaacaggctctgaatggaaaagatcaggaattcaaatagacagttaagtcaagaaaccaacatcttagaaatgtaaacctcactttaagtcaaaggctctccaagctaagacttcataatatatttgccaaggcaagagctagtatctgcttacctgagtggtcctggagctgcggccagttgaaacaggagattgcagatggaatgtcagttagaatactttcagaggccagtaacagatacctgactttaaagttcttaagtttgtctttcccaaggttttctggtcataagaatcaccaggggcacttgattaaattattaattcacaagccccttcactggagattctgatgcaatagacttgggaatatatttttttttaacacgaactccagtggaatcaggcaagaagtgaaaaccctatcgttaataatagacacattagaaataatagagacatttgataatctagcacagttcccaaactttagtatgcatcagaatcccctgggggcttgttaaactacaggctggcaggctgctcccagcgtttctgatgcagtaggtccagcgtggagtccgagattctacatttctagtaggttgccaagttatgctgctactcctgtggtcaggaactgcactttgagaaccactaatcaaaataaactgaagtccaaagaccatcagacctagagctggttaattcaacagattagctatatcaagacttgaggtcagcttctctgggattctcttgtctttttcctcatggtcccaagatggcttcccactgcgccaagcaacatatccgcagacaacaataaccaaggcaagaaggaataaggttcaaggataactgtattgtgtgcgtgtgtgtgtgtgtgtactcatgcctgtgtgtctgtgtttggaaaagcaaacgtttcccagaagctccccaacaaatttcttcttatgtgtcaactagaactggatctcactgaacctctttaagccaatcactggctatgagaaacaagcttactgtgattggcttagaccagattttaattttttcctcagagctgtgtcctttgttgcccaatatctgaacataattgagcttctttaccaaggaacaagaagtaaatagctgttagttaggcaaatagctgggtatgtccacaaatgggttctgaaacaagtgtgattataatgaggttcagaattgaaaatattagtacaaatgctagtaaataatgtatgatattggctttcttatcaccatttgcaacagaataacagtctcatgaagaatttggcacagccattgtagaaaaagtgccttttcagagctcacagtatgcatgtactcatcttgcttttattatacctgtatatggaattgcaagctgtcccttcaggtaatgaaatttagacaagttggaacctgtataacagcaaatcaatactgaaattataggcaaagcctgtacttgtgcagactaacacataggatagaaagactttgtgatcaaaattcaacaaatcccacatttataggtatccaacatagagagaaaactatatatagtggtgtgtctttttatgtgtttgcgtttttctccttattcattcctgaaagtgtattttcttttaacagactcacaactcagctacaccccatatgcccacagtcaacacagtggaaaactgagttgtttatttgagcctcaagtcatccaaatacttcgttaaacgttgtagtaaaaggtctcccctgaattcaaggaggatgccctaagttttctgcatccttttgatagaggaaagtattaactaatgtcagactatctgttgttttattttcctttacagcactagattttgttaaggacattgataattttgaaagagaagctaagctaaggtgacaaatatatcttctgttggtcaatatctaaaattatgtattatttcttttttgactacaccttacagtggttagtttgcactttacgtaaaaaactgatgtctaccatcttccatctttgtaagcaccatccagcctaatagttgttggtttgaataatgccacaagctttgtccagaaaccaaaaacctgatttccaaagactagtctatgtagctgagcccttcattccataatcattaaactatggttaggacacagtatccagtctcccctcaaccttgtccaatcacagtctatgcagagatcatgtaactcgattaaaatctagaaccatagagacatttcccttccctggggcaaatgggaattgcacatgggggaaaatggtgtggataagcaaaaaacggaagtttccaaagtgcaacagaatattgataattttagtacatttcaacatacagtgagtgtaatgacggcattttcctactgcttccttagttgtgaagattttgttttttcttctgggttcactgccgggaaaagagcagaaaatgttttagagcctctgccagcagagggggcatttaccatttgtgcataaggtctctggcactgtgccctggggttctcttttctatatgtttctaacagtcacacacagcagtgtgactgtttacagatactttaccgtcttctctgattgaagcagggactggtttgccagcaacttttggttgtttttgtttttttgaagaccatgcaactaacagatgtttgttgttggctccatatctacattctttgaaagctggagaatcaaattgctgacattcagacaacactaattcccatatccagggagcctaatttgccgtccctgagatcctgattcctggtgttcacgggtttaaaaaccatttcagtgacacaatataagaatgggcttgggagatgcagcgctgtctccactaaagataatcacattttataaacatctgcgtcattactggtatgattcatctctaagctgtatacagctgtgtttccagtttcaattaacaatcccttaattgcatatccatctcatgttactaatttagttaatttattcataattaagagtattctgttttctaccaaggtttgtcgagctcagaacattataaagaaaaatattttaaggcagcatctccgagggattttgtttcttataatcacatcacagtaaaatgtcattcatgcgcccaaaggaagatgaattgctaagggatttttttttccagtaaaataagaagctttgggaagctgcagtgtgttgtgtttttaaaccaagttaaatgcgatgcattttgttcttttctttctccttccctgacatcctctcaaaaaaattatcattttatttgtattattgcttaagtatcacagcaaatccagtcaccagtgcaaataaaactgtcattaccctgtcaggtaatggtgtctcttaaaatctaagctataaagtctgtacattttagaggacattaagatcaagaatttttaaattgcctaagtctaagcaagtggagtacacccttgtggaaaatggaaggcagatgaaaacatgatgccaggcagtgaattcattttagtttgatcttttctacaaaaatacatatatccgtgcagcaagagtcttgcctgtgttagtacatgtgtctgtgtgtcattcaaagcagcaataacaaaaaattaagaccatttctcactttgtttattgttcaagaactcccacctatagccttgacctgtgtttgagcttaaaaaaaaaaaaagtcttataactgcccagtggtttggagattttacacaatagaaataataagccatcttttgcctcacatgaattctactaaaatcaaaactccataggatactttccaaagtaactggtgaaaggaaaagtgtggtagtataggtatgcatattatccccatcactttatttctgagctcttctattttttaaaaattttaatttgtatcttaaaagggcaaaacataagaagaggtaggagtattctaaatttcagtgacaacaaattcatttattttacaatttaaccattgcccgtcaacatttacttaaaatttcagcatgggaggttttaaacacttctagagtcccatcttaccccatttccacgatgcttttcttctccatgtgttgctgcagtttaatattgtctgcgtgttttaatatgttaaacgagttaaacatagagtaggaagttaaaactgttagcagctatatgtttcccaagattgatgaaaattcaggtaacactccaacctgttaaagatacctgcaatctggccaggtgcggtggcccatgcctataatcccagcactttgagaggccaaggcaggcagatcacctgaggccaggagttcgagaccagcttggccaacatggtgaaaccccgtctctactaaaaatacaaaaaacatttagccgggtgtggtggcatgcacccatagtcccagctactcgggaggctgaggtgggagaattgcttgaacccggagcctgggtgacagagtaagactctgtctcaaaaagaaaaagaaaaaaaaaaatatatatatatatatgtgtgtgtgtttatatatatatatatgtgtgtgtatatatacatatatatatgtgtatatatatatgtgtatatatatatatatatgtgtgtgtgtatatatatatatatatatgtgtgtgtgtgtgtatatatatatatagaaagagagagagagagagagagagagagtaagcagggaggggttgaagccagaaaagactagaaattatctaggccaaaccctttaatttatagattaggaaatagtttctggttgacttagctgagacgttctcatttgttaaaagcaagatcagaaatcagacacaattcaacgctcttcactacaccttgtttttctctttgtggaaaacaagacgtatcctgttcaaaaatttatgctgtttatctgaaagcccaaaatgcctgtttacatcatattttccattttgcaatagcagctcattttggggattattttctgatgaaatctctaggtttagttgtacttgaatatctttttatctgtacacactggaatatgcatataataattgatagaaatgtggattttaaaagtagagatgatcattattattttatgatcctttaagttaataaaattcacctagaataaaataaacaagtttaactaaagttctcgcattttcccagaaatcgtagactagaaactagtcttatttgcttattttattccaaagcttattttacctctattattttgtggttctataaaatatttctgtgtattcctccaaagaacctcttggaaaagaaagtaaacatcacatctgaaaaatagctgggcattttttcattatctctgcaaggggaggggacgtgaaaggcaaccccatatagaaactcaactccctgctttttacaatgaatgaagtttttccactgcactgtcagaatggtaattcttgctaactactcacctatttcacaacattaacagagttccaggattcatgctttaatattgcataatggtccatgttttgaacatgaggagtggcagcggagattacactttgattccttggatttcatgtggcactggatgggagcaaggcactgattttaagttgagataaaaaggagaagtcagtcaatgcctgcagccagacaggactcttgtaatagctagggagtatgcctcatttggatatgcatgactgccgggcaaggacactgccatgaatcgctaatggcagcagttgtatgacataagagagatgtgtatcagcaactcacaagttgactttgttacatgttatgaacacattcctgtgggcactcattcatagaagtgagaaatgtggacaccacagtgtcccaggcctttgttaccttatggcctgggaatatcttgctttgctggaacatgaagccacgtctggttataagaagaagtttgatctgggagcaaaattgcctgttcacgcatgtctttctcacttctttaaaactaacttgctataagggtgattaaaaaaaacagatgtcaggtgagagttttgctttgcatcaacttcctacttgtagaggtaataacataaaccttgcctggcaatcattatttgtcatccagctgagggtgtttactcttgagaaagaagtaatggacaaaattgacttggattctggttctatgtttcccattaattgactctggacatatacatgcaatttaatccatcttactaaaaacatgaccaactcacaggatgtaaattctattctatagaaagggctttccctcagtagttagtcaagggacggttcctaactcctgtctttattgagcttattttccaaaataaatgtattattttctactttgttcacagagcaaggcagcataaagaaattaagcaacaaaacaatagtgtatttttacccaactttctagaaaacacccatttttcttaagttttgatatttttttgccaacaggcagtcaaaaagaagataaataaaactgggttaagttggtaatgacacaataaataaatgagatgaagaaagaggcaataaatatgagtggataccaacaagaaacatgttcaagccctgaaaaaataatgagaaaaggtagaactattaataatacatcccgctctcgtatcacaccttgctccccagatacatcctatctgtcctggcaccatgttgatgctgttgttctgtaagctatgccaatgaacatgttggatgacctactccagctctacctcaagatttccaaataagaaaaggacccagggatctccttgctgaggtctttatccatttactcaggtcacaagtactaattaagcagctcttatgtgcaaaatgttattgcttcaggtcagtttttcctatactgctgttctataagagaggaagaaggtccctgccctcagaaagccctagaatacagatctagagatgggttcaacatctttgttatgcaattatttcattccaattgtaatgagtacttagaaaggacaaaagcagagtgctgagagagtataacagagggacttgacctggtgtagtaggcctggaaagtttcctggggaagtggtattttagacaaacaacacacacatacacccatgaatgtatacgtgtggagaatgtattctaagtaactatgatgaatgtatttcttactgtaggtcatggtcaaagtttgaaaactattgttctaactagtattataattccagggatagtagaggtcatgtgacctgtttagcacatgcctgccttaacagtatctagtaggccaggcaatgtggctcacacctgtaatcccagcactttgggaggccaaggcaggtggatcacttgaggccaggagtctgagaccagcctggccaccacggtgaaaccgtgtctctgctaaaaatacaaaaattagccaggtgtggtggtggtgcctgtagtcccatctactggggaggctgaggcaggagaattgcttgaacccgggaggcggaagttgccgtgagctgagatcatgccactgcactccggcctgggccacagagtgagactctctggaaaaaaacaaaaaacaaaaaaaaagaatgtctagtaaataagtcagtgccaagcaactacctgataactgttaccaccttagtcatcaccgaaggcagaaggtcttgcattcattggaggagagttaccaatctaagacatttgcatgaaaatgtgcacagagccctcacctgataatcaaagcatgttccaacacttctctttggataaaataagagttacatctcaatgaaatcacttgtggatcaagttctcatcctttcgtaaataaagagaggggcagcaagaaatggaagtgagcacatataagtgtgggaacctgtactttcctaacctataaagcattggatgtagtttttgctattggtgcgcatggagtcatgtggccttggagcagttaggtaccttccctgatgataggggagaaggcaaagaaattgatgatacatctctctcattgtcattccctagtatattacacttaaatctaactgccctattttgtgattgccttactgctgtggcttgaatatttgtgtctccccaaaattcatatgtggaaacctaattccatatatgatggtattaggaggtaggccccttgggaggtgattagatcatgagggcagagcccacatgaatgagattagaacccttataaaagagacccagagagctgctttgccctttttgccatgagaacacaagaaggtgctatctatgaacaagaaagcaggccttcaccaaacactgaatctgccagcgccttgatatcagacttcctagccttcagaattgtgagaaaaaaactttggttgtctataagccacccagtttatgatattttgttatagcattccaacggactaaaacattcattttccagaaaatctactccatttataagccagcattcttttttttttttttttaattttctacagatctctgcagaaacatgcagagtaataatagggccaggcacggtggctcacgcctgtaatcccagcactttgggaggccacagtgggtggatcacctgaggtcaggagttcgagaccagcctggccaacatggtggaaccccgtctctactaaaaatacaaaaaattagccgggcatggtggtgggtacctataatcctagctactcaggaggctgaggcaggagaatcacttgaactcaggaggcagaggttgcagtgagccaagatcccaccattgcactctagcctggacaagaatagtgaaactgtctccaaaaaaaaaaaaaagaagtgataatatatttgctgtatatattagttatagatagttatattgcagtactatcagaagctatgccacatattatttacgtatttcttaagatatagaaaacatccctcccctgcagtcattagtacttttgcattcaaacttcaaatgaaacaggactttagaaattataggcttggtgccatcctggccaacatggtgaaactcgtctctactaaaaatacaaaaattagctgggcgtggtggtgcacacccgtagtcccagctactcgggaggctgaggcaggagaatcacttgaacctgggaggaggaggttgcagtgagccgagatcgcgccactgcactccagcctggcgacagagcgagactccgtctcaaaaaaaaaagaaaaaaaagaaaaaaagaaaagaaaaaagaaattataggcttggtgatttctcaggcattaactcaagaaagcagcctttataccgattacctacattcacccagcacttaccccattaatttctaatgttgcttggaacaaatgaacattcctggaatgcaagctaaatgaaagagccccgaagaagaacagggcatttcctggttcctcatattgacaaatttaaaagcctgtgctataatatgggctcctgtttcctttcaagtttgtctttgaataagtggacagagtagctgaaagcagagtatttaaagctttgaaacgaccactttatttcagtctctgttcttgctgggaccactcttataaatgaggagattagaaaatcacctagaactatttaatcgttgtgcagaagaccctcttaccccaaatatttacttaccgctcattttattggcacactgcctcaaattccacctgctgtgaactgacctaagtgaatttaggtcacgtgcaactattaggttctttttgggaaataatggagaaccacagatgtgtttgaggtggatgaggaatggctacctcaagccgcagcttcatgcttcatgctgaagtcctccacaagtgcaatcatgtcgttaaccaacatttgttagaaggcaggcagaagtcagcttacagcctgttctacaatttttatgaagtgtaggattttaggcttaaattgacaccattgcaaatacagtattctcttacctttagatttggcatcaggtcacaagaattcttcctaagccaatggttggatacaaggccattggagaccagacgtaaaattaaaagcccaagcaacaggttttgctggattcttatatcctgtttatgcaatgttaggggatgtcattaaaatattttagttaatccatgtatcttgattgtcttaaattttactaatgagatcctatagggatattcattgcaatccactatttccctcagcaaaaacacatttgcgatatctattacatgcattacaaaatcctccaaggttcacagagatatatagtagtagcagtctctgggttttggcctttttcataagatgaaggctgtgctgtcctagaatatgaattcctaattaaaataaccatttgcctcaagcctctagagttgaaggttgcactaactgcacatataaaatatccaactatctatgttgagatatttaaaattaattacagatattgtaacaccattatttaacttaaattccattacaggtcctttgagtatgcaaaatatttctttgagatgtggtaacccctttaactgatcaggaaataaacctttattatcaagttgttatcccaccttgacaggcctaaagcgcagaccacatatcagaatcccctgggcagcttataaagctcctcatgcccaggctgcatctcagaccaattcaatctctgggggtgggctccaagcatcagcatttgttgaaaatccccaggattacaaagtgcggtgaagtttgcaaacccttgtaataagagaatgggaggagggatggctgtttgccaagcagaaccaggaatgaggaaggatattggtaaacaaaatttatccataattgacttttcatgaatcacagtcctactgagacccagccttgtctcatgagactttggctacgatgatgagtgagaaaaggactcctcctaatttaccagactcttgattagaagcaaatgaaattttggaaaagagacaagtcactttcaaaagaccccagcctgtacctgaccctacctctggactccatagtaatggcaggtagtggtcattcctggagtaactctgtatttcttaaaggaacatttgcataatgaacctacagcaatctggaagacgactggggtaaatagagaatttgttgattttagatggctgaatactatccgtgcagagcaattaaaaggacaactgtcagaatcaagtaagagaaaggaaataagagaagtctcatgttagtagaccttgtttgatcaatgtgttttcatcttgtatatgattaataaaataagtttgggagttaggatcaacctttgtttactcactggagaataacttgcatatagaatgaagctgggattgtccaggctggtttttttccatttggaagtttggatacaatacaaggaagcctgaattccaaactgtttctcttaaagagtgcctttctgagccgctattaaggaatgcttattgtttcgaaaatggtagcacagaagtgttataactagagtacaccttgtgcctgcaattaattacccagtgtcttcaaaaattcttgtcttttgctggtagaaaacctttgaaactatagttgtctgtggtattcactgcagcaccttagatataaagagagaaatttattttcagaggaatcttgagacagtttgtgtgtgtgtgtgcatgcctgcttacacatctattggttttccccaaggattgtagaaatcccattaaaattccagcttcttaaggagctactgaaactccagtttttcatattttcttttataatatttggatgcgtttaggtaaacttgcagcattttaattatgtctgtatcagatgagcggaagaaatgtaaaagggtttggggagagatttaattttagatagcggcgtaattaatagcatttggaaaaactagtggaactttaattaaatgtctctacattaatttagtcatttaattgaacatgtagtgggatagtccttacaatttttcacccttactctttgaggaaaaatgatttttgaataacaaagcatcagtatgactactttttattatttagctgtatgttcactacttggcactttgtttaatttttccccccatatgtttcgagctttttaaaacattaatttggcttgtcgcttttatcttaaaaactataaatctgggggccgggtgcagtggctcatgcctgtaatcccagcactttgggaggccgaggtgggtagatcatttgatgtcaggagttcaagaccagcctgaccaacatgacgaaaccctgtctctactgaatacaaaaaaaactagccgggtgtggtggtgcatgcctgtaatcccagctacttgggaggctgaggcaggagaattgctggaacccagggggctaaggttgcagtgagcagatattgcaccactgcactccagcctgggcaacagagtgaaactccatctcaaaaaataataataaaataaagaaataaagaaaactataaatctgggagaaaccgtatttggaaacattgagcaactgtttcttttcctttattttagactttaatattcactagagtcatgttgtaaagttttcaccttaatattgtaggctttttttttttttttactttgccaacttaactggcttttttaaagtggtgttatgctgcagcagtgtatctgaatttcagcagtgccttttacgtggctgctcacaatcttattaaactacatgaattatacatggagagaaatataatttggtaaatttggtgatgtttcaataaccatgcccaaggaggaatgttgtgttaaactgtcaatttgagaagtgttttgtggtgctaaccacagagtgaattcagttctacttcatttcacaaccctccataaatagtgccccctaaaagtggtgcctccttgcctgtactttgacccagatttttgtcatttttctagataagcatatacattgtgcacttattaatttttcaaatgacacaaaggtgagaatgggagtcaacacactgaaagatcaaaatcaagactcaaaataagattataacagactgggatactgtaccaaaataaaaaaattaaaataaaatttaacaagaacaagcaagatgtcctgcctttaagatttttaaagtcttttgtacaaatataggctgaggaacatctgactttgtggcgctttatatgaaaaacaaattgggattttaaataaccacaaggactgtattaatctccagtatgatctggtgtggcttactgtacgaggcaatacagtattagattgcattaatgaaattcacaaatgttccattaatctcttcactagttaaaccacatctgcagtcatattgacttatgagcatcacgtatgatgagaacactgaaaaatcataatacattgacagcagggcaaccaagattgtgaaaggtatagcgatggttatatgacaaatatttgaaagaatctagaatgttcagtaagaagataacatgaaaatacaggacagcttcttcatgcatctggggagggtgggtaaaggacacagcacacttaattaagtaagattgtagaagagaactatgggcaagtgttacagtggagcttactctgagtaaggaaaatgtaaacgttagagttgttattaagtggcatgggctgcttcacaaatttccatcattttttaatctgattcatctgctaataggacaaactgtaacaatagcttaaacaatagagaaatgtaggtctctctcatgtacaagcccagaactaggtagatcaggcctccttccgctattctgcttcactaagtccgaagtcctcctttaccttgtcctgccatggtggcctcaattctcgttgtcaccacatggtccaatatgtctgcttcagctccagccaacacatctgagttccagcccccagcaacatggaagaaggaaggaggcacagagagggcgtgtgccagcagtgttgtgagaaaatctttcagaaactgtcatgaaatgtatcccctgatagttccttcaccagaactttgtcccatgattatatttacatctatgtgaggctaagaaatatattctttccttcaggcatctacatacccaactgaaaattatgagttctattgccacaagaaaaaatggaaaatatatggggacaatcaacagtacttgcacaaagatgttttacagagaattactcttttacctgggaattttacaagataaactttaagatcctatcaactctctctctctctttttttttttttttttttttgagacaagagtctcgctctgtcacccaggctggaatgtagtggtgcgatctcggctcactgtaacctccacctcccgggttcaagtgattcttctgcctcagcctcccgagtagctgggactgcaggcgcccgccaccatgcctggctaatttttgtatttttagtagagacggggtttcaccgtgttggccaggctggtctcgaactcctgacctcaggtgactcgcccgcctcgacctccctaagtgctgggattgggattacaggcatgagccaccacgcccagccagatcatctctggaggcagggggatcacttgaggtcaggagtttgaggccagtccggccaacatgacgaaaccctgtctctactaaaagtacaaaaattagctgggtgtggtggcaggcaactgtagtcccagctactcgggaggctgaggcaggagaatagcttgaacccaggaggccaaggttacagtgagccgagatcgtgccactgcactccagcctgggtgacagtgagactctaactcaaaaaacaaacaaaaagagtctatgatcctataatttatagacaacatacaacctcctttctctacaaagagaattggttctcaagggctgtttggaaattcatttccttttaagtccaaaatgacatacaaaagtgaccaatatatacaatgtacacccttctacaataagttctcttttgttgccgtagtaatcgcatgtcttttcttaaaggaacacttttttgactcttttgtacttttgaacatagcggtgttaataataatatttataaaacattatgaaaatatgcacacaaaacacaacacaggctaagaaaacctaatggtggcctaaagtaagttctgatgtcctctgttggtggtattcttcattgccatgcttctgctgtgcctgggacctttattgctacctatgggaagttgtaagtagagaagtttctttactacagggatgtgaacaatcattgtaagtaaggaataatgaattcacataagttcacagagcatgtttttctgccctggtaatactgcatttctcactttgcatttaaagtacctacgcccttacacagaaaaagttatcggggttgggtgcagtggctcacgcctgtaatcccaacactttgggaggccgaagcagggggatcacttgaggtcaggagttcgagaccagcctgggcaacatggtgacaccctgtctctactgaaaaaaaaaaaaaaaaaaaaaaacacacacacagaaaaattagccaggtatggcggtacatgcctgtagtcccagctacttgggaggctgatgtggaagaatcgcttgaacctgagaggtggaggttgcagtgagccgagatcgcaccacttcactccagcctgagtgacagagtgagattccatctcataaatatataaatatatatatataattatcgattgattaatattattatatggtccccattactctaaactctcaaaatgtaatgtaggtcaaaatcagaaaaaggccatactgtctactccttcctctgtttcattccaactataagagaaagggagagggcaaaacaaagatgacaggaggccaaattgtacatagaattcatggaaattcttacccaacatgtaaaattatgatagtataaggaaaagtatactgcaaaaattaaacttctacattgtgaaatggagaacatttttacatctagctctattgcttctccctgtggagctgttctaagcacaaagttcccattacataatgaacaactccttaaatactgtgcaactatttctcactagaagcacgatgcagcaaactctgtttctcagtaaccatttatatcatacctagtggtaccgagttctataataaaagggtgatatgtgcatattttgtggtcatagagtgcaaagttgacatctacagtttaaagcattgcattgcatgaataaggtcaaaatttaaatacttttctatgatcatgttctttacattaaaggttaaagatgcatgccgctttaaaaatggtttaagggccggacacggtgactcacgtctataatcctggcactttgggaggctgaggtgggcagatcacccgaggtcagacgttcaagaccagcctggccaacatggcaaaaccctgtctctactaaaaaatacaaaaattagtcaggcatggtggcgggcgcctgtaatcccagctactcgggaggctgaggcaggacaatctctggaacccggaaggcagaggttgcagtgagcagagatcgtgtcactgccctccagcctgggcgatagagcaagactctatctatctcaaaaaaataaatgaataaaataaaataaaaatggtttaagaacttcaaaccatctggcaccagaaaacacctaaattgaattaaaaatctggaaatttaatttcacaacttgtcctttttcaagcctaccctaagttttgtttacttaatggggagaatctgttttatttgttcctatgtagaagactgctgattttatcatgattgtattagggcccaaggatatttaaaatatttcagtagctattacttatactttatatctgcattgcactttagagttgactgagcattttcaaagtattatcttaccaaattgccacaatagtcttgagaggctagtaaatcatgggagaagcccccatttccccactggaaagcagagaaaacccccattgtagtaaaggaggggttccctccagagctcttgtggttgtgttgaggaggaagtattaatgctgctgggcatgacttacaagaaataagtcaattcacttaagcaaaagtgctatgatcctgtataccatgtgagcagctctaggatggggtcacccagcattttggagcagacattagaacatctggagggagtaaacgcaaagaaaatgggctagatacctttccttggatgggaaaggataacattaagataccaagatcaaatgttcaaagagcacatatacaccagagaatactatgcagccataaaaaatgatgaattcatgtcctttgtagggacatggatgaagctggaaaccatcattctcagcaaactatcacaaggaccaaaaaccaaacaccccatgttctcactcataggtgggaattgaacaatgagaacacatggacaaaggaaggggaacatcacacaccggggaatgttttggggttgggggagtggggagggatagcattaggagatatacgtaacgctaaatgatgagttaatgggtgcagcacaccagcatggcacatgtatacatatgtaacaaacctgcacgttgtgcacatgtaccctaaaactttaagtataataataataaaattttttgtaaaagcattgtataataaaagtagtaagataaaccagtaaaaacaaaacaaaacaaaacaaaacaaaaaaaagttcaaagaggccgggtgcagtggctcacgcctgtaatcccagcactttgggaggccgaggcaggcggatcacttgaagtcaggacttcgagaccagcctggccaacacggtgaaacctcgtttccactaaaaatacaaaaattagctggatatgatggtgcgtacctgtaatcccagctacactgaggcatgagaatcacttaaacctgggaggcagaggttgcagtgagctgagattgcaccactgcactctaatgtgggcaacaaagcaagactctgtctcaaattaaaaaaaaaaaaagtttaaagaaaaataagttatttctccatgcttcaggagatatgtttcgcaggagaaagaggcttaatagagaaaacagatccctacaaacatttgtggtttttaaaactgccccattggttactaagtggataacatgagcgtgatgccagattcagtactctagtgagccatgcagctttgctgtgctctgcacctgatgagtgtggcctcacttcttataaatgcctgtcattgctaacaggggtccttgctgaaacaacagggctggactaatgctctagttcccttcctggaaaacctatcccaaagctgagatcctcatgatgccttctctcatatatgaatgattgcaggttacgctatcatcattaaatcgaaacattttagaccactttgcgtttgtttgtttgtttgtctcattatgtccagttttatcctgtttcataatttaataaatttttattgggtctgtcttctggttaaatgttgtgtgtataaaaaataaagtcaagagagagaacaggagttatggaactaatgacaaatccatccttcagctaaataaaattatactatggatgatttgagctgtacgttgagtgataatttttaaaaataagatagatcgggtgcggtggctcatgcctaaaatcccagcactttgagaggccgaggcggatggatcacgaggtcaggagttcgagaccatcctggctaacatggtgaaaccccatctctacttaaaaaaaaaaaaatacaaaaaattagccaggcgtggtggtgggtgcctgtagtcccagctactcgggaggctgaggcaggagaatggcgtgaacccgggaggtgaagctcgcagtgagccaagattgcaccactgcactccagcctgggcaacagagccagactctgtctcaaaaaaaaaaagaaaaaaaaaaagggccaagcatgctggctcacacctgtaatcccagcactttgagaggccgaggtgggtggatcacctgaggtcaggaattcgagaccagcctggccaacatagtgaaaccctgtctctactaaaaatacaaaaaattagctggacgtggtgacaggcacctgtaatcacagctactacggaggctgaggcaggagaattgcttgaacccaggaggcagaggttgcagtgagccgagattgtgccattgcactccagcctgggcaacaagaacgaaactctgtctcaaataaaatgaaataaaataataataaaaaataagataaagtatcacaagtaagatgtagttgaaacttcatgcatttttctatgatgcctatgatattcaaaagataactgaatttcatgagcagagttcaagaacttctgagtatacttttcattgatgacttaatgtaatggatttctatgatgatggcactatattcttttggtgtttatggtattaataaaaaattgtggtaaagcttgtggaaatgaacatgccttggattagggtgccttaaatgtgcctttgtaaatgcagctaggagactccaagtcacccttctagtctaactgctactcctttcttttacaaactacatgccaactaaactgaccttgatctgtttatgaaaaggcggtataggaacaggggctctgcaattggacagatccaattctaatcaatccactccattgatagatatataaccttgagtccttcctgtgcctcagtttcctcatctgtaaaatggaattaaaaaccaacttcgtgaggcttttggagaatgaaaatgacataactcaaagattattgggtatcagaaacaataatgttatctatcactgtctttactgttattattattattgtcattattattattttctctacctggaacaccaattccacaaactcttaatgtcaagaccatgctgtatcatggagccttccctgattcctccatatgaaaataattaattctcatattaataatattacttttctagttgtattttctttttttagcttttattttaggtttgacggtacatgtgaaggtttgttacataggtaaacacatgtcatggaggtttgttgtacacattattttatcacccagatattaagcccagtactcaatagttatcttttctgcctactcgtattttcattatccccaagtatactatacatatcttaaaattaggatccatgttgaaaaaacattgatatttcctatggcttctaacacagtacattgcacttagatattcagcaactctgtattgaatgtatgggtacaatctgctcttagtttctaatttggtattaatatgttcaagcctcaagagctcatgtaaatgatggtttgactatattgcccatcttttgttaagttgaaaagctgaaattcatgcactgtttgttagtgtagtaatttgtgacaacgtctagctattaagtcttttctaggtataaaacctttatatctgtcattgttcccctcttgtgtttttgctttaatatcgttgaaagcatctattattggaactttcacttctgaatagtacttttgagaacctgtatagaatttcagaggccttagaaaattgtcatagattgcttttagtatatggtttaccactgtggtctcttaacttttcaaaaagtatttccaaagggcacttacatccataagtggaaattgatttacatctattattgctgattgttcactattctgaacttcggctaaacaggtgatttaggcagaatttttttaaatattagattttttcctactttctaaatattttgtagctctttcttattaatttgagtcaacttatgctcgcttttttttgtcaattatagatggttgtcaggggtttggcaaatgtcatatgaaggtaattctttaaaagttgggatttttgaactgtttatttctactacttttgattttgctggaaattatcattctattaaagggacaaaagggtgctcagaaatatgcattgaaaaatttcttacagatttatcaaccattgccctcaggcactgatattcagccagtatgttccaatacatccatgtctttccattttaaaccttttaattctgttctaatttttcattgcctgtgcctgattgttctgtatccatctgatacgaatggttaagtacaacattttaaatatcactcttgcctatacatattatttttcttgtcagatgatataattgtagtcattacatgtttcttaagcacaactgaaatcttaatttaaatcaataagtcttgtttctgtggccattgtttcccagaactctccggatttctaagcatggtggttattcttccaggaatagtgccgagagtcttcagcagcatgcatttctctctaattgacattatttcacactctccattttccttactattgaaaactgtatttcattggtattttgccaaggatcctgctctgtttcataataatgttctgttcgcactctctgcactgacaaatacctattccatgcatcaattgcataaatggcaatttgaaagcatttaaccacagctggatatttttcattgattcttttcatctgaagatcattcattaggcttctccctcctgtttcttctcacatccatacctcctttcctcctatgtacatagtgtcttttgcattttctgtatttaagtgtaaattgctgactacagttatgcttttacctcattccatggtcataatgaaatcacaaatttaaaaatgtactactttttaaacctgttttctgacttgtccatctaaatgcaattttataattcttcgacattcagcctcctggtgaatgatttctgcaatctctccaagacatctgtgcagtgttatggattatattgattgcattttgtccatgttcaaatttgcagaatgtaacctacagaatatatattgactaataaagaaatgcatccacatggtggatggttgtaaagagaaaatatatattggtgtgcagcaggcgcccacacaaatgaaatctagaaaacagcagcttgccatgtcagagttgcaaatgaaggctgtggctacaaaacacagaaagtctggagtgtatgaaaggtttttcttccaaattcattcacacataaaaatgaaaaaattgaaaaatcatatatgtgcaccttaatttttatatcgcattggtgtttgggcatacgaccctgagattttcataccctcgatttttttaatataaccacctgagcgtttcttcccatggggttactttagaagatggggggtgtacacactacgtatgtatgtcaataaagaaatgaaggaataaaggaggaaagaagtgaagaaggctgggggtaggaagggagggagaaattcagtgattcattacttattcatcatcctaaactggcatataaaataatatgtttaaatcagtctaaaattttcattgtataatctctgaaataactagtccccactccctaaactgtttggtgtaaatatttatctatgtctaatcatttctatgcaaaatagccttatatatattttcattttcataagatcatctaagaatcaaaggaaaagctattttaggcaatgaacataggcagtgatttcaaaatagaatttgagaaatgcaaggatagatggaatcacaaaagatgatctcattcatggtgttttaaaccctacaaatagatttctgtttagttgacctcatttcaatagcttctcatttttttcagaagtgtatttgatgtgtatatttctaataaacttatttttctttttgtacccagtattaaggagcacagcatttatatccactgaacaaaggataactgaaaggaaactccttgatatccaacttggagtatttgtttctcgaatgaatatgagtttatataagtagtttttttcacatacataaaattagaatttgtttgtattattgatattatttcagaacagcggatttaacgtcatagatgatctagatgtgtcctttccttagaaatctttaaaatgaatcacatagtctagaaacagatccagatactacatgctctcatcagaaaggactttcttctcttcgtgtcaagttcagtgttggcaccgtatagacaaagcgtgttaaaatagcagggttcttgttctctgacacattacaagagaggcaagattataaaactgctatgtgtctcattataattcccattagtttcatttgcttcaaaacattcacttctgtgctttttgcaaaagctttcaaacttattttttgatgattctaaaagtaattcttctatgtcttttcctagtgatactagcattagttttcttttccaattgtactaggaggcatgagagattatcgatgccctattttcttgtctaaataggcaacccaaataatcatagtgacctgttcatttatattatctttatttcttgcctcatacttcttcatatttcttcatttcccatgtttccttattctttggagccagaaacgatcacgttaatcactctttccattagttttctcctatacattttctgatctttctctgagccagttaagagtcattcagccatttgataatggacactagtttactttgaccttgcaaacacaaataccctgtttgatctttatttgctgagagcagtaagacagaagaattacaataaactttttagcacccttctgttcaattctttttcagaaatcgttccctcaaaaagcctattctaggctctttcttttggcagtttcctagaattttcctttgcttttcaccaactggaacattatcactagaagtaaactaagggaccatctaattcaacaccctcgttttgtactttaggatactgaagccaagagaagctaatttttttgcctgccataacacaactagttagtgaagcagccaaaactataagggatcttgccaccataagctttatcggcccatccgtttatctcctcaaagcagccctatacctgatttccttatttctgttctctaagtaagccaagctcagaccttagagtgaccttcccctaatccaccctgcctgacatccaataaactgacaaatccagttgattatgaagctacagtgtttttcaaaccataccataattgtctaggctgttgccatgctctacacaccagttttcttattccagtccctccctgccccagtcccagttcactctactcagcctctctactgcaatggataaaatcacagtttccagattcacaaagctcacagctctgccactttctagccttgtatttgtgtttcagttgctgctgaaactctctaagcctattttccatctataaaatggaaaccaacccagaggctcgttgtattacagagatattgcatgaaaagcatttagcgcagtgtctggcccataagaagtcctcagtaaatagtagtcttggggaagcagtagggtgttgtagtaagagagcagagcaggggacagcaaactacaggtctcagtacaaattcaacatggggcctgggttttttttaatagcaggggagctaaaaacagtttacttgttttaataagttgtacgaaacccaaagaagaatatgtaacggagatttatgtgttcctcaaagccagaaatatttactttctggccctttacagagaactttcattaattcctgttgacagctgtcagggtatgaatcctctctaccacttagaaactgtgtaaccttgggcaaatgttttaacctctccaaggtttggtttccctgactgtgaatagtacctatgttacagggttgttatgagaattaaatgagatcatttatatcaggtgcttagctcactagctgaaataggatttaataaatgttagctgacatggttacgtctactcattgttgcagataaatagcctctaagtgcagctttaatagtgattgtttcttaaaatttttgaacaaagtttttctatttcttatccaattaaataaatattccacattctggcattcaatatttctaacgacatcaagcaactctaaaatcattgaatgttttaaagcaacaggaaaccttagaaataactcatctaaactcatatcatagatatggaaactaagggccaataaaaccaaggcttctaggacctgaaatcagatcctctctttttaggtagtgtgatcttcatcgtgcttctgccatgcaatctcagaatttaaagggatttaagaatcattcattttcttcctaaggcaggattcgaccctataaaatccctgtcagtttggtcattcaaacccagtttgagtacagtcattgatgataaatcacccttttcccagggagcagttctggttgtttcaaagtctttataataaatgaaaattggctttcctgaaatctctatatattgatctattcctgcccactggagccaaagagaaacgtcacttctctacatctgtaaaatactcgttgtcaattttcgtatcttctctaagcatcctcgtttcaagctgatgtgaactagttgggtttttgattgttttcattgtcctgctaagtcgaaaagctaagaaaagcttggctctttcatcactgttatatatcccactgtgtaacagaacttgagttcagggtatacactctaaataactgcttttgtaaaagtattcaattatattgatttttttcgttccctctgttgttcctcataattaccctcagtcaagactttcatcttcgtctttatcttcctctgcaagaattaacagtggtcccttttgtgaacttcaaatatctgagactggtctcagttaatttaggaagtttattttgccaaggttgagaatatgcacccatgaaacagcctcaggaggttctaacgacatgtgcccaaggtgtttggggcacagcttggttttatatatatttagggagacatgagacatcaaccaatatatgtaagatgtacatttgttccatccagaagggtgggacaacttgaagcaaggaggggcttccaggtcacaggtaggtgagagataaatggttgcattcttttgagtatctgattcgcctttccaaaggaggcaatcagataagcatctatctcagtgagcagagggatgactttgaatagaatgggagacaggtttgccctaagcagttcccagcttgacttttccctttagtttggtgattttgaggccccaagatttattttcctttcacactttcaatataagctatccagaactgatgataatattccagatatggcccaaccaatggaaatgattgtgtttcctacataccatatcacaatcaaacctgttttgcaccttgcatttactttctttattaatgatgtcattgcaatttagaaaatttggggccacatttacttcttcctctctattatcttcagtttttatttggtcactaaattctgtttgctgactcttatatctaaaaataaaaacactcaaatccagctattcctctctaactactctgcccttccctcagtcctttctcagtgactattaatgatttggccttctaatgattagcctccctgtccccagacttttatccatctttatcactatggctagttatcttgctaaacaacagatctaatcctagtaccccattatattaaaaaaatcttctatagctacagctttctctccctccaggtcagtatccatagcctgtcaagatgtggctttgataaaggacagaaggcagggaaattctgggcagaagagggcaggtccccattgaggacccaccctcaagccaaaaagcctggaaccatggcccaaagtgagaacttacatccctgttttccctcttgaagggtgccttttccaaaaccatccattaccccccacccaccccccaacctgtgcctataaaaaccccagagctcagctggcagaaggaggagaagcagatggatgtcagaaactacagttggacatcaaagagaagcggcttgactttagagggacagtttgacagcatagctttggagaggagtccagctgtggatggtcagactccaggggaagattaccttcccactccatccccttttcagctccccttcccactgagagccactttcattggcaataaaatcccccatatttaccatcttcaatttgttcatgtgacctcattcctcctggatgctggacaagaacttgggtgccatgcgtgtgggtgaaaaaggctgtcacactgaccctccactgagctgttaacacttaagccatctgtgaatggcaaagctaaaagggcgctgtaacacttcctcatgggcaccctcccctagaggctgctgcagggcccgtacggtgttcactcttgccagcactcaaaaatgctggccccagctgctgcacctgctcacctgtgctcccccttccatgaggggtggaccagcgagtgagtggagtttgctcccctccagttcccacccacgaagggatcagggaaatatcctccttcagctccagtgaggcacagtggtatacacctatagtcccaactactgaagaggctgaggtgggaggatctcttgaacccagaagtttgaggctgtaggcactgtggttgtacctgtgaatagccactgccctccagccttggcaacatagcaagatctcatctctaaaaaagaaaaaatatatatgatgtggctccaattcactgatctagcctcttaactgaattccttcctcctggctgggcacagtggcttatgcctgtaatcctagcactttgagaggccaagacaggagaattgcttgagcccaggagttcaagaccagcctgggaaacatagtgagacttcatatctacaacacattttttcaaaaagaattttttcctccctgctccccaccctacccccttgcaaccttatttactcttcggcctctggccctctcgctatgtctttctcagcttcatgcctttgaaaatactctttctatgcctggaaagcccttataaacctggaaattcctattcttattcaactctgagccagtccattttagtggcttagttcagaggctctagatttaaattgcaattctgtcagattctgtctgctttgccaacctcaatcaagttatgtactatgcctcagtttcctcatcagtagaatgaaaataatacagtagtgcttttttcatagggttgtagtgaggattaaatgagatgaagcgtataatcctcatgtacataacacagtacatactatatgtgttgcacatagtaagtgctcagttctttttctttgcattattcttagcacataagtcaagttacatttgctctcccttacgcaaggtcaattgttcttttttatgtgtttacccgttactttgttcatgcatttgttataaccactgccatcataaagcaacttgctatctttgttcataaaacaaatcccagattcactgagctcaaagtgagagaaggaaactttgcattatgtgcagttcctatgcttttctccaaatttcacatctccgttggggatctctcactagttatccttgccatacccccacaccagccttacaattttgcattatgtttcctacatcatgattctaaacggtcctcctgttcgctttctctccatcccatatcgttgcagatagctatttcctctttttaagacagaaacacatttgcattttgcctaagctacatttgtaaattttacagtattttcgaaagacacaatggaatctaggaaagatgcaacagataaagagattaactggccaatttttgagagcaccatccgtaaagtccacgaacaagtgaggcttccttgtcggagaaagcaattcagtcaccataaatgatcattcaagcctgatctcattccctcttgaaactggaaattgaaagcttgttcctctgacagttgtgttgtcagtggatatgcccagtgtgcaaaggactggacaaagggcaaaagtacacatatcccatctggaattctgagtcatccctgagacatcattttggatttgtctactgagatgaaattaaaacatgagtaatcaagcccacacttcttccccctcaaactcatctctttggtatcatcaagaaaatcaaatgctaatagccattgacctcctaattctagtgctcttagctatgataaaacagtcattaacttaatctaaatgttgcaaataaaggagccccatcaaagctgaagccccaaaattatacaaatgagttaactgggaaggcatgggggaaacaacagttttcataagacacactctaaatctagtttattctcttaggaagacttttctcatcaatagagagccacataaagatgccttacctgcctttcacggggactatatcaattggctgtactgtcactcactccaaaactctcaaaatgcctaacacagattcttgattttattgattgcattagatgttacgttttctaaattttcagcaccctggaggtcacctcaggaaatcatgcagtttttgaatgattttccttagaaatacacgtgtagctatacatatgcccatgcgttatttaatcagttagtgaaaggaggaaaacagcatttctattattgacctttctcaatctctgaggagactgtatgtcttgcctacagtccaggattgaaagcaaaagaaaaaggcactgacaaaatagcattttattttaatagcacattatggagagacaaaaaaaaaaaaaaaaaaaaaaaaaccctgggatttcctttgtctaagtagaattgacgtatgggtgagatcagtctctattttactcagtacaagtgcacacatatttatgtacacacatataattgtcatctttgggccgggcgcggtggctcacgcctgtaatcccagcactttgggaggccgaggcgggcggatcacgaggtcaggagatggagaccatcctggctaacacggtgaaaccccgtctctactaaaaatacaaaaaattagccgggcgtggttgcgggcgcctgtagtcccagctactcaggaggctgaggcaggagaatggcgtgaacccgggaggcggagcttgcagtgagccgagatcgcgccactgcactccagcctgggccacagagcgagactccgtctcaaaaaaaaaaaaaaaaaattgtcatctttggaagctaagggccctgtatcagagtatcagaatatacctatatccaggatgcaatgttctccagttttgcattaacatcagctacaaggttcactgccatctaagactaatcaacagtaatagctaaaggacaaaggtcagttcctgagagatatgcctaaattcatctggctatatcttctgttcctcccaaaccctaaccccataaattcttcattgtttagaaggattcatattttttgtttgtttttcatattcccattttattggctggggttagaattgcaatggcagcaaaaaacacagaagctatctacagtggcttaaataaatagagttttatttatctccaatattaagatgtctggaaataaggtgctttgggcccaacagtatcaggactggcatctgtatattttttattgacttttcctcatgcaatatagcagccaccattatttcacagggtgaaaaagagaaggcaaaaagggtgtactatctgagtcttatcatttttataaagccaaaaatttcccagaaaccttttttgaaagacttctacttgtatatcattgtgtagaactgtgtcacatgacagccaccaacaaaaagatggctagggagaagtggttttcaacaggtattgaagtagctaaccggcagtgtctgccggtcttcagttataaacaccagcagctaactctggctaattcaagtcagggaaaacaaaggggatggggtaggggctctttatttaaaagatactcatagaaatgaacgaagtaatttgaaaactaggtctcagaataggacatgaagtataagagttctaaaatctcaaaagcaggaacacatgcatcttctttttaagtgttgtctttgaaatactaagctccaaagtctttccaaccttgtattattttcttcctttgtcagcttcctgagtggcagagtctgagtaacctatggggtctttgaactctttaggggaattgaggaaggcaaaaaggtaccatgattggcagctctactagagtcacaagaaatatggggaaagcgattcctcaaaggaaaaacaaaaacagaaacaacaaccaggcagttagtagaaggatgaaatactggacccacaaagacaacatatgtcttctcaccacacttggtctctctctctctctctctctctcacccttctctctctctcatagtaatgaaactaaagctgcaaaactaaggcctagctattcattgtgatccttatgagatcataaaaaaaatctgtatttaagtggagaaaaataaatggaatatcaactttaaaaaattttttttgagacagagtctcgctccgtggcccagactggagtccaatggcatgatctcagctcactgcaacctctggctcccgggttcaagcaattctcctgcctcagcctcctgagtagctgggactacaggcacgtgccaccacacccagctaatttttgtattttcagtagagacagagtttcaccatgttggccaggctgttccgaaactcctgacctcaggtgatccacccacctcgacctcccaaagtgctgggattacaggcacgagccactgcacccagctggaatatcgatttaattgtaagagaaaaatgcactagtttaaaaatgtgtcctctttatcctcaggttttaaaaatatttttaaggtagtttagaaaaactgaagtgattatttgataaataaatttcaaatgctatcaatggaacaagaatggatattagatatcctgctaacaaggatcatatttttacaagttgtttctccaaagagaacagagctacagctgagattctggtgcgcataaacctttccatcagagctgtagtcacctaacaattcttatatcacaatcttcatatctcaatcccttttccaaataacttcatctttcttaagttgcatacaaatgttataatctaatatttttgagatggatatcatgtgtcataaaaagaaagccattgtaatattaccaataccaagtattagcaaatattgacatagctttagaataaaaataaacagagctcaggttctggctctgccatagctagctagatttatcttaagacttcagtttcctcatatacaaaatgttgatagtatcatcatcttgtaagccttgttgtaaagagcaatttagctaacagtaacagtgtttaacatgcataaagtgaagactcctttctgggctgataagaacgctagtttattcatttgcttatttctatatttttaagcttagagtctgaaaattttcagagtctgggagtcaacgtgtggggtgtgaattggaacttcaccacttactaacaactcccttttgtagtgcttccatttatttatctgttcaataggagtaataatagcactcgctcaaagagttgtctgaggattagatgagacaatgcttgcaaaatgcaaagtggagcacctggtgtatagttggtattcaataatttctagttgttgatatgatgatgacgatgatgatgtattctcttgatatgtgaatgctcatcacaccatcctatggaatatttgattttaagaaaaagttgggtttgttttttttttttgtttttttttttttttgagatggagtctcactctgtcgcccaggccagagtgcagtggcgcaatctcggctcactgcaacctctgtctcctgggtttaagcaattcccctgcctcagcctccagagtagctgggactacaggcgtccgccaccatgcccggctaatttttgtatttttagtggagaccgggtttcaccatatttggccaggctggtctcgaactcctgatcttgtgatccacctgcctcggcctcccaaagtgctgggatgacaggcatgagccaccatgcccagccaagaaaaaatattttaaacaagttaagatcatttactatactgtgccctaagatgaggtgaacatgtagatcatgagatctaattgattttagatgcagttcagttttttaaaagaatgacctgctttccatattaaaatttcaaaacaatgatatgtggagatgatgacagaatatggctgaatgaggtaccttgttatcctcaaccttttggctcagagacctcttccttgctggaaactttcctaaccttttaatgatttattaacattttgcatgcactctttatacctttcattaatgactagttcactgcaaatttttctttgctttatttcctattcttggtgtgacattcattctctatctgtttctatggaagcttttgtgatgcctcagagagaaagaattctgagtctttgaaataatgaaaacattactaaaccataaaacctagatttcaggagcctaatagaggattagagctttattacgtacagccatcttacagtttagccttcaagtctcaattgtggaatgatcttttgtcctttctctccagtgtgcatgtgtgcatacacatatagacacagttcgcgcttcagtcatataaatgggaagccacaaagcttcctagagtacccagatgcagaattagaagacccaatcttgacaccagggtcaggggatctgtggtttggggggacttgtgctggctatattgttgtcacagcaggaacagtttgtgtcggtatagaggctttaacttctagtaaagggatatataatgaaaatgtaagcaaccatcgtttatttttctcacataataggaatttaagagaaagatatacccaaaattggtttattagctcaacagtttcattcagaatccaatgtctttccatctttgcatttgctatccttagcctttggctttggtctttggaattgtcacgcgatggttataaaatggctgccacactccaggaattgcatcatgacagtgtgaatggaaaataaaggaagagtggcagttcttgtcatgtttcagaagcaacagcatgtctccctaacatctctttggccagaactaggtcaagtagctgcatctacctgcaagggaaactaagaaattgactatcagtgctttttaaacttttttttgtgtgtgtggaaatagataatcactagagaaaaaagggagagtggaatggttgttgatgaggcaaccaacagtgtctaccactctatttataaaccttttcttgatttttcctactaaatgtgtggccgttttttttgcttgctttttgttttttgtttttgagatggagcctcactctctcccccaggctggagtgcagtggcgtgatctcggctcactgcaacctccgcctcccaggttcaagcaattctcctgcctcagcctcctgagtagctgggattacaggtgtgtgccaccacgcccagctaatttttgtatttttaggagacatggggtttcaccatgttgatcatgctggtctcgaactccagacctcgtgatccgcccatctcagcctcccaaagtgctgggattacaggtgtgagtcaccgcacccagccaatgtgtagccttttagttcaaggacctttcattataaatcttcatagtccaaacacccggcatattgtctggcacaaaataggaagaaatatttttggacgtgccaaggaatttgcaagacagtgagacaaatagccagtaaaaatgttagcattaatatattattaaaaatagtgagaaatgctccaggcgcagtggctcatgcctgtaatcccagcactttgggaccccgaggcgggcggatcacttgaggtcaggagttcaagaccagcctgaccaacatggtgaaaccctgtctgtacttccagctacttaagaggctgaggccggagaattgctggaacccaagaggcggaggttgcagtgagccgagatcacgtcactgtgctccagcctgggtgatagggcaagactctgtctcaaaaaaataaaaataaaataaaaagaaaaatagtgagaaatgttatgaagacaaagaataggctactttggaagaataatagtgggaacttcttcatagtctaggaaggcctctctgaaaaggatatatttaagctaaaatctgaaggttaggtcagtcatatgaacagggaggggaatggaataatattttcaagacaatgacctaaaaggaggcaagtatggctaggagctaatgactgagggggtgagtggtacaggacaaggctggagagtttattttatgggtaagcagagaaataatataatctgacgtacctgtgaaagtacacctgagctgatgtacctgcaaaacatcatacaatctgatggacctgctgtataaatgagagattgaatgtggcaagagtagaagcaaagaggccaggtaagaggcatttgcagttgtcttgatgaaagaaaatgactactgggagtaagatggcggcaatggaaatagagagaaatgaacagatttgagatgtattttcgagacaaaatctgtatgacttggtgatggattagatgtcaggcatgagggattgaggatgactcccaagttttttttgtttgatcaacttgttgtactgtttgctgaggtgataaagatggaggaggaagcagatttggaaaagatcaacagttcagttttagacatgttcagtttgaaatgtgtgtgatatgtccaagtgcagaagtcaaattcaattatagctcaaaggagagacccgagctagaagcgtaaatgagaaaaatattgatacaaaatggaatttagagcatccagaatggaaatcacttagcatgtaaagagggaagggaagatggcctaggaccaaaccttgataaacttcaagaaaaagaagtcaagcagaggtaggagaagagaagtcagtcaaaaatcaaaagaatatgacatctcagaattcaaggatgtgaataaatgtgtaagtgatggatggctttcggtctgggctttttgttttttttttccattttaagttccaactttgctacaatccggctacgaatcccacaccctcccaaattatctgaggatgttaattgatacttgatcagaaagcagtgatttttaaaatcatatacttctaaattatctgagatatgaagcaatgagatagggaagtggctgaaatatgtttctctggctcagctgtcatgagggcttgctctagaatggcactcaagcacatgtttatccactgagctctatatcatttattccattagctgaagaaggaatctctcacactctaacttcagttctgttggacatgggaataaaagttagatgtatacagactaaactaaacagatggtagaaaaacaaaggattcttaaagtatattggagaaatgcatttctatggtcaattttcttgaatatcctaagatcaggtttcatgtatataattctttacatttcacaaagcacctttagatgtgtctattccatttaaccctcatcctaactgtgtgaagtagggcacagaagtgtagaaatgattttttaaaactcactaagctaatcaatggataatctgtgattataatagaatctgagtttcggcatctttatcttattccttactgcactatatctggaatggtaaatattgttcatctcacaagcaagctcttattgactgatatcagctgcctagagtggtttattgtaaaagagcataaagcaaattggggaagactacaatacagtgccataggctgattagtaatttctaccattggtattaaatgagaaaataatggtacaagtgctttacatttgtctgccattcctaaactaaggcacctcctgttatttataaggaagaatattctgagaagtttaaaagtctcttgttaaatcatttgatgacgttggataaaatggcttaaaataagaatatgcctgttgcacaaataatctacactcccccaagataatgaataagtcagctggagcatctcaagtttcaatatgtagaggatcaaaatgaaatagtcataaaaccccttgcagacatttcttgggcaggcaaactaatttcctagtaaaagaagttggaagttggacaaattgtatatgggaactttctatactacttttgcaaattttctgtaagtttaacttttcctaataggatgctgagattcagctcttccaatggtctcaaatgttttttggttttgttttgttttgttttttgagacggagtctcactctgtcacccaggctggagtgcagtggcgtgatcttggctcactgcaacctccacctcacgggttcaagcaattctcctgcctcagcctcccaagcagctgggattacaagtgcctgccaccatgcctggctaatttttgtatttttagtagagacgggattttgccatgttggtcaggctggtctcaaactcctgacctcaggtgatccgcccaccttggcctcctaaagtgctgggattacaggcatgagccaccgctcctggcctcatttaaccattttgactttcactttttctgtcttcaaaatgaggtattgagctaggtaaacttaatgtcttttttcgctttaattatctaataattctgtgattctcaacttggtgtgttaaaccagattacacctaagaaaccctgaagactttttagctaggagtttaaatattcacttagtcattcaattaatatctattgtgggtctgttatatgccaggcgccattttaggtattgataataaagcagcaaacaagacaaaacccctgccctcaggagagcttacattcttgtaaagaagacagatgataggccgggcgtggtggctcactcctgtaatctcagcactttgggaggccaaggcgggtggatcacgaggtcaggagatcgagaccgtcctggctaacatggtgaaactccgtctctactaaaaatacaaaaaaaaaattagccgggcttggtggtgggcacctgtagtcccagctactcgggaggctgaggcaggagaatggcatgaacctgggagctggagattgcagtgagccgagatcgtgccactgcactccagcctgggtgactgagcaagattccatctcaaaaaaaaaaaaaaccgaaaaacaaagaagaaagatgataaacaagtacacaattatcatataacaattttaaatagtgacagcatgttgaaataaataaagcaaggaagacgctagagagttgttcatggaaggaattgtcattttatataaggtgatcagggaaggttccactgaggaggtgacatttgaggaaagacctgaaagaagtggggagggagacccgaaagttcatgaggaattgtgtcccaaacagggcaacacataaaaagtccttgaggcaagactaagctgattatataacatttaaaagaattaggccaggtgtggtggctcacacctgtaatcccagcacttttggaggccaaggcgggtggatcacctgaggtcaggagttcaagaccagcctggccaacatggcaaaaccgcgtctctactaaaaatacaaaacttagccaggcatagtggtgcatgcccatagtcccggctacttgggaggctgaggcaggagagtcacatgaacccaggaggcagaggatgcagtgagccaagattgcaccactgtactccagcctgggtgacagagcgagactctgtctcaaacaaaaaaaaaaagaattaatttacatatcatgagatcatctagtctaacacccttactagacaagttcaaaaaggttaagacttggccaagatgacacagctatttaatgtgatatctgggttagaattcacctcatctgaattcctctcaaattgtgctctttgaggtcaatgtgccttttaaaaaatgacagaaagcatggctgtagatttcagatcataccaaatttgatggaacaatgaccatttttagcttcctatagagtctaagacttgaacttgccaagggagtcacagctggatttgtaagcatcaaatccacaaatgtacttaatgtcaaccaaggattttgtgtcacctgtaatgctcccccaggaagcccccaagtccactagtcctaatcactgtgtttggcttcataacctgttggcccaaacattacgcaaaaaagagcaatattcccaaggtggtcatgttagttgtggtgagatgtcaaccataagtagatctgaccgaggaaatgccttaaggaagcagctcaggaacacctgagtatatgtgtctagaatgaagcctattaaaaaaactactgcagagctaaagacagctgaaagccattatgacagtcacaactacttgatagattgaaaccaaagagttcctttgtgattagatagatcaggactctaaatcatgtttttacttcatgtgttcattcattcatcatacagtcagtgattcagtaaacaatattgagcatccattatgtgccaagcactgtgttaaattctggaaacacagagatggattagacccctgtccccagggagcataaagactagcagagttagacctccctcccatatgaagaaattaaatgaggtaaggcattaaaagtgctatgattacataatacagaacccaaaggggaaggcattttctgaaaaacagaaaactgaaaataccagcttttcagcctcacacagacataggaaaaccaacccccatcaacatcatctcttcttttttttttattattactatagtttaagttctagggtacatgtgcacaacgtgcaggtttgttacatatgtatacatgtgccatgttggtgtgctgcacccattaactcgtcatttacattaggtatatctcctaatgctatccctcctccctcccctcaccccaaaacagtccctggtgtgtgatgttctccttcctgtgtccatgtgttctcattgttcaattcccacttatgagtgagaacatgcaatgtttggttttctgtccttgtgatagtttgctgagaatgatggtttccagcttcatccatgtccctacaaaggatatgaattcatccttttttatggctgcatagtattccatggtgtatatgtgccacattttcttaatccagtctatcattgatggacatttgggttggttccaaatctttgctattgtgaacagtgccgcaataaacatacgtgtgcatgtgtcttcatagcagcatgatttataatcctttgggtatatacccagtaatgggatggctgggtcaaatggtatttctagttctagatccttgaggaattgccacactgtcttccacaatggttgaactagtttacagtcccaccaacagtgtaaaagtgctatttctccacatcctctctggcatctgttgtttcctgacttttgaatgatagccattctaactggtgtgagatggtacctcattgtggttttgatttgcatttctctgaacatcatctcttaatataaaaagcataatgtgctgatttcacattgcatgcctgtatcaaaacatctcatatgctctataaatatatacgcttaatgtgtacctacaaaaattataagaattttttttaaagcaacaataaatatcttcattagtcaaccaaattaaatctattaatatatccatgtttgtgaacaggatggccacagaaccctgtggatgcttaccacttaaacatttcctgaaacaaatatgtttccaaaacatcttgcctgtctaatctgacaactgcagacatcctaactaggctctgaaggtgctctccatagcactgatgttattgattcagttgttaacagcgcaggcataaatgactgatgataactctctaaacgtcccttcctactgccgttgaaatggctctgggctttatccaagcagggctgctaaatgaatagtagatgtaccagcagaggagaaattggtcctgaggtgaattaactctcctgaggtagatttgtttgtgcttccaacaacctgtacgttaaaccttgtgaaccttcatgtaggaattttgaggagaaatgggcaatttttggaaagcctaatgttttatcagccgctttttcttctcattgagacctgtgtattctcaagggactttggaagtttgccattttaagaacagacttgatgagaattatttgaagtcctccacgtttccatttatcagttttcctaatacagacatcctacgcacatcgttgaaagaatgttctttttgcctcacaggtagatcacaaaagtgggcccataatcattgggtagagggtttctcagctctgagttaaattgcagctgggtattgtttttctgtaataggatcttctctgagtgaatggtgaaacatgcccatttttgaggtcatgagagcagagctttccacatcatggacagaaaagggcaaccggccatggtttcagttatacagggagaggaaacaataggttttgtctctgctttgctattgcttcaacagcagcatactgttggacactcagacattagggcacaatttagacttgtttcacagctgtcatttctttcctcaaaaacaacaaacctgcatgggggaaatgagtctacatttcagggtttttcaagaattgataacataacatgtacttcaccatgaatttatattccacaggtccctgttctcttctctggtcatcagagtacaaaatcacaaccaaaaagcaagaattgatatctatgaagctaaagtagtagtagtagtagtagtagtagtagtagtagtagtagtagtagtagtagtgaagcaggatattaccctgatcccctcgcgggcgggaactggactgcatagccgcttcggtgctggcaggggcagactccactggctcagtctcactgagttccacccctcatgggagaggaagcacaggtgagtgggtacaggagccagggtgagtgcttttgggcgccagcaggaacaaaactctgtgtgggccccatggcagtgtctaggagggtgcccgcgacccttgaatccccagaaggagtgttacagggcccttttatctttgccatctgcagatggcttaagtgttaacagctcagtggagggtcagtgtgacagccttctgtactcgcacttgtggcacctcagatcttgcccattttccaggaggaatgaggtcacacaaactaattggagatggtaaatgcgggggattttattgctgatgaaagtggctctcagcaggaaaaggagctgaaaaggggacagagcaggaaggtaatcttcacctcgagtccagctgtccgcaatcagactcctctctgaagctatgctgccaggctgtccctcggaagtcaagccacttctctccaatgcacaaccatagtttccaacatccagctgcttctcctctgtgccggctgagcctgggatttttacaggcacaggatggagggcagggtgggctatgggtggttttggaaaaggcaacatttgagcaggaaaacagggatgtaagttctcactttgggccacagttccaggcttttaggcttaagggtggggcccttgccagagacccgccctcttctgtccagaatttccctgcctcctgtccctatcagtagtaatagtagtagtagtagcagcagcaacagaagtaatactaactactacataccaagcattatctacgtacttcatatctattcaccaacctaattgttacaactttcactcgcgtccgtgtgaagagaccaccaaacagtctttgtgtgagcaataaagctttgtaatcacctgggcgcaggcgagctgagtccgaaaagagtcagcgaagggagataggggtagggccgttctataagatttgggtaggttaaggaaaattacagtcaaaggggggttgtcctctggtgggcaggagtggggatcacaaggtgctcagtgggggagcttttgagccaggaagagccaggagaaggaatttcacaaggtaatgtcatcagttaaggcaaggaccggccattttcacttcttttgtggtggaatgtcatcagttaaggcaggaacaggccatttaaatttcacttcttttgtgatttttcagttacttcaggccatctggatgtatatgtgtaggtcacaggggatatgatggcttagcttgggctcagaggcctgacattcctgtcttcttatattaataagaaaaataaaacaaaatagtgttgaagtgttggggcggcgaaaattttcggggtggtgtggagagataatgggtgatgtttctcagggctgcttcgaggtggatcaggggtggcgtgggaacctagagtgggagggattaagctgaaggaagattttgtggtaaggggtgatattgtggggttgttagaagaaacatttgtcatgtagaattattggtgatggcctggatacggttttgtatgaattgaaaaactaaacggaataagagaaggagaaaaacaggtattaaaggacgaagaattgggaggacctaggacgtctaattagagagtgcctaaggaggttcagcatagccttgccagcaaagattatttactttaagagttaagagtggtggtttggggatagcaccaagagatatcagctgtgatggcttggagaaacagtgtaaaccagcagtgtaaacaagagcagggcatttatgactagttgagactggtgaataggagtatgactagacagaagataggagggatgacaagttttttggggtgcagtctaagttggtctggtgtctggaatgagactggggcctaataaaaaggagcgtccatacaggagcttaaatgggctgtaccttgtagcattctgaggacaggcctgaattctgagaagggcaagtggtaaaagtattgtccagtcctttttaagttggtggctgagcttggtgaggtgtgtttttaaaagaccattagttcactgaatactaagagcctgagaaactgcttgggtgatttgactaataaagtccagtctgttataggaccgtatagaggtgggaaggccaaaccgaggaattatgtttccctgtgggaaaggcctctacctatccagtgaaagtgtctacctagaccaagaggtattttagtttcttgactcggggcatgtttagtaaagccaatttgccagtcctgggcgggggcaaatcctcgaacttgatgtgtggggaagggagggggcctgaataatccctgaggagtagtagaatagcagatggaacactgagaagttatttctttgaggatagatttccacgatggaaaggaaatgagaagttctaagaggcaggctagtggcttgtactatagcatagcctgcctttgctggtgtgtggccattaggcctggtggaactgccatcaataaaccaagtgtgatcagggtgaggaacaggaaagaaggaaatatggggaaatggggttgaatgtctggtggatcagagatacagtcatgggggtcaggcgtggtatcaggaataatgtgggaggccggattgaagtctgggccaggaacaatggtaattgtgggagactcaacaaagagtgagtacagctgaaggagccggggagcagaaagcatatgcgtcaggtgtgaggaagaaaatagattttggaagttatgagaactgtagagagtgagttgagcatagtttgtgattttgagggcctctaaaagtattagggtggtggcggctgccgcacgcagacatgagggctaggcaaaacagtaaggtcaagttgtttggataaaaaggctacaggacgtgatcccagtccttatgtaagaatcctgactgcacagccctgcacttcagcggtgtgtaatgaaaagggttgggatgagtcagggagagctcgggtgggagcagtctctaaagctgtcttcaaggaatggaaagaggagtggggaaaggatttaggatctatggggtcagctaggtttccttttgtgagtttatataatggttttgttaggatggcaaaaccaggtatctaaagtcgaaagtatctaaccatgcctaggaggaaaaaacttgttgttttctagaagggattggggtttgggagattagtcagacatgatcagcagggagagcacgtgtgtttttatgagaattatgccgagataggtaacaggtgaggaagaaatttgggcttgactgaagtaatgggggctgtctgtgaagccttgaggcagtacagcccaggtaatttgctgagcctgatgggtgtcagggtcagtccaagtgaaagtgaagagaggctggggtgaagggtgcaaaggaatagtgaagaaagcatgtttgagatccagaacagaataatgggttgtggagggaggtattgaggacaggagagtatatgggtttggcaccacagggttgataggcaaaacaatttggttgataaggtgcagatcctgaactaacctgtaaaccttgtctgcttttaggacaggtaaaatgggggaattgtaaggggagtttataggctttaaaaggccatgctgtagcaggcgagtgataacagactgtaatccttttaaagcgtgctgtgggatgggatgttggcattgagcggagtaagggtgattaggttttaatgggatggtaaggggtgcatgattggtcgctaaggagggagtagaggtgtcttatgcttgtgggttaaggtggggagatacaaggggagatgtgaaggaggctttgaactgggggaaaaggcggcaatgaggtgtggctctagcctaggaatagtcagggaagcagatcatttagttaaagtgtctcggcctaatagggaactgggcaggtggggataactaaaaaggagtgcttaaaagagtatcgtctaagttggcaccagagtttgggagttttaagaggtttagaagcctggccgtcaatacctacaacagttatggaggtaagggaaacaggcccttgaaaagaaggtaatgtggagtgggtagcctccgtattgattaagaaggggacggacttaccctccactgtgagagttacctgaagatcggcatctgtgatggtctagggggcttctgaggcaatcgggcagcgtcagtcttcagccactaaaccgagaagatctgggaaggagtcagagagccttgggccagagttccaggggctctgggagtggctgccaggtgagttgaacagtccgattttcagtggggtcctccacagatgggacatggcttaggaggaatcccgggctgcgggcattccttggcccagtggccagatttctggcacttgtagcaagctcctgggggaggccattctggaggaacccctcgcagctgcagttcaggcatttggagttcttctgtgctggagatatggctggggtttgtctcacagtggagggaaggaattgcaactcagaaatacattgctacttggctgcctctactttattattgtacaccttgaaggcgaggttaattaagtcttgtggggtttgagggctggaatttaatttttggagtttaatgtcgggagcagattgggtaataaaatatatattgagaataagacggccttttgaccttttagggtctagggctgtaaagcatctcagggttgttgccaaacgagccatgaactgggcttgtttttttatttgatgaaaaagagcctaaacgctatctgatttgggataaagaaaaaggagcattaaccttgactatgcctttagctccagccacctttttaagaggaaattgctgggcaggtgggggagggctagtcatggaaggaaactgtaagccggaccgggtgtgaggagcggaggtgataaaaggattatagggtggaggagcagaggctgaggaataattgggcctggcgaggaggggagaggtcagatgggtctgtagaaaaggaagattagaaagactgagcgatgcttggggttgggactgaggggacaggtgggagggaaagaaggaagatttggaaggagttgcattgggaacagagactggggaggggcagatgtgtaaaagaatgcctggacatcaggcacctcagaccgtttgcctattttatgacaagaattatttagagcttgtaggatggaaaaattgaaagtgccgttttctggctatttggaactactgtcaagtttgtactggggtcaagtggcatcgcagaagaaaataaggcatttaggttttaggtcaggtgtgagttgaagaggttttaagttcttgagagcacaggctaagggagaaaaaggaggaatggagggtggaaggttgcccatagtgaaggaggcaagcccagagaaaagggagtagagacacggagagaaggggtggggggttcttgtcccccagaaaagcggagaaggggtagagacatggagagaagggttggggggttcttgcccccgagaaaagcggtacttgccgctaaaggtgaaggaccaaggcaggcgtccccgtgtggtcagacacctctgaaatgtgggtgaataatcaggcaggcatccccgcgtgattaaataccaagggaagactcttccgagtccgtgaccggtgccggagttttgggtccacggataaaacgcatctcctgtctctaccagaaaaggaaaggaactgaagttaagagaagggagagattgaagtggggcgccaagattgaaaggagaaagaggttgagggatagtgagaggttggaggagagagtaaaaagaggccgcttacctgatttaaaattggtgtgatgttccttgggctggttagtctgaggaccagaggtcgtaggtggatctttctcacagagcaaggagcaggaggacaggggatagatctcccaagggaggtcccctgatccgagtgatggcaccaaatttcatgcgcgtccgtgtgaagagaccaccaaacaggctttgtgtgagcaataaaactttttaatcacctggatgcaggcgggctgagtccaaaaagagtcagcaaagggagacaggggtggggccgttttataagatttgggtaggtaaaggaaaattacagtcaaatggggggtggttttctggcgggcaggagtgggagtcacaaggtgctcagtggggaagctttttgagccaggatgagccagggaaaggaatttcacaaggtaatgtcatcagttaaggcaaggaccggccattttcacttcttttgtggtggaatgtcatcagttaaggcaggaacaggccattttcacttcttttgtgatttttcagttacttcaggccttctggatgtatacgtgcaggtcacaggggatatgatggcttagcttgggctcagaggcctgacaacaacgatcttgtagataggtactgttgtaattcccagtttacaaataagaagactaaggtatagagagattgagtaatttgcccaaagcccacagctagtaagaagccaagattcaaacccaggtaatatggctgcagacctggtaatcctaaccattacattaggctgactctcgatagttaacttatttaagctagtgttaatcacatcttaacaagtttgagtaataaaatcttaggttgaaaggggccttcaagatctagtctaaatcctttcaggagttcttccacatttctgctagaaaacactttggcctaggcttaaaacttagtgatggggaactcctcactttgtaaagcagcctgttcagttcacaaacaccctaataattaggctgttatctcttgcattgagctgaagttgatcttcccataacctctgcctttctgtctatatgtatgctttggaaatatacacagtaagtgtaaaccctcttggcaaagacagcccttcaaatacttgggaggcattcaattccccccgccacctcccgctctactctcactaccaagtctttagaatagagtacaggtatcaaaatcaaaacaaacagggagtagaaacttagtgccagactttaagtattttttacttataaaatctttttgtgtaacgagtagagcaactcctaactgcatatatgtactaagtttgcaaatggggcaatttgtttttccccatgcactggcatcagaggtggtaaatgctggcctgtcagattcaatgcattttgctgggttagaaccgcaagggctttccaggggaccaagctctctctgctgtaatcattaaaacctgcagaatcctgtgtgactctggggagaagcccagtgctcttggccctcatccaccctcactaggaaagctgcttaaaactaggacagaagaaacaaccactggcttaggatcagtcctcagacctgccttggcactaccccttttattccaaattttgcagtggcacctccaacttcttggtcacgttttgtaccttgtctgtttcctcatataacttcattccaaattccaacccatgctctgacatttcctctccattcttgctagacaggaatttctggatattggatattggcccctgcccataccctgactctgtatattcttttgtcctgctgaccagtttgagcttctgaataacaaaaactccccaaccactttaaagtcctctactttagcttgatgggtccctctcctgtattttctgaccttgactctgctctctgtacaaatagtaattacactcacccccaagcagagaatctgtgtcaaaatccatcaggatatctaagcacatcattatatctgtcaacttccccagactcctgatctcaatcccttattttcaacaacctggcaccgacagagtataatttcttttgtatcatgatgcagtttgatgtgcttttcgaaaggttatggtggtgattttaaagagatctgttttgttagaggaaggaaggaaaatagtgctgtttgcttccatgcagttcctcagagcctatgccagggtgatttcagctcatgagagaatctaaagtctaaagagatgtgtggagattagaaacattggtgtaaaaaatcagattacggagacgtaatatccagggtgtcagaggaggcagggagcttcaatcatgtttgaaactataggtcccacccaacaggatgagaaaatacaggagaagccagaaaaggtacctgcttgtgggtaaaatcaattaaatggaatcaatggtatggtagccatcatttctttcttttcaaattgtggtaaaaacacataatgtaaaatttaccattttaaccattttttagagtatagttcagtaatgttaagtatattcatgttgtcatgtagtggacttgcagaactttttcaccttgcaaatctgaaactgtacccattaaaccacttctcatttcctcctttcccccagcccctggcagccatctttctactttccgtctctatgcatttgactattctaggaacatcatgtaagcggaattatacagtatttgttcctttttggactggcttatttcacgtagcataatgtcctcaagtatcacctattagctgtcattgcttgaacacggttttctgccaagcacatgatctcgttttattcccagcacaactctcaataacaactgtgtaccttttttccctttcacagattaggaataaaaggctctccaagactaggctcagaagcagaagcagttggagagttgcttgcagaaggattattgtcatactgggaagtgctctcaggatttacacctctaagaaactgaaaggggcatgactgcgcagaggaaaagctggttcaccatgcagttgcaattatggctgcagcaggagcatgcagggaagctctggagtaggtttggcctttcagagttgtccccagtaaatcaaatgggtgaagactttaacccatttatgctggaggttgcaaaaatgttttgtgaaaagtcagaccttggcgatgaccttgagcagtaggatataaaaaactcccacaagcttagcgtcccaataatggaacactaggcataaatgagttaatccctgcatcagccagtcattggccctaggtctctccctgagggaggggatgtagctgtgtgaggcagttccctgagggcacattccaatgaaggccccagctgtgagccagcagccaataaggcagcaggtggcccatgcatgcaaaggccctaaagaggaggtccagggtggagcgccacggtgtctactacagatgctgaaagagtaaatacattttatttatttatttatttattttattatactttaagttttagggtacatgtgcacaatgtgcaggttagttacatgtgtatacatgtgccatgctggtgtgctgcacccattaactcgtcatttagcattaggtatatctcctaatgctatccctcccccctccccccaccccacaacagtccccagagtgtgatgttccccttcctgtgtccatgtgttctcattgttcaattcccacctatgagtgagaacatgcggtgtttggtcttttgtccatgtgatagtttactgagaatgatgatttccaatttcatccatgtccctacaaaggacatgaactcatcattttttatggctgcatagtattccatggtgcgtatgtgccacattttcttaatccagcctatcattgttggacatttgggttggttccaagtctttgctgttgtgaatagtgccacaataaacgtacgtgtgcatgtgtctttatagcagcatgatttatagtcctttgggtatatacccagtaatgggatggctgggtcaaatggtatttctagttctagatccctgaggaatcgccacactgacttccacaatggttgaactagtttacagtcccaccaacagtgtaaaagtgttcctatttctccacatcctctccagcacctgttgtttcctgactttttaatgaccgccattctaactggtgtgagatggtatctcattgtggttttgatttgcatttctctgatggccagtgatggtgagcattttttcatgtgtcttttggctgcataaatgtcttcttttgagaagtgtctgttcatgtccttcgcccactttttgatggggttgtttgtttttttcttgtacatttgtttgagttcattgtagattctggatattagccctttgtcagatgagcaggttgcgaaaatttttctcccattttgtaggttgcctgttcactctgatggtagtttcttttgctgtgcagaagctctttagtttaattagatcccatttgtcaattttggcttttgttgccattgcttttggtgttgtagacatgaagtccttgcccatgcctatgtcctgaatggtaatgcctaggttttcttctagagtttttgtggttttaggtctaacatttaagtctttaatccatcttgaattaattttcgtataaggtgtaaggaagggatccagtttcagctttctacatatggctagccagttttcccagcaccatttattaaatagggaatcctttccccattgcttgtttttctcaggtttgtcaaagatcagatggttgtagatatgcggcattatttctgagggctctgttctgttccattgatctatgtctctgttttggtaccagtaccatgctgttttgcttcctgtagccttgtagtatagtttgaagtcaggtagcgtgatgcctccagctttgttcttttggcttaggattgacttggcgatgcgggctcttttttggttccatatgaactttaaagtagttttttccaattctgtgaagaaagtcattggtagcttgatggggatggcattgaatctataaatttccttgggcagtatggccattttcacgatattgattcttcctacccatgagcatggaatgttcttccatttctttgtatcctcttttatttccttgagcagtggtttgtagttctccttgaagaggtccttcacatcccttgtaagttggattcctaggtattttattctctttgaagcaattgtgaatgggagttcactcatgatttggctctctgtctgttattggtgtataagaatgcttgtgatttttgcacattgcttttgtatcctgagactttgctgaagttgcttatcagcttaaggagatttggggttgagacgatggggttttctagatatacaatcatgtcatctgcaaacagggacaatttgacttcctcttttcctaattgaataccctttatttccttctcctgcctgattgccctggccagaacttccaacactatgttgaataggagtggtaagagagggcatccctgtcttgtgccagttttcagagggaatgcttccagtttttgcccattcagtatgatattggctgtgggtttgtcatagatagctcttattattttgagatatgtcccatcaatacctaatttattgagagtttttagcatgaagggttgttgaattttgtcaaaggccttttgtaaatacattttttaaggtcacacaaatgacatatgggacagaacagtgtttaacttcaaaactcatgttctttctgctatactgggccttctctccgaaagaggcctaatttgcacactacagtcaagcttagaatctattcatagttaaaatgtggagtcaaagcccaggaactatgtccttcaattcatctttcattacttacctattccttatcattcccgctgacaccaaccattttttctgacccttgtcatgaggagtgaagttgtatcattgcagcagctttctacttgtactctatgcctaaaatctctccttcctccatctggtcagccaattgctgtcaagttaatcttgcaagaacactacttttgccagtttaatttcgcaaaactcctgctgtgtgccaggagtgtcccagacatcaggtagtctaagataagcgatagtctctgcccctaagccgtttgcaacctttggagagacaacgtcattatcaccaccagcacccccattaagctcagagctaatatatgccagatgagactctgccagtcactgtgctaaggacttgacatacgttatctcccttaattctaacaactactttctgaggtacctctgatgagtagtatcatttttagatacaaaagcagaaacttagcgagttaagtgctttgcccagtggctctcagttgagaaacgaggtagtcacaccaggcagtccaacttcagtacctgagttcttaatcatcatgtttacaactttggctcaacattgtcaccaagatcgggttcaaatacatccattatcaatattctttctgtctccttgtatgtccaaacaaacaaaacaaatgcttccctcctgatgaggaaagtctccaaatcttgatacctgctgtgtctggacagtttttcctgctatttgctgagtgctggaaggattccctcaatccagatgtgattgcagatccagctcaagctcagcgtcctccagggaacctttgaactaaccacccagaaacgagcctttcaccggacactactcattttcacatatctagatcttatttccccatctgaactgtaagtgtcttaagagctgattttgttgttttttaataaaaaataattcttagttttttttcttattaccaaaaaattattcgccattgaagccttctgaatttttaataagaaaactattggtatattgcttcaaaaagaaatctaagcttctagattcttgaaaagggatagtgacagaaccttagaattaatattcaatataactaatctgatgaaaattcagtcattgatacattactgagaactactagatctcagcatttttaattgtagattcacatggagttgtaagaaattatacacggactccacatacctttttaccgagtttcctctaatggtacacctgcaaaactctagttcaatgtcacaaccaggattttgacgtcaatattgtcagtatacagaacattttcatcactacaaagatccctcctattggccttttatagccacacccacttccctgccccccctacctcctacttccagcaactactagtctgttttccatttctttaattttgttatttcaataatgttatatgaatggaaccatacagtatgtaatattttgggatggacttgactcactcaacataattccctagagatttctctttttatatgcagcaagacttgtttcctttttatcgtgagttgtatgctatggtttggatataccctagtttatttaatcactcaccccttgaagacatctgagttatctgtagttttggactattgtgaataaagctaccaacattaatgtacaggtttttgtgtgaacataagtttttatttccctgagataaatgctgaagagtgcaattgttaggtcatatggtagttgaatgtttagttttaaaactgccaaacttttccgaagcgtctgtactattttatattccaccagcaatgtatgagtgatccagtttctctgcatcttcaccaacatttggtgttgtcattattttttatttttagccattctgatatgtgtgtaggaatatctcattgtgcttttaatttacgtttccctcgtggcaaatgctgttgaacaacttttcctgtacttgtttgccatatgtatatcctcctcattgaaatgtctgttcatgtcttttgtctattttctaattcaaaagtttttttatagttcggttttgagagttctttctgtatcagatactagtcctttcttgtgtatagggttttcaaatgttttctctctcatcttttcatcttcttaacaggggatgaaaaagaattttaattttggcgaggttgaatttatcgctttttccttttatggatcatgcttttgtgttgagtctaagaatactttgcctagccctggatcccaaagattttctcctgttcttttttttttttttttttgagacggagcctcgctctgtcgcccagcttggagtgcagtggcccgatcttggctcactgcaagttccgcctcccgggttcacgccattctcctgcctcagcctcccgagtagctgggactacaggcctccaccaccacacccagctaattttttgtatttttagtagagacggggtttcaccattttggctctcctgttttatatgtcttatagttttacattttatgtttaagtctgtgatccatttgatttttatataaagtatgaggtttaagttgaggtttattttttgcatatggatgttcaattgctctagcataattatttgaaatggctggcttgattattgaagtaaggtcagacttatttctctcctgggcttcagacccagccaccttctatgtttcttgtccaccacaacctgaatgtcccacagacacctcagacttaacatgtccccagcagctcattattatcctccttttgtcccaatccaccctcaacatttttccctccctaattgtgctgttcttatgaacgctacgcttcacccaattgcccaagtcaaaaattagggtattatttctgaatctacttttatctttaaatctaacatgatgcattgccaaattctgtcagctctatccccaagccatctcttaattcattcccttatttacacctcccttgactccaatatcttttgactcaaatgctacatagcctctaatttatctccctgatattgttcttgcttccgaatcccttttccacaatgcgcctatagtaatcctcctaaaatgcagatctgattaggtgactctccttattttaaagtctttcttattgttttctcctgccctaaggcagaagttccaacaaatcttgttatcagattctggattaaatcccggcctcagcagtgggacctaagatagtgcctgaatttccatgaacatttattgatgacaaagagggtcttaaataatgagtgatgtagactttccactgtcaacatcacagattctggtttttaatggtattcacatttgccttctccaagagtccaggtttaatgatggtgagacctatcctaagacctggctttgtagtgaggggttacctcatcacagaatcaagaagggacctcgggccgggcatggtggctcatgcctgtaataccagtactttgggaggttgaggtgggcagatcacctgaggtcaggagttccagaccagcctggccaacatggtgaaaccctgtctctactaaaaatacaaaaattagctgggcttggtggcacacacctgtaatcccagctacttgggaggctgagacaggagaatctcttgaacccgggaggcagaggctgcactgagccgagattgcaccactgcactccagcctgggcgacagagcaagactctgtctcaaaaaaaaaagggcggggggacctgggtgcaagtaattctaagaagcaggaataagagaacaagaagaatgaagcgacaaagaaagatgagcaattctctggaactgttgagaagtgtacagaagaaaacaaatctggatataggtagctacagcctgaaatatggaaagccagagcatgtgtatacctgctcctgctcccactggttgagaattgattcctttttcatctgatatgggcaagcattggatctgagtgggacacatcctctccagtgcacccctgccttttccgctgctctgaacttcacacaacgtcggaaagattcaaaacaatgtagaaaatctaagtataaatacaaaaaggaaacaagaagtttttctatcaaagctgtgaactatatgatatgagtaagctcaataaacactgtgcagaagttgggaggggaaaaagagaattgctgccaaagcactaacccctgtggctggctatgcttgcccacccaggaagctcccatgtcatgggggtcaggggaacctagaacagaaagctgaaaggctcagggatcccttttgagaagggatgctggctatacagcacgagttagaacttgcacagaaccgtccactactgctgacactggaatcacaggtgggctgacaagatgtgatgcaagcaccagacatatttgctacaaacctcaaagtggagcagagcagcggcagtgtcagtcttcttggtgtcaatagaatacctgtttatttgttgaattctccctatatgaataataataatacaagaattcaaagcaggataggctttgtgtcattggaggagtatggagaaccatcagtgcagtaagtgtcgtgggaggtttctagacagtttttaaaagtcgatattgagtcaaccatcaaatgtgaacaattctgatatgccagagcatttgtattcttaactcatggggttattacaaagatcaaatgaaataatcattataaagcactttgtgcagtgcctggcacaaagcacgcactcaatacatgttaatgtttatacaattattattattgattgtcagaattatcagccccacatcagcaaagaatagtaggtggtctgtcagcaggaacatggaaacattctcattacatagaagtcagtgttgcagggacagtcattaaaacaggatctaattttagtcttctgagggaaaatgctaggttctccggaaatgttgaatccttcctcgagcatgtagtttaatttttcaaaattatattgcatatcctgtaaaatgaaaatgaaattgtactgctgttcattaaaggcccccaaaaatcttaggcactatacaatataaatgaaaaaaaaggcgttatttttccatagggcataattagaaataaagaagcaaggtcactcacaaatttccgagctataaaggaggaaaggaacaagattttcccccggttattttatagctgccaggttgaactcatacttatccaatgagccccagaatggaataccgttctacaccaactgtactgatgatagtgattcagggagtaaatgataagattccatccttctaaagtgcttttgggattggattctagtaagtttcattttgctattggccaatcacaaaagagactacaatagagaaaagtgaagacatcatgctgaagacagactgctgcatagaaaaggaagagggaccccctaatttagagatatggatggagaaaaaaaggcacttatgctgtagcataagggaaacattaaataaagctataatagaggagaaaatgtctttgaatagaagaaaaaaatcagacagacagaaatagactaaaatgctaaaaaaaaagatacaaaaggacattgaaggggacatacagtgattattacacaaattaaatgcacacagttaaaagggaggtgaaaagcttctaaaaagaatgagtgtgtagtgaacttaattttatcatctttactaagacaaagttaaagtccctaaaatattttaagacacttaaaaaaaaaagtcttaaaattttgagagcctttcagctctgtcaactctagactttccctcctacttaagttttttttcttttttttcttttatcttttttatttatttatttttttttttatgttttttttttttttttttttttttttgagagagagagagagtggatcagccttaataagagaatggtcttctgccaggtggtattctcctaatccctttccagtgagatccacaagggttcaaaaccactttctggggtcttagaggcaccacttatctctcttcctctgctcatatctttctgctccagtgcccgcatagtttgtgttatcagtggtgcgtagcctgagacatccacgacctatgccagctctcgaagtaatgtgattggcatccaaagaaacacaagaagcccatgatttcgtccctttgcaatttaaaatcatatttaaaatgccttttggtcatacaaatttgaaaatgatcttgtaaatcacttccgggaatctatggtcaaaactcagcttagagttctctacttcttaacagagtgcctgccggtaactagtgactgtcaatgagtttgaaaacataaattgatgtgcaaatgctagataatagcaacatcctgtgcaactgggcagcatttctgttgtttggcttttttattttcgtggactctcccaatctgagagaaaatagatttgagttcctttttaatcggtttagacccagacaaggatttaattggtttagaccccattcacctacgtgtgtcactctgtctccaacataacagaggagatgaccaagacaacatgctctccagccaggaggtggggaatactttggtgtcatagcagacaattattgatggaaaactcatgttagaaaatgtaaggtaccttcttctagacggagtaaaaggggcagctgcccagactttcattttaaatagggagcccatgatacaaatcttttaatacaattttaaaaagaagagacatagggggtatctcttaggacctgtcaacaaccaaccctctatcaaatggccaaatcacaggtggtctgcagcttagccaaaatgtccaagtacctttttgtaacacagaatctcctttgaagatccagctttcattaatgatccccagcagctctggtcaatgtgtcttttcacaaatgaagctttttaaaagctttcagtggacaaatgtggctttgagttttcaactaaatctttctgtttaaaaggagtgctgaaatgggcatactttataatcttaaatgctgcacacaaaatactgaaatattattgaccctgagaggttggttcaaatcaaatagcatactcacgtaaacgttctcttttcctaatattagcaacagggaatgtgaaatagagaggggcgggatatgctggataggggtgcaccaaaattttcaaaaagcctcgaaactagtgtatattgataaccttgtggcatctaatatctagtattctttttttttttttttttttgagatggggtctcgctctgtcgcccaggctggagtgcagtggtgtgatctcggctcactgcaacctccacctcccgggttcaagtgattctcctgcctcagcctcctgagtagctgggattacaggcgcccgccaccacgcctggctaattttttgtatttttagtacagacggggtttcaccgttagccaggatggcctcgatctcctaatctcgtgatctgcccgcctcggcctcccaaagtgctgggattacatgcgtgagccaccgcacccagcctagtattctatgtctattatttcttcataatgagactgggggaaatctttggagaattaatgccgcagttggtaaaatcattctataataatgggtaccattctgctctgtcccacatttttatgaagtctctttaaatttaaaaaggcaatgtgctttgtggttcttgagcaacttaaatacgttgctctgaatagttattgtgatgaggtaatttgtaacaacttttaggatcaatgctaattttcttaaatgtttctgtagtttcccctttattataaagtatattaggctggactcttggctgtaagtgacagaaaactcaactcagattagttaagaaacaaaagggtgttggtgacagtggtggctttcagactattgctgcaggcccacctgccatcctcttaacaccctcaacataccctgcagaaaagagagagctactctgacccgagagcttaaagactggtcaagtatgggcttgactctttatggcccaaattgggtcacatgcccacctaggctaggggaatggaatcgtggaattgattgattgattattgttgcaggttgagtcctccaagaagcagatgccagggcagatttattgcagaataacacctgtgaagaaataggggtggaagcagaattgaacaagggaagccatcagatcacaatgcagatcttctagactctgtgtcagcacaacaaggaatgccagagcaaagactgccaattagaggaatactgaattgggcagatctgacaatagtctgtatataactcgggactgttaacttctccttcctcaaccagttatagacatagaataggactctcttatctcaaacatcaatatctgtgtatatgaagtagagggtgaaagtttactgtacactagtggttctcaaccaagagcaagtctgtcccccaggggacatggcaatttctggagacattttcagttgtcccaactggtgaggaggtgctactggcatctagtgggtagaagttgtggatgctgctaggcattctctataattcgtgggatagatagcacaacaaaaaattgcccaggccaaaatgtcaataatgctgaagttgagaaaccttgctctataaagatacatgtcttggccgggcacggtggctcacgcctgtaatcccagtactttgggaggccgaggtgggcggatcacgagatcaggagatcaagaccatcctgggcaacatggtgaaactcatctctactaaaaatacaaaaattagccaggcgtggtggtgcatgcctgtagtcccagctactggggaggccgaggcaggagaatcgcttgaacccgggaagcggaagttgcagtgagccgagatggcgccactgcactccagcctggtgacagagcaagactctgtctcaaaaaaaaaaaaaaaaaaaaaaaaaaagatacatgtcttatgtgtactgaaagaggccacggaaaccttttgttgatacattcttgatagtttttgttcttatatgtagttatgaatacttgagattccatccaatttatttaacttttgaccagaaagggtagattgaattggtgaaacatctatatcctgaatatttaaaagattctgttttttaaaacaaatattaacttgaattaacgtaaatattcttagtagttaaagtccttaaagaccttagtttggtgaacagataagaatcatctgtgttcagcatatgcattgccttatgaagatggtaagtcaaaagtatgagtttatttctgatatttaaatatccctgaggtatagatttgtttactctggaagtttactctgttgtttgtttgtttgtttttgtttttgttttttgagacggtgtctcactctgtcacccaggctggagtgcagtggcacgatctcggctcactgcaagctccgcctccggggttcacgccattctcctgcctcaacctcccgagcagctgggactacaggtgcccgccaccatgcccggctaatttaatttttttgtgtttttactagagacggggtttcaccgtgttagccaggatggtctcgatctcctgacctcgtgatccaccagcctcggcctcccgaagtgctgggattacaggcctgagccaccgcacccggccttactctgttgttttatttcttcattatatattacaaagttgaatgttagggccaggttagatcggaaaacaagttaagtattccttatccaaaatgcttgggaccagaagtgttttggattttttatttttgtggattttggaatatttgcatattcctcatgagatatcttgggatgggacccaagcctaaacatgaaattcatttatatttcgtatataccttatacacataccctgaaggaaattttatacaatattttaaatacttttgtgcgtgaaacacaaaagttttgactgtgacctgtcacatgaggtcaggtgtgaaattttccacttgtgacgtcatgtcagtactcaaaaagtttcaaaatttggagcatttccgattactttggaaaagtctagaaaaagtttgatatcagtgcactgaaatcattttcaagtaggaacaatagcgatactagccctttactcatgcaaaattcacagtttttatctaaacaacacaaaatcattcaatgcttttatatttaatcatctatattcacctaaccataaaaaatcaatttcaatacagtaaggaaaagacaagaaaacgaatcattctaatcactgtattttgaaagttctttgcaaacaaccgtgaaatggttaaaagataggaggatggagaccagcctggccaacagggtgaaaccccatctcttctaaaaaatacaaaaattagccgggtgggttggcgcatgcctgtaatcccgggtactcgggaggctgaggcaggagaattgcttgaacctgggaggcaggggttgcaatgagctgagatcatgccactgcactccagactgggcaacagagcaggacgtctcaaaaaaaaaaaaaaaaaaaagatggtaagagaatgatgacttgttgcttactaaaataaaggaaagattgacactataagtgatactgtttgaaatctcaggaatctctgaatcattaagattatatcacaaatggcatgcaaaatacctgttcaaaaaatactcctcatggacatgagatgctaagctgctgatactgagtctgacctaggacaatgatgttctgtgtcacctcttttctgatgcctcccagattgctcctggcctcactgctgtctcacttccaaaaatacatattgcccttattggtcataacacagagactatcagttcaaaagtctctaattcgtctcagctgcagtcatctcccagcaagacacaaggttcttgagaaaagaaatttttcatgtcccatctttgccatccaccacacgatgaacatacagtacagtgtacatagcagcccttgaaaatgctggtggaatcattgattcttgaacccaactgtcatactttccagatttaagtcctggtaaatgattaaaatcgtatgggttaccctcaacaaaccagctcaagtatttactataaaaaagggaagctagatatggaacttcccctaaagatgggtctgtcaaactcaccccattgtattctgctctgacaccatgttttttgtttgtgttatttttttttaagagacagggtctcactatgttgcccaggctggtcttgaactcctgggttcaagtgatcctcccacttcagcctcccaggtcactgtgagagattacaggcttgcaccaccatgcccagccccaccttttaatacaaataagtaacagttaccatttactcagtgctcaccttataacagatgctgttaaacgctttacacgccttagctcatttttagttaaatacattgtttttgccccagctatggtagggatcttgctaacaatgagaatgaatgataagaggggctttaaggagaattcactgccacacctttcataattttcccatcattcctccagtctttgttcaaccgtccatgatttactgatttgctattacatcaaactatgctgcaacaaaccagtggttccttctgatttttatccatctcctcctcacctagggtgagagtctgaggcttccttgagtctactttctgatattgttacatttaacacagaacatctcttgttttcgtttctggcagcttatcctctcttcgctttctccatgctttcattcatcctaaaacaccattctgacaatgatatttaggttggtacataagtaattgtggttttaccattaccttcaatggcaaaaactgcgatcacatttgcaccaacgtaatatttttcttacttaaaaaattaatgtagagtatggaaatacttgccatcagggaatggggaagaaaatggctagagagacatggtgaaagagagacttgatttttaaataactttttttgtttttcttgaattttattatcatgtgaatgcatttgaaagaaatacaattttaaaataattattaaaaaaatatttgaatgccttcccatgaacaactaaatgaagtctctattcttaaacctgacagtcaagtacagctctggtttgactccaagctacatttctagccttgtattattcaactctttttctgtttatccttcatatccgggcctttactagtgccaaaaaaaaaaaaattgctcattctactcttgtcacccagagtgtttcttctgtttttgcccatcaaaagcttacccaattgtgaaggcccagtttcaaagcaacctccttcattaatttcatccagatactctgtaacccccatagctgtttaggcttgttctagcaatttgcagttatcagaaaaatgagtacataccgagtgccagaaagtggtctctccaactgtgcacattacaacatctcattctctgtgcctccatttcctcatctgtaaaatggtcactatggtgtactttcctcatagtgatgttcattctttcaagtagttagttaggtacctactatgagacaggcactgacctgggtcctgggggtacagtaatgaataaaatagattgagtcctgccctcatcaaatttaccttctgataagaaagacataaatgaaatatacctataatgctcttgaaatagcacttgggatatagtaaatgctctataaatgtttgctattattactgtcattgttggtagtgttgttatgtggtatttctattaacacataaagaaactaaggttcacaggctgttagataagatgctggttaaatagctagtaagggactccaactcaggtcttcctgagtcataaaattcgtggcatttccactacactgatggatgtataccaggctgtacatcagaactatctgtggagacttaaagaaagtaaagattctcaagcctcagcctcaaattaactaaatcagaaattatttagacgagctaagaatctgtatttttttgaaaagttctcaaatagttgtgatacactgtcaaattggggaatgactgcactacattaaaatctttcccataatactttattatgcttatttgtaaatatcaaatctacaaattcactaaagaccatccccttgttttcttatttatttttattttttctgcttcctctcctagcaaagtgccttataaacactcaataagtatttgagtaattaatggcttaattatttaaagttgcacttaaaatgcaaatactcacagctgtggtactggaagcctgttatgaacaatcatttatcttcctagggttatttactaatcagctaaggacaagcagttgggaaagaaaggctgactatttgggaacagaactgagaaggccctcaaaccaaatgttagccacgttattgaacagcctagggccccgccttaactttacctacacttcgttgacaatttcaggtaaaatgcagaaaatatacgctaacaatcaggagattcctccctcacaccattgtagtttcatttcttttaagccgacacatgtctctcttatggaaaatatgggaacaacctgttttaaagaaagaaaaagaatcctttattcttgtcacaccacaaacatggagttcactgctatacgttaagattataaagcaaaatcccaaaaacgcagtgactgattattcacagtagacatatgaagtcaggaagcttattttttctctctttgctaaggcacaaagcctggggctatatgcatttttattacactgtactgtgttgatttcacttgaggattaaaaagagagttgaggcacagtgcacgtatcttgatggattttaggatttcttgctttcgtgaaagaaagaagcttataaagtacctcagattatcgcccagggaagtgtacctacttccatgatgacctagaaattcaatcttttgtttctcctataaaagatcacattgtactttggatgttttccctgtagttttctgcactatgtaaagccacatttggaaaaacaaaatagttttagtttagagttgaagtgaaaatatctgaaatagttcaggaaagtcttatgagcatttggggagcttacaaacagccttgggggtggggtgagggggaatgagggaagagggaggcagggggagagaagaggagggctaggtcagaagtgtgcaaagaagacagagggagagagaccgtagagactgtgagtccatggcagagttttaattctggttctcacacatctacacagagaaacaatggaagcacattgctccatcccctgtcctttactaagaagcgtgaagtaaataacttgtggcttatgatatgcgaagaagagagaagacagaatgttgtaggatttggaagtacagtagatgagatcttccggtttattgatttgtaaagaacggcttgatactggtttgtcagttctgcatcagtgagagaaaagaaaggcgcttttcagtcacttgccagaggaggagagccgggaagtggaaacagggtcttctggcggacaagcttccttgagtggtggtcaaattgactgtgaagggagtcaaggtcaggaagctttggaaatgctgcaaggatggtacgggatttaaggagggttgatttcctcggttaagggttgttgcagacttcagcaaattcccccttccagcctttattaaagaagtgtttagtagaacaaactgaaaatctacaagtatattgttacccaaaatataaaagcttctgccactgagatgaaaatgtttgatttccagtgctttatctttttgcatttatctacctgtttcagtcattcgttaatatgaatttcctaatatatgccgtcttttttttttttttcggacaataccagttctatggtatctcactgatgattatttcaaattgccacttttgttccttggaaatactcctgtgttcaaataccaggaggcataattatgtaattaccatgtgaacattatgctacttatgggccaaaatgcccctagaaaggaatgctccaatggcctcagaaaatttctgtgagaacgatatcttccaaatgtggtataaataaagctcaagaataaatagctaaggctggaatgtaaatgatttaatgtaatgatgttgtaaggtgagagccacttgactttagttcctgttgcaaatcatgagatacattaggaaaacttttaaaagggaacctattttttaagataaaatctgtatcaagttacatcaccttccaggcaaagtaattcaactttcctcttttctctctgagaccaaaaaaaaaaaaaaaaaaaaaggcagaagaaatgcttcctatgatctcttctcttcctgtcacaattttcataagtctgtagatgtaattaaaactaaagattttgacaaatgaaacaggataggaggttgattgctgcttttctaaattaaaatgaatgatacccttaaggtacttgggtctatgaagtcaatttaatgttgatataacctgactccattatcacagaatgaggcagttgcataagcaagaaaaccaataaacaaacatccaaagtgcattttagaaatcggtgaggtgaaagattaaaggcttaacaacggacaaagagcttgctgttttgttctctcttgccttccagtttgatggcagagttcatcagaattagaggaagaatgttcttggagaagcgttgggctggcactaggctaggagtcctattcatatcctgcctcgcttgtcttgcaagcatgcacagccccttcatttgaggcactgtttgcctcagcagagtctgtgtactcttctggtaggttgtatagaacataataaagggggagggctggaggagaaaggacagaaaaaggagggaataaaaaaaggagtcagattaagaaagaagtcagcacagaaatataaaatggaaggaaaaaaagctgtgatgcaggaaccttaaaaggtagattaaggatggtctcagatggcacggcattagtatcaatgccataagtcacacaaaatctattaagaattatgctcctactcagagtgagtgccatgttagcactagttgtttcccgtgatctatcctgaagtcaaacgcaagaaacactgtttaactcctaagtgccctaatgtcaggaaaacacagaaataaactcaaaggaaagacaattcagttaatctttgcattcaacaagcccaggttgttttgccgcagagctatacctatcacaaaacttcattccagaagatggccggtagaggtggctcatgcctgtaatcccagcactctgggaggcccaggagagtttgaaatcaagaccagaacttatctcagactttttttttttttattattttttcagttacaactcaaaagaatcagaattagaataataatggattttaactgaaagggattaccattagttaaaaggattttaactgaaactgtaatcagtctcaggagcgtttcccggataatgtttgggcacgtatttatgagtgttacttgtgaggatttgggagtaagaatgaacgaggaagttcctcccccaacacagacacatgcacacagaaactgtacaaactgaaaaacttcaggacaaaaactcgtgaatagactggagagtcatttgtgtgcatatgtgtggtttatttactagcatcacagcacaagagtttctgtcttttgcttttgtttttgttttaataggctcatttgtgtaagtgtcatgtctgtttcttgcattcccatggatatttatctagggtctagacaaactgagaaccagaaaatcaaaacatacgttcctagttacatattttctctagactggagtaaacatgatttatgtatgtagtaatcagtaagatgtagcttggacactaggaagaaaccacattgcctagcagtgtatttccacatggggaggtaatgcctgtctctcctaaacttctagtgaagataaaactcaaagtagagtaattaacagaaaggtcaaaagacaaagtggaagcccttgagaatctaaaacaaagttaaagaaccaacatttacatttagataaatttatttgaaataatttctaagagccatgatgttgttatcggtcctttttctttctttcttttattcttttggcttatttaaaagcaatgttgaagaaaaaatgaaataaagcttatctttcacaatacacagaggaatggactgagctttgggaaacagtcacagcttggaattaagagtgtgtgtcgtatcgtaatttagttggatgatttggtgctcattcattatacccagaattacgctttcaagtctaccgtattcatacttatctcagtgcctgacaaataagaggaactcaaaaagcctttcattcattcatccattcagtatttcttgatcatcttctatgtactaggcattgtgataaattcttaacaagacagataagatctctgtctttgtggacaataaacttacattctagtcaatatcttttgaatgaatgtagtgatatttcttactgaagctaagaaaggaaggtctctgcaaacagtatactgtctacagaactcatctgaaatgagaagaccaaggagaataatatatagccctcataactctcaaatcttaaatatgattatttaaaaactagagtaaaacaaatgtggaggagatttggacttcagggttgttttataaattgccgttttacatttttaaatctagtattataggcaaaattgaatctaaatggttttcttcttttcttttttttactttcatcatcaaaaatggaagaaaggaagaaaaggaggaaggaagaaaagaaggaaaggaagaagggagggagggaagtttttcaaaagcttgtgtcagggatcttgaaaaagaaatgattcattcaaaatatagttgttaatagtaaagatccgtgaataaacagtacattaattcattcaactaatattaatttagcacctattatatgccaggtactgtgctactcactgaggatttagcagggaaagatgtgtccctgtcctcatggaacatataaaaaaggacctttttttcctgagatgcttttactgaagaattgctgcaacctagattatgagttctcatggaccagatggcagttttctgcccatctgggatagttctgaagaatagaccctcgtgtatcaatcaaggtttcttccagttctaagctttcgtgatctatgatctaatagttgaaacaggatgtatgcttccaaaaagatgttatatttgtattacttttataaaaggaaacagagacatgccctattaattcagaagagattgggttcctcctggctgtttaaatcattctatttaaactcctttatctcttctttcttggctcaccttccaaagctcactcttaccccttttagtctcacttccctttcctttctttaattgctgagacaaattgttcatctctaactggctatacatgacatctccagttaaatgtttcactgttaggacaaattcattatgttccaaatgaattcatacatacatatgctatttcttccttttctgattttcatattgccaccagcaatatcttcattctcccagtcttccttactcgaaatccaagagtttatttgcttcttcagatattaatctccaacaccaaattggatagttcttcctcctttcaaaataccttctcatatgtaccttcttttacattgaatacaatacagccttaattctaatgcatatcaacccaagtctagtaagttacaacagcctctttctgatctcagtctcaggtgccctttcgaatctgttttacactatactgatcttcccaaaccctaactttcctctaaaatagtgagtcatgtcacagaaattttcagtggttctctttgcctgcagggtaaatcttgagcctcagagtctgggacgccttgctttgcatcatcggctttcaacatgactaactaattgtatctcactgtcgtcctcaacaccactgttctgcagccccaagcctttcttcagcttgtcactacttcttacctccaaacctttacacttgcagagatcagggactatagcatttgttttttgcctatctctttcaatattaacaaatacttataaaatgaataaaccaccaaggaaagaactgattgtgccagaacataagacacaggtatatcatttctggcttttgcttcctgttttgtatataccacggtatattgatttaacatacagccagttagaaagatctaatgcatggaggctctcgtttaatagattatcaaatttcatttccttgcataattgctcaaagaataaagtgctttgttcctaagtcccaagctaaagctttcgaggactttggttgctttcaagtttttctcattcataaatttgtttctttatttagccagttgtgcattcaatccacacaaaacctttctccagtgataatttgtggaaagaaatattttatgcttaattcttctcgctgtcataccttctcttaagtttgagttatgaagatggaaattcactttgatctcattttaaaatcttgacaatattgaatgtacactggaaactaccactggagcgctccttgtataagaaggcaaaattcttcagagagaagattgggagtctagaatgaactttgatgctgcatcggctcagtccctatgaaactaacattcttactagagaaagtggcctatggcacagtcataatcctttaccatctacatcttccccttgggatttctttctcagtatgtgcaaagatttctgatcagtgtccactcccatatggcatcttcatcttctcctctctacccccaaacactcacatttatctctagattgatttattcatgaaatgacccattctaaatttagaaataatgacatatgcccaacatttatttgcacgcgttttcccacaacctttctctataatcttatggtatcacattcttcaagaccaggaattgaccttgcattgggccataaaatacgttgaacaactgcagtttcatcgatatgcacactagaattggtctgcattcaataaactgattaaagaaattaaaaagccaattacttattaaatatttataaaatactttttttcaactttaatcttcaggatagcagttaagagcaagacccagactgaatgagtttgaatcctagctctgccaatttactaactactgaagcttaggcaagttttttttttttaacctctcatgcctcagtttttatgtcaatgaagtcggggggaataatattaactcctattgcagagttactgtgaagatgaaataacataattcatattgtcatgccacatattgcttaataaacattagccatttttgtattgtatgtggtgccctgcacattatagtctattgctctccttttttgctttttttttttttttttttgagatggagtcttgttctgttacctaggctggagtgtagtgacacgatctcggcgcactgcaacctccacctctcagattcaagtgattctcctgtctcagcttcccgagtagctgggattacagatgcccaccaccacaccaagctaatttttgtatttttagtagagactgcgtttcatcatgttggccagaccggtctcgaactcctgacctcaagtgatccgcctgcctcggcctcccaaagtgctgggattacaggtgtgagtcaccatgcctggcctattcctctccttttattaaccataatagtagcaagaacagtagctggtaacatttattgagcaattaccacgtgacagaaactaggctaaatgctttacattgtatcatcttatttaattcccacaaaaccctataagttatattattttccacattttactgataaggaaagttaagaataatttacccagggacattgattagtcaaggttctccagagaaatagaagcaacaatatacatatgtatgtatgtatgtatatgtgtgtgtgtgtgtgtgtgtatatatgtatgtctatgtgtgtgtgaatatataaaattaagtattatctcatgcagttggagactaagaagtcccatgacctgctatctgcaagctagagagccaggaaaattggtagtgtgatttcagtcccagtctgaaggcctgagaaccaggggagttgatgatgtaaatcccagtgcaagtgcaggagaagactgacatcccagctcaagcaggcctgcagggaaaaaaggaacatgcctttttgttctgtttaggacctcaactgacaggatgatgcccgcccacattggggagggcaatctactgaatccactgaaccaaatgctaatcttgtctgcaaaacaccctcacagacacacccagaaatagtggtttacctgggcaccccatagtccagtcaacttgacacatagaattaaccattacagacctgcagtcagtgcactcagtgtcagtaggcatacttgtttgttccgcatcgcttctcttctcttctctctctctctctctctctctctctcacacacacacacacacacacacacacacacacacacacacgtaccacatttactcatttactcatccatttgtttggtcaactagtcattaaacaaatatttgctaccatatactatgtgcctcctgcagaaagggttggagacattcgaagagaaaggtaaacaaaaaatggtccctgctatcaagaagtttccaatctattgcaagacacactcatgtccatataactaaaatgaattatatgatagaagtgcttcaggtataaaccatatactgttagaatgctgaggaagccattaattctaacctgggagatgaggaagtaaacatataaacactaacagcattgatctgggagagaagtggggtaagagcattgccgagagaaggagcagcatgaagaagccacgcacaagagttatattggatggaatagtgcaggacaggcaggtagttttggtgggcttagcaggtagagtttgggagtgcagggtcataaggttgggaaggtaggtttgatatgtccctcatgcttttgtgtatataaaataaagtaaatcctgcattgtaggggaaccccacttggttatccacgtatttgggccaagcaaaaatgggcaagtctagggagagagtgaaaaaatgagattgttctggatatacactaggcacttaattgatattggaaggccagagttggtttgagaccaggctacctgagccacttttctgatgagattaacatcgatttttacctctcgggaattctgcacaccacgggaactaccccctgagttctgattgctctgtgcaagctctgatcaacccctagtttagcatggactgttcacaactaaatcaaaatccagagttagagagctaggatgcctggagccaccacttatattggattggcaaaatgccaaataagtaagtatagcatgtcacccgtaaaattattcctttcttccccaccaagaatagaactcactaagttgacagcacactgtgtcaatatattatagaaaaacctaataggaagaaaagaatggcagttttcactgcatgccccctaaaggtatatttcttaataatttccaagtccactgaaaactgaattccgaaaattagttttatcttactacccaccctattttatcccaaatttaagccttgcctgtacttctttgatacttaatatttttttctttgaggtggagtttcactctgtcacccaggctggagtacagtggcgtgatctctgctcactgcagcctccctcctgcctcagcctccctaggagctgggactacaggcatgcgccaccacacctgactaatttttgtatttctagtagagacgggttttcaccatgttggccaggctggcctcgaacttatgacctcaagtgatccagccaacttggcctcccaaagtgctgggattacaggcatgagtcactgtgcccagcccataattaaatattaatcaaccactggttaattaataattatcaataattaaatatcactcaatgatttattatctattaatcaatattgcttctttaaaaatttgtcaaaaacaatagcctaagacttaaagacaagacatgtcatttctgagattctgtagtcacctataccaaatgtcaccctccctaatgtttttgtgaaagtaaagatttgtatttttttatggtactaattgaagcagtagttcatttgtggctgccaatgagttgactgtaaaaaaaaaccaaaatctcattttaacattgtcgagagaggaaatcctttgtgtttggccttggattgataaaaacgagtctggaatactatatacggtaagtgaatattaaaactagagttatgaaatgttgctttagtgttctcagtcttggagactcaaagtatcttatcagaaaggatacattgttttaattgttcctcattatatagaatgagagaacatcatttctctccttttcctcccaggtggccgtcgaggaccgagtcaggcagctgcatgaagcccacagggactttggtccagcatctcagcactttctttccagtaagtcattttcagcttttatcacttaactttattgcatcttgattaataagaataacagttgaaaaaacaaaagaattaagagttgaattatagtaatcttttatcagatgcagtagaagcataaatcatcctgaaatataacttggttgataagttgagaaggttaggaagaggaaggccaattggatcattttgtccagtcttcagctaatgcataattgtttcctgcactatattctcaaatgttaaccatattaatatttttgagtctttttgaaaaatgtggaacactttgctcaggagccatgctagtattctctgtatcattattccaatgttagtatatgggctgctgaagcaaaaacatacttttgagtttttaatttctgcctatcagttcagttcataaagctaataattatgatatcatgtaattataatatgatcatccaatatatgttactgtgactctataattctttaaataattcattaaatgatccctgccttatgaaatgagtgacaattctcaaaagaaggcatacaaatggccaacaggtatatgaaaaaatgctcaacatcactaatcaccagggaaatgcaaatcaagaccacatgatatatcgtcttaccccaattagaatggctattattcaaaagacaaaaaataacagattctggtgagaatgtgaagaaagggaactcttttacagtgttgatgaaaatgtaacagtaaattagtaacagtatgaagattctcaacaaactgtaaatagaactaccttaccatctggcaatcccactactggttatccatcccaaagctaagaaatcagtatatcaaaagggtacctgcacttgcatgcttatcacagcactgtttaaaacagcaaagatgtgaaatcaacctaagtgtatatcaacagatgaatggataaagaatatgtggtatctgtacacaatgaaacactgcaagaatgaaaccatgtcattcacagcaacatggatggaactggaggtcattatgttaagtgaaataaccctggcacagaaagacaaaaatcgcatgttcttactcttgtgggagctaaaaaaattgataataaacatagaatagaatgatagatactagtggctgggaaaggtgtgtgggtagagggggagataaagagagggtggttaatgggtacaaacatccagttagatagaaggactacgttatatcatttgacagcagaatagagtgactgtagttaacaacgatgtgttgtatatttcaaagtaccaagaagaaagggcttgaattgttcccaatacatagacaaatgacaaatactcaaagtaatggatgcctcaaataccctgacttgatcattatgcattctatgccagtaaaatatcacattacctcataaatatgtaaaatattatatatcaataataaataaatactatgcctccaagttgaaacctcagcctatgggcatttcctttccctaactgtttgcatccttcctttttttttttttttttttttttttttttttttttgagagggagcctcattctgtcacccaggctgtgagtgcagtggcgtgatcttggctcactgcaacctccgcctcccgggttcaaactattctcctgcctcagcctcccgagtagctgggactacaggtgtacaccaccaggcccagataatttttgtatttttttagtagagacgaggcttcaccacattggtcaggctggtctcgagctcctgacctcaagtgatccactcgccttggcctcccaaagtgctaggattacattcgtgagccttgtattctccttttgttcttgacctctagccattctttttatttactggttttgctattttattaattatgtttttataattaatactaagagaaataaccttggttaactgaaagtttaagtattagaaaatcctatttatacaatattgcatattaaattggcaagcacctgttttcctctgattaatgttaatttataccactttttatttgattataaaagtatatgtgttgagttttttggtatttaaaaagccatactttaccacatggagttaacatctgttagcattctgatgtatttccttgtggtcatatatgagtatatatgagggtttatccatcattttaacgcaattactttgtgcctagaaatgttacagattttaactagtttaatccttatagcaatcccttcaatcccttaaggtaggtaccattattatacccatttcaatgatgaagaaactgaggcacacattcatacagctagtagatgagggagccaggattgaaactcaagaagttggctccagagtctgtgtttttaagcatcgcactgtaattttacttaatttatatattttatagagaggaagtaattctgtatgatctccattcttctgccatattctttcattgccattttctgatcatttcctttcttttccattctccacgggttaataaaaagatccacgctcacaaatactttaaagtatttgagtagatgttgtcatgtgtgtctccagttggctgttgtctttttgaacaaaatttcctggaaggtgttggtcctgtgtttttgtcatacatcgataatagattaagaagaagtatcttattttctggactggctctaactttattatccgcatgtggtctagttatttggacacagtttcacaatgctttggagttgccaagaaaaagggataagttaaagcagtttatctaaatgagtgggatcgtggcttttaggaacggctctagaaaaatgataaaggctacagatttcgtcttctgcatctttccaaatctctggtctacttaacttgccttggtgacagccattctattcgatttaattgagattaaatgtgataacatactcctaagcgactcataaaccataaataaaaaatagtactattatgaatattaattactcctcagacaccaggtatattcattcatattttcttctccctgactccccctctgaattcccatgtcttacccattaaaacctattttcagaaaatgatatactcatttaacccaagtgataggtaaagtttaatgtgtacttctcctgggttatttgcattttattagtgtgaaaatccataagcctgaggtggtagaacatcggccataagctctgagctgtgaggaaggaactttgaggggccaaggggagcattctcacacctttcaaaccatatcacatcagtgcccacttccagaaaggtcaggcctgttagacacaggtattcataaagagactgatctacctgcctgaatggagccagccccggaagtcatcagtctcttggatgcccatgtggaatatcaatatacgcttaaaagctttgcttgcaggtataaagaaaataccaacttggtttaagggatatttaagaaataggacggtgagactaaggatggattgtttctttacattgtactttttaaaattacaaaggtactctatacacatcaagaaaaatttggaaagcccacagtacaaacaagaaaagaaaaagtatccataatcctatgactcagagataatcactatcagaaatttggtttatatactttctgtatttctcttgtggttgcgtgtgtgtgtgtgtgtgtgtatcaaggttctatcttttatttttttatttttttgttttttgagacagagtgcaatctcagctcactgcaacctcccccgtcctgggttctagcgattctcatgactcagcctcccgagtagctgggattacaggaatacgccaccacgcttggctaattttttgtatttttagtagagacggggtttcactatgttggccaggctggtctcgaacttgtggcctcaagtaatccacccactgaggcctcccaaagtgttgagattacaggcatgagccaccacgcccggcctctctcttttcttttaaaccatgcgcagataaaaacatgctacagttttatgagctgcttttttcccttaaaactatctttccaatattttcgtgtgtttaaatattcttcttcagagtaatttttctaatgactggctaatactctcttctgtggctgtaccaaatttaccaacacaattctaaattgctcaatataaagattatttcacaatctttattatatcgagcattatggctaatatcctttttatacctttacaaatatctcagattctttctacaggataaatgcctaaaggtggaattgtcatgttaaagaatgtttacattcgtaagccttttcaagtgtattgccaaacttacctctagaaaattgcaccagaaattgggtgtgccatccaaaccgtatttgagctaggcatggtgtggctcatgcctataatcccaattctttgggaaactgaggcaggaggatcacttgagcccaagaggtcaaggctgcagtgatccataatccacccccccccgcactccaatctgtgtgacagagcaagaccctgaccctaaatttaaaaaaaaaaaaaaaatcaccatatttgaagcaggacatctctgaagtcacgtatttgctactataaaagcagcttccccccaccaatgaataaaaatatgttttaaatattcctctaaggtcatattaaatgaatttgaattgatacttttttttagacaggcctgagttgatacatgtttagtaatgtgctttcaggttactataaataataatagggtggctcctaaagcttagaaattacaaagaaaagaaaaataaggaggaactactaattgcacccgccagcgtaaacatgcttactgtctctgtttatcttattctctctctctctctgtctcgcacgtgtgtgcactctctctctctctctctctcacacacacacacacacacacacacacacacacacactcccctttggaaattatttggaaattacattaccagctgtctgttgtttatcagaagacagaggcagccttttactaaaaaaaagaattcactgtttcttcctggtggcccaatctctacatgttaaagaaattttttcttttatcttagatctaagagaaaatgagaagagaaaagcattgtgaaatatgacccttctccgctgatagacactaacttgtccttacttctagttttaatacactgctactcctaattgacttctacaacttaaaccaagaaaaaggagaaattctaatagtgtgacttcaaatatgtatataatttacaataaaattatcatttaaattatttaaattatatactaatttatagttatatatgtataattggtaggtatattgtcagtctcttcatatgtctgtgattaagaaagtactaaagtattcattggttggcatagtagtctgaaaattgtccttttcttttgaagagtttaaagatttgttgggcgtggtggctcacacctgtaatcccatcactttgggaggctgaggtgggcagatcacttgaggtcaggagttcaagaccagcctggccaacctggtgaaacccccatctgtactaaaaatacaaaaattagctgggcgtggtggcactcgcctgtaatcccagctgcttaggaggctgaggcaggagaatggcttgaaccctggaggtggaggttgcagtgagctgagatcatgccactgcagtccagcctgggtgatagagagagactctgtctcaaaaaaagaatttaaagatttttcctgaccattatttcaattctctggtcttctgttctaaattctacttttctcaccaagaaagatcactatatatttgggtaaagggagaaatcattctataacagtaaaaagaatccatggttttcttaatattttacaagttccagaggtcccttaaaagaatattttccaagccaggttctttaaaacattaatgttatattaggttttgataactgtcccttgaaaaaaatagtactgattaataagattggaaaaacactaggtttcaaagataagcaagtttatttcttgttagaattcttggaatttttattatacactgagactctaagaggataaggagtctatagttctccagttttaggtgactgtggaagcctttttcaggcacaccagttaatttcacactaaactttatgccatggatcacagtgaatctttgccttaatgtggtatttgccagatgctttaatgacaaaaaatttctgctaaaggttgtagaaacgtgatccaattaaaaagaaaatgagtatttatgaggcaaaagggtcaagtccctctctttactgaagttcccagccccactcccacccaggagccctcttgtgctgtggagtttcctaactggagataagcttagaaagtatctataccagtagtttccaaactctgaggtgtggctcattagcaaatcctaaaatcagtttaatgacttacaaccaacaatttttgactggtatggaatggaatggaatggaacagattagaaaatatcagagtgcattacctaagcaaggttaagtgttgttttggcggtggttaatttgttagatatgtgtgtacatgcgtgtgtgtgtgtgtgtgtgtgtgtgtgtgcgcgcgcgcacgcacgcgcgcacgccagatcacagtgtaaaacgtttttcttctgtgggttgcagtcgaaatagtttgagaaacattgaatcattcgagccctttccttattttacagataatgaaataggtgcagaacgatcaaatgacataaccaaggtcacaaagatagttataatactgggactggaacccagtttctggacatccaagccacacatcacactgccttacccgttaagaagaaatgcccaggccaataactgtctagtctatctgctattgccaacgattattctctcgtatattcctcttcgtttggccatcctaagttgatttacataacctaaatttttctctcaacacctctgggctaaaaactgccttatcaaaatggtatcgatagcggttaagagtaaaagctgtaaaatgaaactgactgggttcaaatattgactcagacactttatgcttttttctttctctttattcttcatctttaaaatagggataatagtaacatatttggtcaattgtaagacacacttttccacccacgtttcaacagttctgaaatcagaatgcaccatacgaccaatgggatattgaattcggtgaaatatggctgtattatttcatagggttacagtgaagatcaaacagttaatatttgtaaaacccttagagtagtgcctggaacatagtaagtgctattcaagtgtttgctattagctttagcattagtatcattattactatcagcttgatagtataacttaatgcatgcctgttagagtcaaactagtcatgaaagtttcattcattctcttgcatttaatggtcagtataagtagttcctctcctttctgaagatgatttccaaggatctaatctgaaagtccagtgttttgcacattagaacggctcaatagttgtttgtataactaacgagtgataaataatcaaaaagatagaccttaatctctaaaatgtcaggatagtattagtcttgttgacagttatattctacagtacctaatgtggtatgtggtacttggtagatgttcagtaaatatttacagaatgaattatgtcttatacccaaaagaagaagaggtaaattcactcttgacattgataatacacagaggcatgagatttagcatagtggctatcacatagtagacactcaataaataatgtgaccttttctgttgcttctcagcaaagactaatagcattcataactttatatggtcgtttttatcaaagtcgactgtaccatgtaatacattaagggaaaaggctgacttcaaaattacagcatgatcacaactatattacaaaataaaataaaaataacagaaatgtacacataaaggaaaaatggaaaataaaaagataccaaaagacaaacagttattgcatcatttctttctttttacttttacaaattttctggtaatagcatgtactacctttgtaatggaaaaaaaacaataaaggtaacattttatactccagcttttaaccagtgacctcttgcagtggcaatgggactctgaaagacaaatttcctttttactatttattctgaatttaaaagctgtttcattgagtgaccttctcagattatgagacactgtaaaaagaaataactgatccattatttcttgcaggctttacaatcttaactgccttaatcatatccctggttaagtctttttctctcttgtcaaagtgactcaagcttttacagtttctccttgatacatagggcctagcagtttgtttctatcttgagagttgccaagctttcatcctggacattccccactacacatacacacttaattttaaaaaataggggaaacctttaagcacatctaataattgctgacatttcacttaacagtgctccaacctatgctaccagtgtcctcaggggacagacaatttgaaatatgagtggggcaataatttaaagcttcagattggcttaaataagccatcatgaggccgggtgcggtggctcacgccagtaatcccagcactttgggaggccgaggcgggcagatcacctgaggtcaggagttcaagaccagcctgaccaacatggagaaaccctgtctctactaaaaatacaaaattagctgggcgtggtggcatgcatctgtaatcccagctactcgagaggctgaggcaggagaatcacttgaacccaggaggcagaggttgcagtgagccgagattgcgccattgcactccagcctgggcaacaagagtgaaactgcatctcaaaaaaataaaaacatcaaaataagccatcatgataaaagtcagaaagaattttgcaggtccaatgtgagatgatttgcaggctaaaattctctttcaagtaaaatctcagggtgaaatgatttgagccagtttcttcagcagtcacatgttgtcccaagtgttaggaatttgggacaaatgccatgtgacctaccagtgatgctgataatgcccctataaattcaaagacagcctttccaatgcccataaaaagcagctacagcagtaataattatattctcttcttaaaatgtgttgtcatggcccttttctcctttagctcaaatgtatactccccaataagctctcagatttatttgctttacagtatcattagcaaccagattttgcatcgttggccctatatatcccatcaatttgaacacatgaggaaacagaacgtttttgtttctgctatgggaatttctgtgctggggctggcttacaatggctcaagagagccaattgtaaaatatacaggaattgtgagctagttattaagcctacctttggtagcttgaaatcaggcatagtgggaagatttactccatggaaattggcaaatactacaaattggggcactttgttttttttttttttttttttttgtgcatagatggtttcccagaaatgactaatttatctatgttatttggatcactcaagtccctgtaggcaaagaatcttcataaacttagcaggaaggatgctcaggatccaaatatttatgtgcgttgcagagtgaccactcatcctggtttgtctgggactttcccggatttagcactggaattcccattttccaggaaatctctgtagtcccaggcaaaccaagatagttgctcaccctagccttaggtaaaatccctagaagtagagccctatttagatagatggggcttcttgtagaagtaatttgttcaggtgaaagggagtgagggaagcaggataaagtaagaaggatgctggtcaaggagttaagtgggaaggaagagactcacttcagcttgatcccacagggagctctggagaacaaattgtccctactttgagataaggggcctgggctttttgtttgtttgttttgagatggagtcttgttctgtcacccaaactggagtgcaatggcgtgatcttggctcactgcaacctccgcctcccaggttcaagctattctcctgcctcagcctcccgagtagctgggactaccgcgcctggatttttttttttttttttttttttgtatttttactagagacggggtttcactaggttggccaggctggtctcgaactcctgatctcctgatccgcctgcctcggtctccaaaagtgctgggattacaggcgtgagccaccgcgcccagccagggctgggcttttattttcccgtgtgaattagtcattggctgtggatttctggggagtaggagatagcaaagcagttcccatttggccaagggaggatttctggtgaaaggaccaatgaggccttagcaaccaacactcacaacaactgcggctgggtgaaccagctcagtaaaagggatctgagtggaacaacaatagtattaacctctcctagactttatgaagctgctatcataccccatgcataatctggctttagagctgaatgggcgcatttagctggatcactaaccaccactccttcgtcacggacttacatggaaattagcccggtggcatggaagagatgagacaaatgtctgtttctttcttatttcatcttcctcattgtgacagattcttctgggcctcatgaggagctagggccaagagaccagcaccagagttctgaatcagttttataacatgggcactattttggtggaatgctggctctgaagggtgtatttttacactacccagaaaatgaaggcatttgtgaatttggcctggggtagcattttgtcatctgtccaaaatacaaagctttgcacaacagaaatagtgggatcacatccctgtgggcaagaatcattactttcgtttttccatttggatgttttccattttcagaacacaaccagtttgggattacaaagtactttctggtgagaactttgaagtgaggacaaaaggcattttgttctttagtagacttacataaactgttcctggtttaaaaaccattctagatttttaaatagactttcagatatctgcagtaaaaatcatcttgatttcaggcgactgcaggtactgctctgttatgtgctatgtctccttaaggctgtaagggacagggataggcttaggtgataaggaacattttcaggatacagagaggcatgaagaataacatgggccgggcgcggtggctcacacctataatcccagcactttgggaggctgaggcgggcggatcacgaggtcaggagttggagaccaacctggccaacatggtgaaaccctgtctctactaaagacacaaaaaattagccaggcatggtggcgcacacctgtaatcccagctactcaggaggctgaggcaggagaatcgcttgaacccaggagacggaggttgcagtgagccaagatcacaccattgcacaccagcctaggcaacagggcgagactccatctcaaaaaaaaaaaaaaagaaagaaagaaaagaataacatggaacaacagacaccacgaaacatgtttgcttctttctgtatatgcatttgctgccatagacttcagactattacagtatcatatcttctctcttctctccacctaacaccttctacttatagtttctactttcttatgacttccattttcttcctttgttatccgactttttaaacttccccacccatctgtcatctctgtttatctctgtgtattacattcaagctctccaagacaaagcatctgattggattagttatttattatccatctaagggtaatgccatctcacaggccacaggccagactgtaaactaggctttcttgacctgggcactattggcatttggggccagataattagtggaatgctggctctgaaaagtgtatttttacactactcagaaaatgaaggcatttgtgagtttggcctggggtagcattttgtcatctgtcctagaatacaaagctttgcgcaacagaaatggtgggatcacacctctgtgggcaaaaattattgggggctgtcctgtgcattatctctggcctctactcactacatgccagtagcactcccctcccttagctgtgacaaccaaaaatgtctccagacattgtctgtctgatgtcccctgttgggtgaaattgcccctagttgagaatcactcctttataccaatgcctgcacaatttgtggtaatgaaagtcatgtggaacactaaatacagtgacctatgcctgaggaattatttgaagttgcttttctgcatccttagggaccctttagtctctcgatgaaagggagtgtcctcagcagacaatcttcaggaattgcatcagctgcctcacccaagatcataccccttacaggggcagctcttcctgatcagtgtaggggaataatgacctggccattttggcccaactcaggagaacattaacattctagctcaagagctcccatggggttgaatgagactgtcactgggtctgcattcaccttgacttctccctatttctattcctgtttctttcacttcccttccacagttgtctatcctgctctctaatcattgccttagagttggcttcctggaggaagccaatctgtgagggggcaatgaaattgacaggcatttagaagcatctaagaaaaaggtattataataggcccattacagtcactgggtaatttgatttactcttgctttcataatgaggttgattattttgttcaggataagtagtgattattattatttaaggtgtccaacctcatgatctccattaataggtaaggactttggggacagcataaaattacatgaatctcttaccttaaaccttaagctcagcagcatacatgcccatgacaggcaagagttagaacgtaagatggtcagtaacatagatcttgaaaggaaatatgttggagtgtgagcactttaagggcatagggcctgcattacttttttattaaaaataattttgcatctaacacaacatcttgcatattagatgcaggatatgccttgattgaatgaataactgggcacttaaaagattgttcccagtctaataaaatgaaagaacttagcctggtgcttagtctaatgtccagaaagagttaatgaacttcactttatcttcagtcagttaagaattgattcactttgttactcaacaaatgtctgttgaatgaccaatgtaaatcaaactctgatctaggaactggggaaacggcagtaaataaaacaaagtttatttattgtggagcttacattttaacaagagaagatggacaatcaggtcatgataagtttgatttaaaaacaaagaataaagcaggctaaaggggctagaggatgggagaaggggacccttttagtggagtggtcaggaatggtgacatttcagtagagatgtgaggaagtacaccagtcagatattgggggacaaagtgttccaggtggaggaaacagtaaaagtaaaggatccaagatggagcatgcttagagggtttgagaaatattaatagcaaggaagccagtatgactgaagccaaggaagaaagatggtgaatgataggaggtcagtgagtgaccaagggccagacgaggaagggtcttatcaactatggttggctatcgttaaaagcctttggcatatatgctttgtgagaagggaagtcatagaattctgagctaagaagtgacatggtgcctgtagcattgttacttactgtgcctgtagtattcattcattcattcctatatttattaacaaaaacgagtcacctgaaatatgaagataaaaagagaattattgccttgggacatttaaataccaatcacaaaagacagacctataaaaaatgacctcctacagtggtagtaaatagtgggtgcaatgggagtagaatggaagggaggaatccattccacagtgagagaaaggagatgttctatctagttgagtattaacgcatattgtccctgaggctacatgcaaatccaaagtagagggtattccttttgataggaacttagcaaagaatgtttataattgcttggtccctgatctcacctagcaagagtcacaagatgcattcagtgatgaaaaatcagtttctcccttctacttagccattctgataagatgaatatctcgggccgggcgcggtggctcacgcctgtgatcccagcactttgggaggccaaggtgggtggatcacctgaggtcaggagttcaagaccagcctgaccaacatggtgaaaccccgtctctactgaaaaatacaaaagttagctgggcatggtgacaggcacctgtaatcccagctacttgggaggctgaggcaggagaattgcttgaacccaggaggcggaggttgcagtgagccgagatcgcgccattgcgctccagcctgggtgacggagcaagactctgtatccaaaaaaaaaaaaaaagatgaatatctccctttccagtttcgtgtgtagtctccttaccgcccttctgttcagaaaagggatttcttacgtatgtataatgaatataaatataggttttagagagcactaatgttttaatgagatagaaataggcagacgagagagaataattgaaggattagtcaacatgagggcaatttgatagggaaagaaaaagtctgagcaggaaatgtctgtggaaaaaaaaaatcgaagaggaatggaatgaaatgagctcatttatggtgtgagttagggacagaagggatttattctcaggaggtgaaaagtgaaggagttcatgttatagaattcgacctagaccagctatcaagggaaagaaagtaattcaaaagacttggtccaggagatctggagcagatacatctattagaggaagattcagttttgaactgcatcttcagttattcctggaacccaacacaaaagctcatgacaaccttgttatcttcaggcaaaaaaaaaaaaaaaaaaaaaaaaaaggcgggggcagcaaggcttatgtcttaaacaagacagcacataacttcaggtcagagaattccattaacatgaatcacccacaccaatttaaataggaaaaaaaatagtaagcttggttatgtaaaaatttagtttaaaaatcagaaccaacaattgaaattaaacaagaatgttttatttatttctaaaaatatttagctatttattttgaattctgaagcaatactaatatagtatataatgataaaacacagttgattttcatagtaaacatcagcatcagaatgccaagaggaagatttgtctccgttcatgttttattactctgagaaccgcgtaacattttttaaagagtcagaaaatggctagaaaaagaggaagaaagattatttccttaactagttccctggtcccatgctttggtggttaacagtcagtttaactctagaaccatggaaagtctctgtcactttcctggttaccctgggattcctcacattggcagtaagttcgtgaatgagataaatatcctgataactagctacattaatgatgaaaataattataaacgtaggagttggaatttttaaaaagtatcgagcgctctgtgctcttaacacagaggaagcattttgcatagattaacccgtttaatcctcacaccaacctttaaaataaggactgttattgtctccatttcacagaagagaaaactgagactagaacaatttactaacatattcaagttcatacttgtaactattatggattatcagccttagaaaaggggttccagacaccagtgaatagcaacccacacgtctcaactgcacagaccaaagaggatgataatccccattaatctttgcatgttagtagaggcagtggctagtaacaaatgggagagactttggctggaggatattttttattctttaatctttatgatactgtttcccctctccccttctctctctactcctctctctgtcagctgtatccacaataatgccacaatataactactatacaagaatataaagcttctgttctcatgcttatgggtctacaggtcaactgtaattcgggtgatctggataaaacttgactggaaagctctacttcatactgaagcatgcctgggttcgcctctaggctgtgagttcagtttagatggtttctaaatgtgttgggttgtgagccccagactaaaggatcagaagcaacctggggcatgttctcatggcagattgccagtgtgacaagcctctgttcacatcatatctgctaaagcaagtcacatggtcaagcaagccaaggtcaaggagctaggaagcacactgcgctcaccatgaggccatggctaaggtatacatgtttagttctttcacaactgagtgaaaaatgggccccaaattcaatctctcctatactctttttgcgttaattgctagttctttctcactcttctcgctttctaatggatgtacatcccatctatgatcatttggtttttaatatctgagttgctccctactgtctcaggtttcaaattttactttccttgaaatttccctggtgcctaatacaatacctttcacacagagagcgttcagcaaatggtgtggactgcctgtcgtcttttaaaagtacatctgcagagacagtaaaggcacctggcgatattgcattgacttgttagtaacctgacttaacccagatggcccaaagactgtaaccaccattacctggaggaaagttccctggtaatgcagtcagccaattatgttcgaatttactcgaaaattccttgagcataaattattcatggctctatttatgtaggtatctatcttcctatatctgaccttaggaagcttgattgctttcttactcttctaataatcaccgtgatgtttttgaagttttctataagtcggttagaagcagcttttttttctttttttttttcatgagtaatgccgcccaactttggctattagactttgtgtgactgtgcagccatcagcactggatattagatatagttttatctctgcaactcagtcaccttgccaagaattttagtatgaactcttgacttcccagatcaaatgtgagcctgatactctaaatgacttggcaatctactgacaaatcccatggtgtggtattctgttcaccatgtgcaatggtctcagagctcagcattatctgtctgacagctcatataatatttacaggttgttattcgttaggaattttagttagccataaagattttcacagctatggcagacattagaggtctcattcatcactcttgtgaccttcctctctggaatgtagcccatctgtctctgctgttgaaatctttatggaaagtctgcccatctttgaaagtttagtaagtgatcttaaagttttcattgaatctttacttttgatatacgatatagacatataaagcactatccttattttaatttaacgttttgaaaagtgttaaatttaacttggcctttcatttaaatgacagaaaacttactcttgctacaggaactatatgcgtcacatcaaaagaaaatagaaatcatacagaaaaaaattggaatgggaaaaattacacatatatacatatatattcaacactaataactacatgaaagcttaaatactgtattataatcctgattatgactttaggaaatgaaaacgatagaaatacattttgcatataatttaacgttataaagaaaccctaagcaaattcagtaatgaagtgaactgaataggctgggttacagagcacaagagagggatgaccaacaatcagatgttgcccctttccatttctgttttcctctttttatacacaacttctcaaatgcttgcttcccctccgtctactccctccttcagcctctgatcactagtgtgaaattgcccttttgaggtcaccagtgatcgtgggatcaaatacatcttcttcttctacacccttagtctgtcaggctcaagaattgcttatacttcaccagctaggctgttcttgtgtttcatcccactttattctagcttctgtattatttttctttgacagcagttctactgccaccgccatttgggggcatttgccagggtacattcccttttgttttcctccactgtactcatctttttttttttttgtacttttatagctttcttggggtataattatatgcaaaaatatgcatatttaatatatgtaatttggtaagtttggacatatgtatacacccaagatactattgccacagtcaaactaaagataacgaacatattcattacctacaaaagttttgtgtccctttgcttttgtgtgtgtctgtgcatggcaagaacacaacatgagatggaccctcttttttttttttttttttttttttttttttgagatggaatcttgctctgtcgccaggctggagtgcagtggcacgatctcagctgactgcaacctccacctcccaggttcaagcgattctcctgcctcagcctcccgagtagctgggactataggtgcgcgccacctcgcccagctaatttttgtatttttagtagagatggggtttcaccacatcggccaggatggtctcgatctcttgacctcgtgatctgctcaccttggcctcccaaagtgctgggattacaggggtgagccaccgcgcccggccgaggtggaccctcttaatccccttaagttttaagtgcactacacagtattgttaactataggcactatgttgtacagcagatctctagaacttactcatcttgcataagtgaaactttatactcattgaataacaatttctcgtttcccctgccctgtcttctggcaaccacttttctatttactgcttctatgaggttgactatttcagacacttcataaaagtggagtcatacagcatttatccttctatgactggcttatttcactgagcatgtctgcaaggcccatccacattgtcaccaatggtaggaaccttcttttttttaatgctgaatggtattccattgtatgaaaatgtggtgtatacatgcagttctctttgtacgatcttccttccttaaagagtccagccattctcatagcatctgctatgattctagtacttatggtcttgtcctttcacttgcatttcagtgaaaagaaccaaacttatgctgatgcaaatacctgtacacaaatgttgataccagctttattcatgattgccaaatgctaatcagtctatgggcctctgattttcactgcataaaatatagactaatctgtttatcattcatgctgatgaatggtggataaatggtctagctaagaatgaaagatctgttgtatagatgtcattggtctaggaagacagagatgtagaaagaagtaccataagcccaggcagttagatactattcaaaggcatttctctctgccatactttatactacatgtggcacattaacagtagttaggagtggattcaaggctgcagataaatgctgcccaggtgagagagaaagaattggttccacaattaaccatcattcagacaacacatcatagctatgtgattacaaacattatttgtgtggtgattaacattttacaaagcaatttcatattgatttcctcattttatcctgacaacattttggtgagggagatatcattattcccattggaatataaggaaaataaggcttaggcaggaaaaagactagcttaagatcatgaagtgataggggagtcaggactcaaatccagttcttctgaatctgtactctggacattttctgctatatccagctccctctcaagatgctggattgggctttgaaatagaaagccaacatcctgagtgcctttctaaactctgagttttacagtctatcaggggaagaggagagtgtgagaggaatgttcccaaataatctactgtatcaagcagtatatctaacttgctttgagaattatgccaactaaatactattgacctgcagaaaattgatttttctctttacacttatatcaataaagagaggcttctgctgccataagtgtaatttatgtaaaatgtttttaaaacattcatagcctttaatcaagtaaatatacttctaggaattttgctttaaaaaagtaactaaaatatgtgcaaagatttatctacaaagatgttcactgtggccttacttagaacagtgaaaaactggagacaacttatatgttcccaaagagggaatttattcaataaatcatggtacatccataagtgggaattttttagcaatgaaaaatctgttgtaaccctacaagcccactcttaagcattcatcttagagaaatgaaaacttatgcttatgcaaacacctgtacacaaatgttgataccagctttattcatgattgccaaatgctaaaagcaacctaatgtctttgaacaggtgaatggataactaagctgtagtacacccatataatggcatactacttagcaatgaaaagaaacaaatcgttgatacagcaatatggattatgcattatgctgagtgaaataaaccagtatcaaaaggttacatactgtatttatatgacattctggaaaagacaaaacaagtctagtagatcctccctaatgccttttgttcaaccccagaggtgagttttctattttacctccagtgattgctgtatcggttatttatctaaactgtccccacttttttgacccacctatgttatcaaactccaaatccaccaagtatgagaaaagtagagagatgaatgaaggtatttgtgttggaattccagaaagtgctcttttggcatgtcttaaaataacattagcattctttttaattttctggttaggcccctatgttgattaaaatatgacttaacaccagggtgcatcacttggaacattctgttcatcatgcatttaaaaacggctgaaataacaacttcccctaaataatgtggcctgtgcttgtgattttcaaaactaccttgggcacaatattgaatcctgtcacctcaaggaaggaaaagcatttgaagatagaattgctaccctttcttgctcttaataacatactgtgtctgtaacacaaaaggaaattcagaggttggttttgcaataaataaatgcatgtgtagtttgctatctaaattcagtggacaataccccatgatgctggtgccgtatgataatggttgatttgtacattcaagaatctgaatcacaaagctgccctggaattacacgtagtggttataagcacatctgtataagaaaataccaaaggacaacccggtgtcatatagaaactatttgccgataaatttgcttttgatgggctactaaaaatggacacatcaggcataaaagatgtgtgtgtctattacgtaggctagctttatgaagaatgacaagcttccactggtacactgagataagaaacagctgttgttggcatcagtactgctacaagaaatgaaaaaattctgtggcacacttgtgagcactgccacatatttgatcaacttttgaatagatggaagaccagaatcatctggcagccccaaatgaaattgtcgacaacccttaagaatctcttgagaaggagcactgaacccaattccgtagaactatcatccaattgtgtgttatttctaaagcaagtagttccagtgtgtgtgtatgtgattatgatggggcagggaaggaatgaggggaggctgttgttattttcctttttttttttttttttattgtgtcaaggacatttttgagcataaaattgtaaggtttcaaacaatgactgcaaagcagttgcttaggtgaatttataaactgtgaatcaaaggggaaaaacatctttcagaaaaaaaatacactgaatctcaccattggacctatttgatggctacacataagacaaaaagcttttttaaggaaaataaatgaacacttaagaactgcaattacaaaagcttgaaatttcatattgatctagaatttataatatttttaaaattctttaaaaatattttcagctatttagttcaagcatattctgataacttctctgacatttaattgaaaattttccccttttaatgtaaacataaaaagtcaactctagataccctacgtaggtcttcccattagctcagccaggcaacgccaattttcctctgtctctcgctgcttagaggttgtttctttcaggccgaaagcccctaagccaggccaggcagccagcagccctctccagcacacttctttctgagagacgcctaagaatagtgtaggaaatccaaagtgattcttctgctatcagaggatggtctagcatcctccaaattagaaagaatttctggaccactagaatgataaaaaaaaaaaaaaactagaaaggtataataagagaaattgtgaggcctcagcccatagatacctttaaggaaagaatagccattcttttctcagtttaggtattcacaggcttggcattcacagccagtgagggctggaccaagagctctctggagttctcttcttccttttatgatgctggtattttaagaagaaggtacactgagcagccaggagctataatttctggctctccaccatgtttcctgctatagagggctagctttttaatatttccataacaacagactctgaccagataggtcaggaagtctagcccatggtttgtttgtttgtttgtttgtttttcagttggagttttgctcttgtcgcccaggctggagtgcagtggtgcgatttcagctcactgcatcctttgcctcctgggttcaagtgattttcctgcctcagtctcccgagtagctgggattacaggcacctgccaccatgcccggctttttttttttttttttttttggtatttttagtagagatagcgtttcctcatgttggccaggctggtcttgaactcctgaactcagatgatctgcctgcctcagcctcccaaagtgttgggattacaggcgtgagccaccacgcctggccttagcccatgtttttaaatcagatcttatttactctgtgaacttatttggacaggagagctgcatcctacagaagaaaaaaggacaagagaagagttgggaagagaatgagaaaggcaaagatggaaagggaagcagggaaggcaggaggaagggaaaagaaaggaatagagaaagaaggacagaaagaaatggaaagtcagagactacttcaaaacagcagctaaatgtcttttttctctgtattaaaaatttccgtctgccaaaatgaaaaagcataattaccggccaaatacaaatccatttcctatatcgtttaaatgacatatctccaaggtacaaaacagcatgtctggttaaaggttgggtgatttgatccctctattactctatataaaacaaagaagctggagtttcattacgcttaaattgtctggcagtgggtgaagttaacttttattagaagctgttctttcatattatacagtgtagtcgaggatatattagctttgacgttttcttacatctcaatacactgcggagtgaatttactgtgagactaatttaaaagggagtttttcataggaggaaataatggtcagcatcagctgtgcttcaaattattagcagaatgaaaattcaggggaaaaagtatagacacataaagttgctagatattaataagaatgcgtcttttatttctgtttctgataatattctgtgtttcttaaagctccagtgtcttaaaactatattcaggaggaagattatattgttgaggaaatgttatagtgcctcctcaacaagattattttgtcttaaagaaagaaaaaaaaccatcagatcaaacagtatataaaatatatttgtagaggttcagctttagggaagaaatcctacaacttaagcctgaaaaaaaaaaaaacaatgcaaagatcattcatttgaccaatacacagtgaagtcataataaaacaaattcctagtatgtgaaatgaaatttcacgtataggattcatcactcataacaaaagtcttattacgctctgatatcagtagacattccctcacttttggtcaccttttctaataagatcacactggtcagctgacattttgaggcaccaaattaagcatctatttggtaagtgaatttggattctctttaaaccaataaagataaaaacaaccatatcagagtgataagcatattactttagcttcaataacttagaatgtaaatatatcacagagggatatttcagctactgaaataataaaatccagtcagtcaaatagtaaaaaatattgagaaccagcaacaggaagtattataaaaaaaagcactcaagggagacacatacaagaaaccccgtcagtctactcattcagtttcttatctgttctataggtttagcagtggaaatgtttgtgggttttttttttcttcgcatttatctttgtgcctgaatgagttcagtttcgcttagattaggacagaaatttcagaacagcaggttaatccatcctgtcttcatgggcagctgagcaaacagaccaatatcagtgtaaaattgtaattctggagattaatgttgtctttcctgtttgcgatgaatttgacctccttgcctttctttttttcctcccttcttttcagcgtctgtccagggtccctgggagagagccatctcgccaaacaaagtgccctactatatcaagtaagttggaagtatcacatttttaaaagagcatttattgtgactaacctgtatattcacaagtgagtttatttttaaaatgcgacattagcctggcctacaatacctgtgtcttttttttcctgaggaagcttggataaaaaacttattctaaaattaccattgtaaatttgctgatgcaatggggaacgacttttaagaaaagtttatttaatgcaggatatatggtgtgttttgtgacagagggggcggatttttcacaatagaaccaaaagctccagataattttattgatagtgggagtcaatctttgcgagaacaatttcttttatttaggggttttctcacatttcttcttccgtcaaagatagaagatttccgcagttatatgtacacaactgttttgggtgaatgaatactacatgtttccaaaaggcagaaagcagcagtcctcgactcgtagggcttagttgttcattcttgatacataacactcagtatttgtcacctaacaacagaaagatactgttttctggaaacatttgtgccagtcaaaagaatacgagtgcttggaagcaccttctgtagtattttgcatgaaatataaatgacaatacattgggtcaacgtggaagagagaggagagaggatattgagtgattacgataccttcacagtctctcatccattgtgcactagagtctaacttaaatttaactttgaattggaaacctcaacaacaattacaatttactgggttcataaaatagtcctcgataccaaccgaagtctttgaacttgcttctgccatgagtctgactaaaaatattagatgttttcccatttttttccgcctgccatcttttatcgaatctgtttttattctttcactgtccatcaattcttcttaattcggttctaaagcaataacagcagtcctagatcttcattactacagtcctcaagaaatttgattttatgcctctattttgttaactcagaaaaatgggagtgaaggtagtcttttgactctttcaggagaaatacatactttaggaaacggtttaccatttgtcttattacatttttccagatgaggtatctcttaacttgaaaattcttttttagtatgtttgattctgctttttagttttcatattttatgaatttaattttattattgttatatttaattcattagtcactcaaaactgtacattttaaatacctatttaaatcacatgctttattaaataatatattgctgtagacatgcactgtatattaccttacatccactgtatattttatggaacaattttcttcaaactctagacagtgatttcctacatcagtgtctttgtcctcacaaatttttatttccgactaagatgtttgagacctgctacttcttcaaccaattcataaagctctcacttttatccaattcctttatgagctgaaataaagactctttttctcctttcatagatgaggttttaggatcactggagaattcaagacacctttaagctattattctccaaatgactacttgtttggggctcactagaggtctcacatggattgctagggtctccccggtcccattgtcctttccctatatattcatcttctccctgatgttacttctactacaagagatcccagtacattgctgtgagggaatggaaatgaactccgtccaaaaaataataaagagacaaattccagaaaagctgtaattcccttctgtgtattagtctcttgctgtttctcagtggaattagagagcagctacatatcctatttgtccaatgctccttcatgtacctaaagaccatggtgatggtattgataagggcacagatctatgaataagaaaacttcaattttagtcctccagtctagtcttagaggctctgtcattaggcgactgtatggctttaggcaagtcacttaacctataaaaatcttggtttctttctttttttttttttttttttttttttttgagatggagtttcactctgttgcccaggctggagtgcagtggcccgatctcggctcactgcaacccctgcctcccgggttcaagcaattctttcgtcttagctcccgagtagctgagactacaggcacctgccaccatgcttggctaatttttgtatttttagtagagacgaggtttcaccatattggtcaggctcgtctcgaactcctgacctcaggtgatccacccgcctcggcctcccaaagtgctgggattacaggcttgagccaccatgcccagccaaaccttggtttctaatttataaaataaagagttggactagatgatatctaagatcctttttagctctaagacgtaatgagcatgactcattcagttgtcctgtccaaacttaaaaaccgaagatctcagcttttgttcgataatatctttatttttaaaattcattattttaatgaacataatgtaaattcttactttaaaaaacaggaattttatttttccactgtttaattagctttagatatgccctatcaacccactccaatttcaccacacacctctttaaagagctcaaatcttggtatataatttaggattattatgcttcctggctcatgataagagagagagaacaataggcaggaaaatttgccaaaaggtgagtatggagaccttaaaagcctctgaaataatcagttccttgaaatgaggaaattacgtaatttctcaaaaatatctctgaaaccttatggagagcaattctctctacaattataatctctttgaaattagggatggtataatttctcaaatatgagtgtaaaatgttaaactgtaatatagggaaaacatacatgtttataaaatgaacattgtcagtaagcagatgattaatggcacttgtgtcttattagccattactattatctaaaatgttctatggaaaccaaattaatttgatgtacaaggttcggtggactttatgcacagcttaatgccgttcataatctgagatgccgtcttggtctaaaaagaacaaaaatacgtttacagtgacagtgcttcaaccagtcctcatttttcctcttttttatcttgtttgtcttgacttccagtcaagagtttttaccacagatgcccagctgcaaaaccaggtgtcttctctggctatgtttttaatgctttgtaactttttcttttcaatgctgggataaagggatcgcccacataacaagaggtttctataccagtggcacagttcctgttggttgttgaattgtgcactcattcttgagattttaagtcattaacatcttttgctctagtttgcaaatcaggcagtgtttatgcctgcatcctgacatcagcttttcatatgaggctaagaaccttgattttgatacttcaaactacgtgtttgtctagtttatttgtccacagcatacatcattgttacagttttcatattccctctcccttggggctcccttattcctgccagcatctctttcaggttatttgattacagctttcattgccactgaaaaaataatcaccaacaatgttcaacctgttacaactgccttttctactctctgccattttgtagttttttggcctactgtcaaactcatgaaaatttcaatataatagcctttaaccagctgctgcattctgttaggatttctttcacctttttatgttgcatgctcccatatgggtaaaccaaacagagccaagagctgggactctcttgctttcttaatgagttagaaaattgttcttctgtattctggactgtcaaaagaatttaggaatcccaaacatgcatgcaggatgttccagtatagatgtcataataaaagcataagaaatatcacactgggtcagaccaacagggcaactagcccggaactctgtcccagatgaagataccaatggttgttttgtcaggtaacctagtacattttaccttaaaaattcggatacatcatgaccacttcttaataatgcattgtaaatcaactggcagtgagtttatccaatggtgtcaaacttttcctattccccacttcagctttgtcttaataataatatgttccataaatgtaccgacttctatataaatataggcattttaatttctcttgaatctgcatcctttaacctcaaggaatggccttaattaaattctttgaaattcagtaaaaacatttatatttatccagagtcgactttagcctcacattcccctactaatgcttttcattttcatcttcccagtctgagaaattctaatcctttttagtcttttagtctgtccttgacggaaagataagctttccccttgattatcttagttgtttttccctggatcttttccagctctgttatatcttctttgggatgtcgtgactagggtggcccaaatattggttatgaaatttgttagcattgtctctagtttccactcactcatgaagaaagtaaatgttatttgctgtctcccattggtgcagaaatggagagatcaattgaggtcataacctcttctgcatatattagttctagccgaaggttggttttctgctacttttctgtaataccagcaaaagtgtttgaccttatatttctgccagctgtcccttaggaaggatttgatttttagacaagctggtcctttcctccttcaaagacgctgtggttgctaaatattgggaagaattcactaatgaaactcaggagtaaacctgctgactccatcagcagtaatgcatttcatcaggttccctttcgaaatatctctgaagcccttcacagaagagtgaaagatggggttcttgggaacttgctaactgctcagctttttttacatgcaatgctcaagaagcaactcatgtccaaaggagtgtttatcttttcctgctggtaattttgaatgttgtatatacattgctgtatatgttgcctgatgaccttgatcgacccttctcttcactctcaatctcaggcatgtttccacaaccatttattgcatctgagttttgctcacaactttctgctgcttcctgcttagcaaaatgcgatataaaaccttattggatgaagttaacagttgcttcagtcaacatttcttgttactgttgctgtttgtgctgacaaaattgctgatttgggttctgactgtcctgtcttcttatggcctaccattcctatagctctatttgtacgagtatttgactctctgcctggaactgtggccatctgtctagatttaccttttggtatatgtggctctctgtatcctgttggtctacattctggtttgaactcacggatcttggtctggtttttagtaccagtgttcccctaactccagtagcatctgaatcttgacaccaccttcccctgccccctactgtattgcctctattactactttcatggcaattttttcggattccaaatatgtcccatgcttaaagcatatcttgctctcattcttgttctagcccctgttggtaccaggcattgctccaattcaagttttggttggttgatttcttccttcataatattgattgctatttcagtacctgtatttatatacagagggagcagtgcctaactacatcttagccttaacagcaatcaacgtgttaaatatccctgtgttggctggtttgcagtagacacgtcttctgacaatgagatgggctcttattataaagaaactggagtatgatatcaacatagaaaacatttcctcaggccgggtgcggtggctcacgcctgtaatcccagcactttgggaggctgaggcaggcagatcacgaggtcaggagatggagaccatcctggctaacatggtgaaaccccgtctctactaaaaatacaaaaaattagctgggcgtggtggcgggcgcctgtagtcccagctacttgggaggctgaggcaggagaatggcgtaaacccgggaagcggagcatgcagtggacgagatcgcgccactgcactccagcctgggtgacagagcaagactctgcctcaaaaaaaaaaaaaaaaaaaaatttcctcatttcttattccagacacctcactcttctaagaatgatacaagtcttctgacattgggtttgaaaatcagttgaattttgtcataatctttcatacaatgtgaacacatcatgtagtatataattttgtgctatttctggtaagatccttcttatgtatatttttcttcaaaatataccttttagcagctaagacaacattaaataggggaaattttaaataggctaggcatcgcaagacttgaattctagttccagctttactgtcacctagctattaatacttgaccaatgggaaattgcttattttctgtgggcctcagtttctccctctgtcatttaaggaagcagaatgacatgatatcataggtcatttccagtactaacattttctgattttgtgaatgttgacttcgaaatagaaattgtttgtgatcattttccagagaagtgaaaatgaatcttcatattgcccttgaggattcttattgcaccatcaatcttatcgggatagaaaggacaaataatattaaatgtttcacttaactatttagcactattgatgataagaagtggatgcaacagagaatcagctgtctaatttgatctgtcagtctttgaggatgctggtgaatgattcggggtaattaaatttttgaaatcactgccaaaagcctgatgctctgacttttcaaaaggctttagtacacaaagataacccagaggtcaatcttctctgctgtgttttctcctctgccatttgatggtttcaaaggtcacgttacctgagtctcagtaagctctggaaccacaatgaaggaatagttggtaatacattattgatgatataatcatgaaaacaattcaggttaagatattaactgaaagagagtgaaaggggtgccatagtgttgtgcagagtgctgagtctggttttggttttatagatcttgttgggagatgtagatgttgatatcatctgtgtctcataggttcatgaaaaaaaccctcacatccttttttgtagtttcataagctgatttgtatcaccttgactgaaataacagactccaggaggatagctgttgttatctctttttctagcatagtgcctcacagataacaggtacttggtaaatattggaatgaattcatgaacatatgtcagtaattctatgtgcttttcagtttgctgactcatttcaccttcaaaacaatcttgtagtatttgtgtgtcaatttagatttaccactcaaatccatctctcatgccctctagacatgaactttagtgttaggaagcatgccgagtgtttgatagagtttctcatagctcctacagtttggtgcttaagggacagtccttggcatggatgtatgaatggtacataccaaaacatgagttctagattccgttctatcttaatctaacaatatgataaggagtataacttagctcaacctcaatgagaaggttgaactagataatgcctgggaccactctcagctctagctttgtttcagtagaactagagtctgtttttcctaaatatcattcatgaggcttcttctggttttctagtggtcaatagagctttaaattgatcaactactgtttttcactgagcattgtggacaggacctactttttgggccaggatatagtagccactgagtcttaacagaatgtcatcaatgatacatttttattttacagaaaaatgttgtaacattctatatggcatatgtcatgtggaaaggtggcaacatatatacatacacctatacatgtggcagctaaaatttaatgtgtgtatggggaaaataatcctgtattataatacacatggtatagcattccctgcctcattcgtggcacttttggaaatgtgagaatgagcatagaacatattcaagttggtttatccaaaagaagaggagtaaattatttcagctatttccccattttctttttctaactttcttaaacatgcactttcttacataatcacgtgttagaaaaaaaccagtagtcacatcaaataaatctgcatttgaaacaactgtatcatatcccaactctgttcgtttgagccatttgcttaacgtgacacccattctactttatgacacataaggaatattgcttaagaaatgttaattggctttccttttctcctctgaaactggattgaagtcttattgacctctattagatactgagtgttcaggtttttaggaaaacactcatagagatatagccccagtgtgagctgcatttttagaatattttctagaacccaaatatgtccctaatcaaagttagtttattttcattcttagcgttcccacgtaatttggggtatgtgtgaattcccaaacattcccgggcctctcctaggcttctctaattgcttcttattctgttcccctgggaagcagcatcctgttcccttcacaaaggtcagcagcaacagcccaggcaatgttttaaaataacttaataaccctgaactgcctctctcttctttgggataatttccttagagcattagtcctttgaacactgacctggttgcagaaaatgcccctttctcagtgggaaaactccaaatcccattcagtcttcccctccttccttccaggggatagggtgggggagtagggggtagggagagggtattaaatactttcttcaggaaaaatgttaacacggtaaaacactctctctctctctctctctctctctctctctctctctgtgtatgtattcttttttaaagaaatagactgtgagtgcattgtataaatcagtgctgtcacgttgcaaattttttaaaccgttgtacaagatagaaaaacagtatctctggatattgactctggaaagcttctaagagcaggtcctagatgagacttagctcactgtcggcattcggcaaatgatcacgttttctgtgataccattaactcctggggggatgaaactgaaaagcctcgctgctcttcctgaaactctcaactgcttttttctgtttttctttctcagcttatccacatccatcttggtccccaaagccattgcatgtcagatggtcagtgcaatgtgtaatttttaacttgcttctttgttgctttagaaggaatcgttttgttgttttctttccttttggtcactatttcttgttcatgagttttctgtaaacagtgtgtctcatagataagtccatgtaatctgctagacaggaagaaaagcaaagtttaatgtgtgcctactatgtgctaaatgacaaagtgtttcatctgtatcttcccatttaatccttgtaacactccacttattatccaataaagaaaaaaacggctatcagtcgggcgtggtggctcatgcctgtaatcccagcactttggcaggccaaggtgggtggatcacttgagctcagcagttcaagaccagcctgggcaacatggcgaaaccccatctctaccaaagatacaaaacagtagctgaatgtagtggcatgcacctgtggtcccagctactcaggaggctggggcaggggaatcccttgaaccagggaggcggaggttgcagtgagccgagatcacaccactgcactccagcctgggtgacagagtgagaccccatctcaaaataaataaataaataaaagttaaaaaaaaaaaaaaggaagaaacagctgagattcaaaaaagttggaggcttatccaagtcattctaataaaggggaggggggagaattgatacttaaaatcatcatgataagaaggatagacattggagattcagaagggcagaatgctgggtgaggggtggataatgagacattacttaatgggtacaaggtgcactactttggtgatggatacactaaaagcccaggttcaccactatgcaatacatccctgtaacaaaactgcacttgtacctcagaaatttatacgaataaaaataaataaatcaaataaaataatcatcatcatctcagctattgcttctagctgtttcaactttctaatgtttttgattgaaaactggccatttgtataaccaaatgtggccaatccaccactgtgaggctgccatcttgggcatcaccaaaactactctagtagtccttccctgcactgttaggtggattttccttggcgtatcttcgcaatcaagttgcagagacctaagttactctttgctgctttgggcaataaaggggaacaaaaaacaaaatgaaacaaaaacttggccagccctgatgtaagcactcttctacctccctgcaggctgagaaaacaaagtatttcttttttttttttttaatttttaaaatgtttgattctggtctaaatcaattaaaatgagatctccccccttcttttttctttttttcttctaaaaaaaaaaaacacaccaaaaaaccgagatacatgtgcagaacgtgcaggtttgttacataggtatatgtatgccatggtggtctgctgcacctaatgacccatcgtctaagttccctcccttcaacccccaaaccccaacaggccctggtgtgcattgtttccctctctgtgtccatgtgttcttaatgttcaactctcacttgtgagtgagaacatgcagcgtttggttttctgttcctgtgttagtttgctgaggatgatggcttccagtttcatgtccctgcaaaggacgtgatctcattcctttttatggctgcgtagtattccatggtttatatgtaccacattttctttatccagtctatcattgatgggcatttgggttggttccatgtctttgctattgtaaatagtgctgcaataaacatacatatgcatgtgtctttatagtagaatgatttatattcctttgggtgtatacccagtaatgggatggctgggccaaatggtatttctggttctagatccttgaggaattgccatactgttttccacaatggttgaactaatttacattcccatcaacagttcaaaagcgttcccatttctccacagcctagccagcatctgttgtttcctgactttttaataatcaccattctgactggtgtgagatggtatctcattgtggttttcatttgcatttctctgatgatcagtgatgttgagctttttttcatatgtttgttggccatgtaaatgtcttcttttgagaagtgtctgttcatatcctttgcccactttttgatagggttgtttgtctttttcttgtgaatatgtttaagttccttgtaaattctggatattagacctttgtcagatgggtagattgaaaaaatgttttcccattctgtaggttgcctattcactttgatgatagtttcttttgctgtgcagaagctctttagtttaattagattccatttctcaattttgtcttttgttgcagttgcttttggcgtttttgtcatgaagtctttgcccatgcctatgtcttaaatggtattgcctaggtttccttctagggtttttaggatttggggttttacatttaagtctttaatccatcttgagttaatttttgtgtaagctgtaagggaggggtccagtttctgttttctgcatatggctagagagttttcccagcaccgtttactgaataggagatcctttccccattgcttgtttttgtcaggtttatcaaagatcagatgtttgtagatgtgtggtattatttctgaggtctttcatggataggaagaatcaatatcgtgaaaatggttatactgcccaaagtaatttatagattcaatgctattcccatcaaactaccatgaccttcttcacagaattaaaaaaaaaactgttttaaatttcatgtggaatcaaagaagaccccgtatagccaagacaattctaagcaaaaagaacaaagctagaggcatcacaccacctgaattcaaactatactacaaggctacagtaaccaaaacagcatggtactggtaccaaaacagacatatagaccaatggagcagaaaagcaaaggatttctaagtcatattccaccacctccatcagggcttccctaagatagagagtatggccaagaccatacttaataaatgtcatggaatgtgtttctcttcataccctcaattgtaagtctttctgaaaggtagcgcgtggtcaatttagatggacaagaagtgctctgcaggagcctttgcaacatttgtgcatgtccttgattttgacaccaccccccgccccccattccagaacagatcgtctcatccttcccttaagccagaggcctatggttctagctttactaggcaaatatatatggtctgtggctataagtcacaatttctcccaagccttgagctgggggaatactgagtctgcccatgtattacatgcagaacatttcatcttattgcagaatgatactttattcttattgcagaatgatattcattattgcagagtgatattctttagtctttattttttatcattataactacatggtgcaaaagaagtatttctcatactttttctcataatgactcaaaattacaaaagcaatctgggcaattaatatgtttttgaagataaataatggcttatgttttctgaagattaagaaaaatctctgtctgaatatagctgggcacagtgtctcaagcgtgtaatcccagcactttggggggtcaaagcagaaggaacacttaagcccaggagttcgaagccagcctgagcaacaaaatgatacctggtctctacaaaaaaaaaaaaaaaaaaatccttggcatggtggcatgtgcttgtggtcccaggcacacaggatgctgaggcaggaggattgcttgagcccagggggccgaaagttgaggctatagtgaaccgtgtttgtgccactgcactccagcttgggcaacacagcaagactctgtctctaggaataaaaaaaaaagaagaaagaaaagaaaaatctctatccgaaaaatgtaggcaccctgtgttaatatgtaaatacaagtgctttatcaaataaaggctagattaattgttttttctcgctcttacttatatcaatactacaagaacttttctgccaaaaaaaaaaatcaaataatagaaaagaatgaatcctagatagagcaggaggggctgagcaggcacagcaaaagttcaaggtggaaatatctttatgcatccaattaaaagtaatttgtgtacattttactcatatatctatatgtacacatacatacatacacagacacacacacatatatatatatatatatatggagagagagagagagagagagagagagaggacaacgaagaggaaactaaagagaataaagggtattaacagcaggtctgtgacttattccctgggggatgtgaagggaataaatgaccttaatagaccacttcataaacatgttaatgacctcccagaccttcttgtttatcttgttaatagtggttaactagaggaaagatacctgcaaatccctatctataaaatgattttagtagggtatacctggcctggctagatagcttattgtaaataaacctggaatgtttggatttatgagtcgtggctggctggagaatagggcatagctacatgaacgtttttctatttttgtaattgacagattataaaatggaaaacttttgagactgaaatgatttcctttcaatgtttctgtgtaaatttttaaaaacgtatctgttaatatgaaaccaaagcacatcataatgggaaataacatggatgttttggaaacgcatgtgtgattatttcaggttccccagggaaataatgttctatctgtgcccagcacttccctataattctttcagtcattaataaagattggtactagataagaatctgagatttgtgtgagtctgatgtgagatccaaatgttatacttacacaatttgtgtttattttagtttaaaaattatctttgccatgagcaagaggggaaaaaaaggaggatgagcgggcctacatatttttccttaacatcttgtcccaagttttaggaaatcacaagtctaagaaaaggccagggtcaggactaggaagtgatataacagttatacatgtctacctttaaaattatataagtaataattaatttttaaccttattttaagcagatcctagaaatagcaagagcctctataacgtcccagctaagaccccaagttttctttcttgtttaactcttgaaatattttgttaattttcagatcccttgtctcctcagttcagctgtaaactctctgacaacgcttgtgccttatgcatctttgcatcatccctagcatgtattatatatctcacatgtaaaaataataataaatacttgatcatttgttttgattttgatgattaagcactggaagctgagctatgatcccaataggtatgcttatttaaagaaaaatagatggcagtccaggcgtggtggctcacacctgtaatcctagcactttgggaggctgaggtgggcaaatcacctgaggtcaggagttcaagaccagcctgtccaagatggtgaaccccgtctctactaaaaatacaaaaattagtctggtgtggtggcagatgcctgtaatccccactactcaggaggctgaggcaggagaatcacttgaaccctggaggcagaggttgcagtgagccgagatcgcaccattgcacttcagccagggcgacagagttgagactccatctccaaagaaaaaaaaaatcacacacaaaaaaatagatggcacggcacagcagcttatgcctgcagtcccaacactttgggaagccgaagcaggaagatcacttgagtccaggagtttgagaccaggctgagcaatatagcaagactccatctagaaataaataaataaataaataatttttaaaaaatagacaataacagataaagaagttccatgttatttttttaaattctagatagccccactggtgttacagtttattaaattacatttggaagcgattttttagcagtccatttattttgtatatttcagtttgttgagagcagatggggttgagtgttgatggggttgattgcctggctagattatgctataaactataaatctttgaaagttactgttttgaagaaagcatctttaagtgaatatattccttcagtagctcctattaccaaaactgttgtgagaatatcttaggaaaacaccttaaaatcctcttctatcaaaactcccaagctttcttcaggagccagcattgttcagtgaatgcatgtaagcctatgtcttaatagagggatccctaacctctggaccatggactggaacagcaggaggtgagtggtgagcaagtgaacattactgcctgagctctgcctcctgtcagatcagtcgtggcattagattatcgtaggtgcacaagccctattgtgaactatgtatgcgagggatctaggttgtgacctctttatgagaaactaatgcctgatgatctgaggtggaacggtttcatctcgaaaccatacccccgcccctgcctcccagtctgtggaaaaattgtcttccagaaaactcatgcctggtgccaaaaaggctggggaccactgtcttaatagatcttgaaaaaagttggagtaaggtaagtggtaaatcctaagacatacattgaggcagagctgcagtggtatccagtagggaagaaaagacttcaagtttagaattcagttatactcaaccagtttttgcctttctctgttaaatattagatatcattaccagacacatacaaaagattttaattgcatgaatgcccgatgttgatacaagagagccgatttttttttcacacatagttttttggggtttttttggtagggagaaacatcatctcatgatatcgttttaaaggtgctttattatcaaggaccttagagctttttctctcactcatatttcatatactcttagtcctcaagccatttctttttactgaaagcactatagagtagcaaaaggcatcattatattgctcagcctcattcatcatcaacaaaattgccaattatattccaagtccttgaatgtattgtttaaaaagatgtataaggtgaaaggaagcagttcaatgttgaggtggaagatgaaacatactgactggtagattcagagcatactaatcttgttttcacttgtgaactggaaaaaattaacatggagggatggagaaaacatgttcaaactacaaagtcattttttctgagaagttatctgactgtaactgtaactgtaactataactcagggtatatcagagggctcaaatgtggaacacttctttaaaattaaaacctaaaagtcctgatgtgtaatagaacgtgtaaaaatagcagcctctgaaggatctgagatgagcagaggaacactgaataatataatctgacagtatgggccatacccttacagtagttgccgtggcctggaaactatagaattaattcagtaaaacatcagaaaaaaagcaacataaatataaaatattttaaattaaaaagactgaataagaacagaaaaaaatcccctagcaaatcaatattgcttggggaagcatgaatcccagaccagcaatattttaatccaaataacttttagttccatcgtgaacacctttatcaccaagttttataaagagtggagtgaagaaaaaaagtacttgaggttgttggaaacacttctcaaagttggtggctttattcagagattcatgcttgactgtaccaacttctgtttaatttatacgtagtactttgtcaatttaggaatttggtttacttgtcctttcctaaatatgtgtattacaaaacaaaaaatagagaaatgataaaataattacaaagatgattaagcaatagtgttggctatagtgaacagattattgccattttatagagtaataatatacctaaggaaatctgtgggaaatttaatttgggatataaaacacagaagtcaggcggagatgaaataataaaccaataggaaattaaatttaggcatgagagtccaaagatgtaaattctatagatgttataaaataatatgtatgcccttacataatttcattactctctgaacttcatttctcagtgaaatatggggaaatgatactgaacagtgcagcagctcttccgcttatgaaccaaccagaagatatataaacaactcttaagggttatacattataaagatataatttagtctggatttttttttaaatttgaaaactaattttatataaaccctaattgggcaattctccattctttgacttgaatattatagtaaatatgttttcccaatttccaagtttcatgtattattttcaaagaaaaaagacaaacttttaaatgtccagctacctgggacttcctctgattatcttttaaggtagttcaaatatatacaatttcaaacaacaacaacaacagcaaaaaatattttgccagacaatatgtcttgtttgtttttaatgttcacaatgtaaagtacacttattgccaaacctcactttcaatggtgttacaaattagccaagtataactagtttgtaaatactaataagaaggttgctgaaattcagccctgaatatttcttttctgcaactccaaagaggaaaatttttgaaatgcaaaccttgacctttatcaaagcctaggtgaagtttgttggaggtgtttggttttttgctggtgctttgttataatgcagtttgaaagtagactagattggcaagacataattggctgctgtgtggagaatgcatttggtggaacacgtgagttaggggtgaggaaatatgaagagccagagtggaagcagggagaccagatagtagtgtgggaagcactggtgttagataagatctagataaaggtagcagtggagatcacaagaggtggttggaatcagggaatatggtttagaaacaatcacaggtcttgctgatgcattggaggtcaggagggacagaaagagggcaatccaggtgtctcctcggctttcagcaggaacaggtacttaaagaggaacaaatttggtagggaaaatcaagttttagtgttccattgcagtacatggtaaccatggctaataataatgtctcatatatttcaaaattgctaaaagaatagatttttaatgttctcaccgcaaaaaataaatgatatgttggtgaggtaatggatacgttaattagcttgatcaactctttctacaatatataccaagatcaaaacatcacatcgtatcccataaatatacaaactattatttgtcaattacaaataaatgaaataaataattttttaaagagatgtcttaaagggtggcttgaagagcttctgtgctccaataatacctgcccattagccatactttgcttccagcaacaacaggaaaacatttaatctaaacaaaaaaaaattgcttgtcaactagatagctactcttccgtgtagaaaccctagagctgcctgggtttagacatgtttaagtttgaggtacttattgggtatctagctgtgcagttcaaaatttggatctgaagctaggggaagacgtcaggacaagagctttaacttttgtaatcatcaatatatacatccttcttagagtcatggggtgggatgccatcatattgggatgagggaggaaaccctgggacttcacaatatcgagctagtttctgttttgcaaaaggcaaatgtattaatgaattcattacattaattaagcaaactatatttattgggggctattgtaccagctattgtaaattttatattttatattatatatatatatatataaaatgctcacaaaataaaggaactaagtcataaatatgcatatgatttacataaaggagctaaaataaggatctctgtttctgtttcaattctttattaaagatctatctaagactataaagacatatataacaaggtacaggaggtaaagagtatattcttaggcatctaaaaatttttcctatgcttttgaaatctgtgtgatttactttcttgaattggcctgtaatataggagtacaatatcattgcagagattaattagtgtgtttgtgaactgttctcaaatgctaaaatgaaagcataaaactataaaatggcatcattattccttaaagaagcatagtttccaagggtgtctctgatcattgtcacagcataaatgaccaatttcacccataattagccaagttagtaagaagttattttttactgggtatattttgtttaacctcagttatatttgtaaaagtagaaactgctacttgttactgctttcagaatttctcacaaatgctaaaatgctttttaattctaatgcacttaaatggtttgattctccttacctaagaaaaacatttatctaaagatatactcttgactgattcattcattgattcatttgtcaatagatgtttatttatcagaatatgtgcaccagatacattgctagatgtaaagggtacatttggtgagcaacatgcatgatacctccaaagtatagccagggaatagataatggaaatgacactaagaatgaatacatattaacacaaaaagagagagagagtcatgtgtcaaggcaatttagcaggagggaacttgtcaatacaagggattaaaaggacagcatgactagggctggaggaggtgaggagaaaactcaaaaagtcctctggctgatgcaaatgaattggatgaggagcctatgaatacaaacgtttgaaggttactgatgaaagccaggtgagagaagatgggatttggaccaagatgatgatagtttggatatggtgagaaaggcatagatttgagagatttttaggaggtaaaaatccttaagatttgaggatagatatcataggaggaagggcgcaaagagaaagcaaaacatgtcaaggaatcacacctagatttctgggcaatgcacagttggtaattctttacagtgagttagggaactctaaagaaagatcagatttagggtggcaatttgattgtaaatgtttggatttcaaatgattggtgacatccaaaaagcactgtaaatagacagatagtgtgcacctaaagaaagaaggaggcgcatctgggttggagtcactaatttacatattacttgtatatagctagtaactgaaaccatgagtgtgaatgagattctgatgctaaattctggaaggtcactttttaaagtgttttgctttttgaagtacaggtgcaatactaaaaataaaaaagactaatttttaaaaattaaattaaaatgaaaagcctggaaagataaacaccaaagttatgatactagttgtagtatgggagagggggcatcagagaggatcggaatttcatcttgaatggtgtattttatttcaaaagaagctttgagcaaagataaaatgttaattctgagcattagaaggaacacatttgtttttttgtactgtggatctttttgtatttcctagaactcttaatctaaatcaaatattgcaaaatatatcactgtaaacaactggttggtcactagctttttaaatactttgtagcaacttggttgcttgtcagaggtcttctttgagtgaagtctttaatttatagttctttatgcttgatcagcataattgcaccaaactgttacttaatctgaaaaatagctgtttcctagagccctacttaatactgaaaacctactgtgtttgtattgcaattgcatttttttttttacttttccccctgcttttcagtttgtataatttctgttaccctatattcaagttcactggttctttccttgtctttgttgaatctacagatgagcccatctaaggtatttttcttttctgttactgcttttaatttctagcatttccatttgattcacttatagtttccagctctatactgaaatatactgaaatatagagctggaaactataagagtgaatcaaatctaatcttgcatattgtcttctaatcttacatattttctatctaatcttgcatattgtctttcttttccctcaagagtctttaaaatattaattatggttattttaaatttcctgtctgatagttccaacaactgttacatatctaagtctggttctgattcttgctttgtctccttagactgtgatttttcttgcttaggcatgctttgtatctcaggggtaaaagtcaggcatcttagatagcgtaatagatactgaggtaaataaacctttgacatggtaatttatcttaatctgactgggaattgggctgtgtttgatgttggtagttgctttggttgtcattgttgagttttgttgctgctgtggccaccagagacttcaaattcctctggtaactttgtttcctcattggaagcttgttagtgtagtggttgagtgtcgggcagaggcattctctaatgtttgaattaatacacagttggcctgggtcttggggatgtggtctttacaattatttctttcccttcctccagaggtagagtaacttcaacctcccattcccttcctggagctgcagtggatatccaccagtgttctcagtctatggccccaaggccctttctcctgcataaggctgaaaaacaacaacaacaacaaacaaacaaaaaaaaacaaacaaaaaaagaacaaaacaaaaccacacatagatgagatctggtgttcccttcccctaaaatgcagtggtatttcctcagtgcctgatatggtttggttctgtgtctccacccaaatgtcatgtcaaattgtaatccccacatgttggaggaggggcctgatgggaggtgaatgaatcatgggggcagatttctccgttgctgtacttgtgatagtgagtgagttctcaagagatctagttatttgagagtatgtaggactttccccttcactgtgtctatcctgctgctgtgtgaagatgtgcttgcttcccctttgccttctgccatgattttaagcttcctgagggctccccagccatgcctcctatacagcctgcagaactgtgagtcaattaaacctctttgctttataaactacccagtcacgggtagttctttatagcaatgtgatgtcttttcctctgaagagaagggtataagcagattcatggtgactagctactgtgacccttccccaatcagcaacacagagggtgttggggaggctttctccagattcttcgcatcctccttgtgaaggcaaggtacagttcctgaaggaagaagcttgcaaaaggttgggactccacctatggcagtagcccccaggatcttcacactctcaggctagctcccacatgtcccccaacaatttaatctccctactagtttatatggcatctgctccagggatccaaatgctcaggcactgcttctggctaaaggccaatctctctccagatttcaggttgttctataatgtcatttctctgatggactgatgaaaagtcattaatttatctgtccagcagttttcttgctacaagtatgggagcaacctctttgcagctctccatctccatctccaagttgaaactggaagtctgagcaatacattttagaaattaatatttgtaagttttccgtgtcataacaaaaataataaatgttcactgtggaaaacatagaaaaagattaaaaatatttaagtgcccatcaccacctagacaactgcaatgaacatgttggtaatgtcttcttccagttttttaaaatctgctgataaaatacaaaagatattgtttatataactttgtatcctaccttttcttgagcaatgcaagtttaaacctaaatacgaagatactctaacttcctactttacatttttgacggcagatgtcagctgtcttcccaagtgcagtacccttggcttaatatcaggtagacaaataaggccaccacaaattcacctttcacctcaataacacaggtaatttgatagttctacagaccctataatattacttgactgaagacccagaatacaagtctttcaaggattactctagaaactatataaagtattggtatcatctcccttcatcatatcttgccaaatccaacaggtttggaacttctgtaggaagatttttgtaacatgaaaaatgcgtgttgcaccttccatatccagcaaatacaccatcggttttttgttggctgcaccaatgacataaaatgatttcactgaatagggggtgacccagaatggaaatgtagagcatcgaaaataaaatcaaccgacgcagtctttgcagcaaaccatgtggaaacaaatttaaatatggaacatactctttccaactcatcttcagatgttgctttaaaatttgtgcaggtgaaaaaaaaatctttattttaaggtaactcaatcttttaccattggagagaatagaattatttttgtttcctcttgtatattcccagttgtttaaatgttctctgtttccttgtgtggacacataaatccaaatatatctaatatcaaggtatttaccatatgcagcactttttcctcagatagttattttttgaaatattcaaatagcttacctgtatcatcccccccatccttttttttttttttttttttttttaagacggagtcttcctctgtcaccaggctggagtgcagtggtgcgatctcggctcactgcaacctccacctcccaggttcaagcgattctcctgcctcagcctcccaagtagctgggactacagttgcatgccaccatacccagctaatttttgtatttttagtagagacagggtttcaccaatttggccaggatggtcttgatctcttgacctcatgatccacccacctcagcgtcccaaagtgctgggattacaggcgtgagccatcacacccagcctaccctattttctaaacgaacaattagttgacttttcttcagttcttactcagaaatatctgaccctaggttccaacttttgttttgctctttgcagttagtttttatgtgtactgttagggagatgtgctttttttttaccttcaaatttaaaagagagagttttcaattccttttaagtcaaaatacaactgttctactctaaagctttctttaaaaaaagaaaagtaccaaatcctcatccgtagtaattaattttgacagtgtaggctcagtagtgattcacaaacctgtattttgtgcatcagcattccttattattctaattaaagtggaacattgtgccctcgctaatcattaatgggttttcattttgtaaatgacatttgcagaagttaaaacagcgagttcatgtgaagtccacaggcaacggtgttgaaattagcatcaccatagcaacagtcttccatcattagcattcagggcaacaggaggtgttttgttgtgttttgtttcccaaaaaaagaaaaagaaaaaaacttcaaaggtaaagcctacagaaactctctcagaagatatttatgttccttgtgtgtatgtgtactgtactagacctctaagtctacatagaattttttttaaaaattgcaatgtggatcatctcctttccagatttgtgttttgcctagtatactagctaaatttcatgatctttctccagctgtacacgtctgacctgctgagcagcatttactcattgccaacctgctgctcaccaatagggtttcctacgtggatgaagagagtctgtattcatgaaaatatttggttcaatctaaaagtattatgtgtattcatgagtttttaatttaattcatggaaaatagatttatgctgttagatcctctggtgaactcatttagtcatgttgtagatataggtcaatgattattctcattcatgtttagacggaattaaagaggagtcaaatagagaacaatattatcttaactgagtctctggcagtggtattaccactattactctgtatgtgtgtgtgtgtatgtgtgtgtgtgtgtgtgtgtatgtgtgtgtgtgtgtgtgtttgaattctaatattctgggaaactttaaaagtggcatatctagcacttatgtttttctcagtactaaaatgcataaaagagcaccatattgacctaccagctgcttctaaatcacaccagtagtaggtaattatgaaattcaaatgaagtttaattttcatttattatacaaaaatgtcatagctcaaacccagaagtgttacccccaagcttggatatagacaggtatgtgtgtacattttacttttcaagatgaatcatagcagtcttctccattacatgtaaggactagaagttgtacattccactcaggtacctaaaggcaagcctgtgctagcccacactaacaaagcaaaatgaagcaaaggatctatctggctttcaatcagggatgcatctatgctatcatcagctctgtcacataataaatgagtctatagataacttgaactactcagccaatgggctgtaacccagtgattctgtggtattgaaaggcagcaacccccagaagccacatgtctcagtgtgcactccaggactgtaggcccatagaacttgtatgtatgcacacatgcatatgcattccccacttttctaatggcgatccaatctaggcctaatccacagctagtccagaaaagaacttttttaggttttctgtctgccatcactttgttgagaggcagtacaagccaagcaggtgtctgtatttataatatgcacaatgttaggataactcaaactcataagggaaagattaatggctgactactatgaaaaccgcttctagccttgtgataccagcacctactatcttcctttttctcttatatgatgaaaagatttcaatgttggcttttcattctgatagaatgtgcaagccaaaatctaaataaagtccagtggcaatgatccccttaaacattatatctttcttctcgatatgctgatgttttcccttataaaaatctatgtaagtttcaagatttatatgacagacaaaccacacaaacaggaggtccctcacattcactactagtcacttgctctatcactctgggaatagcggtcttcagattgcatctctactctacctcttgctcttttcaacccctctcctcttttttagaccatacagggcatcagacaaggtttagtttaccactaaactttgggatttggaagatggtgtataaactgatacaggtagtccactcacagatgtagtatataattacagacttgagttttcaggggctcttctccagtttcctgtcaatcaatttccctggctgagacattagcatttgtcagtgaccatgcttactatatacatacacaattgtgtatacacaattgtaaaattaaatacgggctttagaagagattattttttcttaagagtaggttactctataaatgccaaagcatgtgttatgacatagaaattcaaatgactaagaatagctaattgtttagaaacatcttacttgatgtctattgttccaaaatttgatccaatttagagtggtaccaatccatggtgtagaatataaaagctaaaggataacaaaaatcctaggaatctcatgccagtaagaaagttctaccagtcagatgagatgttgagagcatttatgacttggcatcaggaatattataagtaaaattcatgtgagcagtaattgcagctatgaaccatgttatttgttcccacttgtccaactgtaattctttcacttagctcagagtagttctttgtaacattagggcccactcatctgcctttaggtagggttttaaaagatgcctagaaaatagttctgtgctagaaatcagagactcttgacctactgtaaagggagcagtaagcacgtttcctcaggagaatctttctacatactgcagattcccataaaaatctttgtgacaaaattgcctttactgaaaccatcatccattggattaaaaaatagcttaccattagctttttgaaaatagaaaacgttgagccttttcaatgatactttcaatagtttttcacaactatgagtcctcaagctatcagtcttatttttagataccatacttataagatagttatagaatttatagagtatggtttaaaagactattcaattatagagcaatcattcagtttattcccatggcagaagtaaatggaaaccactccagatcaacaagaatctactctcttctgattcagaaaagagatttcctatcttttcatgaataatccatgttcaatgtttaacacctcaggaagattttcttaatagcttcttctggtcataaatccttggtctgtcatcagggacatattgaagagttagttaccaaagttcttaatgtctcccattgtaaaaaaaaaaaaaaaaaaaagtcactttttggattgtttctttcatagagtccatgcttctgtacgcttaatactttagcttttgacttcaagctttaggtaatgcaaatgaagctattacatcaccaaagttaaatttttcttgtaagtatattctcaacattcacaattgagagctgcctcttctttggctggtataaggttttaatttattgtagcactttcaccctagaatggcaaaaaatgttgaaatcaattccatatatcaccaatacaaagtactaagtcaaggccgggtgtggtggctacgcctgtaatgcaagcactttgggaggccaaggcgggcagatcacttgatgtcaggagttcgagaccagcctgaccaacatggtgaaaccccatctctactaaaaatacaaacattagccaggcgttcatagcgagcgcttgtaatcccagctacttgggaggctgaggcaggagaatcgcttggacttgggaggtggaggttgcagtgagccaagatcatgccattgcactctagcctgggtgacagagcgagtctcaacaaacaaacaaacaaaaatattgaattgtacaccttaaatgggcgaatcgtatggtatgtatactaaatgtcaataaagctgttatatgaaaaaaaaatgctaacacacacattctgaaagtatattaaaagcaaacctacggccgggcgcggtggctcacacctgtaatcccagcactttgtgaggccgaggtgggcggatcacaaggtcgggagatcgagatcatcctggctaacacggtgaaacccagtctctactaaaaatacaaaaaattagccaggtgtggtggtggacgcctgtagtcccagatactcgggaggctgaggcaggagaatggcgtgaacccggggctggagcttgcagtgagccgagatcgcgctactgcactacagcctgggcaacagagtgagactccatctcaaaagaaaaaataaaaataaaaaagcaaacctacaatgtctcttacaaacacaggcaactattcaattccgagtttacactactgaaacacacatgaatatgacactaagagaatcacgtggatctgcactcttcaatcaacactacgtctctgagcacaagaattttacatctgatttccatttggggaaatagattcagaatgccataaaccagatacttcttgccttcctttagtggtcatttctgccattatcatttaagggaatggatctccttctcccaaaactgttaccctaagattacaagcttgtcctttaacttatctctgaaagcacacctctataacgggtcatcagtattcagtcagctaattagactgcagaagtacgtttactcaaatgtgaggagataaaattgtgaaatgtaagaggaagaaagaatgtcaaagataatccaacccaaactcttcatcttacagataggaaaatggaagtccaaaaggggaaagtaattttagtaacatggctaaactggtctagaaaaccagatcttctgatacctgatcccatggtctttctaatgccatggatgttcgggtagaggatatattcaggtagataacttatagatagccccatgtgtttgtatagcactttatcgaacactttcacctctattatcacacttgattcttacaatatcccatggaatgtttgagtatcatatatgattattcttattcccacagacttggaaactgaggctttgagatgtctggatctatcttagatcatttgctatggactagaatctgggactaagttgcttttgtctaagctgtgtgtttgttctgttgtgccgtattgttaattcatttctgttggtaaacaacacaaaggaaaaacttctataattatgtttctttttcatcctcaggtcatctatcctactttttatctaagctttggaaaatattatgtgctttccttttttttgtattttcttttcgtagagatggcagcagggggtagtctcaccatgttgcccaggctgacctcgaactccttggctcaagcgatcctcctgccttggcatcccaaagtgctgggattacaggcgtgagccaccacacctggcctattatgtcctttctttagcttgctcgtttaaccatttgtttggcagggggagtcagaactgtgttttacttagtcgattaactgataggacaatttaatatctaccctgcactggcagtaacccccatagccccgctctgtgtctcattctgtgccctgaacaaccttgtcttaaaaacattttaaaagcagcaagtatggggagatttcttatctccatataatacagaagcaagtgtagagtatggctacggaaaacaaccagcaggtgaggctgtgacataacaattttaacccaagcctcactgccacattgaggtatccttgttcaataaatagatcagaaaatatggtgtagtttttccctaacgctgtctaaacagcaacaacaaaaaatcattacccatagtatttcagtaatgtgttgtattgaatgcattgttttcgagggcgttttcaaaaaataagttgattgaatctcttttttttgcttgaagaatgacccacattcagaaagtatacagatgaaacatgttcagctcaatgcaattatcacaaaatgaatacacctatgttcgccatctaggacagtaaataaaacattatcagtagccctaaaccagattacacacacacacacacacacacacacacacacacacacacactaaaccagactacacacacacacacacacacacacacacaccgggttgggggagtggtgagagagagagagagaaagcgaatattatgttaacagttggggagtctaagtgaatggtttatgggtgttcttttaacatttcaattggtttaaaattttcaaaatgaaaagcttgaggagaaacatagaatataaccactacctcagaaatcaccaccctacctcacccacattccctctcccaatcactattcctccctcatcttaaaggtaactgctactctgccttataacactatggttgagttttgcctgtttatttgaactctataaaaatggaattgtacagtatataaccttttgtatctaggactcaacattgtgtttatgagattaactcatgttgttgcatgaatctgtcatacattttcattgcaatttgatatcccatttaaaatgtatactataatttatccattctattgttggggaacattttggttctttccagtttgaagacattatgaataaggcctcctatgaacattctttaatgcgttttttggcacacacgtgtgtacaactgtgtttggtatatactttgcagtaaaattgcctatgttgagggtaggcatatgctgagctttagtagatactcctggttttccaaagtggttgtaccagtttacaccatcattagcagtatatgaaagttctagtagctccacatctcaacaatacttgatacttgttagtctttaaaattttcgccattgcagtgagtgtgtgagtagaatctcattgttattttaatttgcaattgtctgattacttatgaggttgaatatttttacgtgtatttattgaccattttggatatcctgttgtgtgaagtatctattcagtctcttgcctattttttttattgattcatccttctttttcttattgatctgtaggagttttttttacatattctagtttgtagccctttgtaaattgtatgtgttgcaaatatcttctcccattttatagctttccttttaattaaattgtttttttgattgatagttcttaactttaatatagtccaatatgtaaatttttccttagggttaattcttttgtgtcctctttaagaaatctttcctaatacaagataatgaatgtatcctcttttattatcttctagaaacttactattttttaacttttccatttagatatatagtacacctggaattgaccttttgtgtaatatgtgagatagagattgagttttatttttcataatatggatatctagttggcccagtacttgatgctaaacattcatttagaattcatttgatagtatttcctttagagttattgcatctgtgtttattagttatattggtctgccattcttgtcaaggtttggtatgtggattattctggtttcataaaggcaagtagggaagcattgcctcttctagtctctggaagagtttctttaagattggtatttctgccagtgatatgatttggccttggaattttcctagtgggaaaatttataattacagtgtttatttcttaaatagtacagggctattccaattttctatttcttcttttgtcagtgtcagttgacttaaagcacactaagatactctaagattgctatggtcagcctttgctggtctaaaccagaggttgcaaactgaaatgccaacagaggggctagcctgctactgtaactgggcaaggctagcgaagcgtaagttaatgggagctggtagggactatagaatacatgtgccgttatagaatggtggctccggaaagttattgtcatgcaagaataggagcccagcatggacaaatcattccttttaaatgagaagtcagaaggttggattattctgtaaaatatctctgaatatttaaatgttgagtaattcagattaaaaaaaaaaaaactgtgtgggctaatcaaaacatttgtgcatgccaaatttagcccaaagtctgctagtttgcaacttgtactttcaactaatgaaaagcgtaatagcacagatataattccattttcaaataatataattcatttatagttgacatttatttaatttacacttaaatatgaatttgtcatttaatttaccatattaaaaaagtttagattttaagacatccaagtctgcaaataactagaatattttcatttactctcatgtttgtgtacttatttttccttaaatgttattttcatgatatacttagtgtcttgtggacattccaaaaaactgatttgacttaaattgtcctcactccaagctttaaaattgcttagttcatagcctaccttgcctaaagcaaacctggtagtctcatttcaagttactggattttttgtttgtttgtttgtttgcttttgccttgtttcttttcaaggttatatagagtgaaggaatatcagacttcttttaatttttgcagggaattcagattgctgtggattaagatcctatatataagatgcttaggatagaggcatcatgaatgaaaaattattcatatgaacacactttttagagtattatttttattcattcagcaaataatcatagctgccatactaggcaggtagggaccatgaagactactgtccttgtagtctaaagtcttgtagactaataagatatgtataactgttaaatagtacactgaaaatacaaccttaaacaatcaaaatatttgcaaattgtatttagttgacatgattgcataattgtatttatgtgacaattatatttgttattcacatatttagggagtcaatatgtacttaaggtaatctttgagctattttcaggatgaggtattagctcattactattaatactaccatcaccaaatgcattacctacttatctgcatttccaggaaaaattcaggaaattaggatttttaaaataataaaataatagtaaataagactgggcatggtggctcatgcctgtagtcctagcactttgggaggccgaggcgggtagattgcttgatgccaggagttcaagaccagcctggccaacatggctaaaccccatctctactaaaaatataaaaatcagccaggcatggtggcgtgcacctgtaatcccagctactcgggaggctgaggcatgagaattgcttgaacccaggaggcggaggttgcagtgagcagagatcatgccactgcactccagcctgggcgacagagtgagactctgtctcaaataataataataataataataataataataataataaacagaataataacctaagtgactatatttgatatatagttaagtgatgtttttgtagactttactaaactaaaaaataaattagcagttatttaattttctagtttataaagtacctacttacataaagttgcatatattacttcatttaattttaaaagaatatcgtaaaatatgtaggatagatttccattttatagtcaacaatacttattatttcaatacattatgtgattttttttcccccagtatcacagtgttagagcccaggttcaaaccagcattttctaactgtaagtctggaagtctgtctgcttactctatgtaagatgccttatgaagttcatagaggagacagctcagtggattcaggcctggtcttatattttgctgttcatcttgttttaagtgttatgttaagcaaataaaacataactttaaacattctgtttacttttaaaatttgatttagagctaacaaaaattagaatttgtactccatttacaacgaacagaacaaccaaataagcaaaattgtatttgcgttgtcaattacaataaataattataatggtatatcagagtgttaaattttgatttttttttttttgagatggattttattttattttttattttttttttttttgctctgtcacccaggctggagtgcagtggactgcaacctccacctgctgggttcaagtgattctcccgcctcagcctctcgagtggctgggattacaggcacccgccatcatgcccagctaatttttgtatttttatagagatagagtttcaccatgttggccaggttggtctcaaactcctggccttagatgatccacccgcctcgacctcccaacgtgccaggattacagatgtgagccgccacacctagactaaaattttatgttcttatatttctttaaggaaagcaaaaatgttgacagagagggttaatactagttatatatacaaaaaacctaaaaataagattttggattattctattatatgattattcatttattgaaaatcataaactaattgaatgactgagagcagcactaatgtgattactttggtaggaatctgtcctccaaagttgtcagttgtcagttattcttagcattttgaactgaagtctatgtaattaagtcacctgttgtttctgacaaaatgagcaaacacacataaaatctcttggttcgtcttcatgtctctgtggcagagaactgaccacattattcagttcctttgtcctttttagacaaaagccacctctacatggccctataagtcttcaattcaaggactatagccgttatcttaatgggattgtacttggttatctgataaattgtcgggaacatacccacattgcttcctttacctgacataaaatttagtcagctggggctcaacgattgaccagctttatcttgcacgtagtgaagggaaggactttcttactcctggatgtgcctaaatttaagcctttgaaaaagattgaagataccaattggcctacctgccctaagtagatgcttcccacagacttaactggtgaagtgcttgtctaaggtagacagaattttttctttagagaggagcaaacaaaaacccaaaaatactggcgtgttcttttgatgttctatttcccaattgatttccgggttcacactactccacaacatcttactgtcccattgcatcttaaccctctctcctctcccgcccccactttttttttgtctgtttcttctgcttccaccgttgcttctgctctgaagcaatcattttctctcccttcaaccaagggtggaattggcacacagtcaattggcttgggagactgcttactgatctgtcttttttgaacactggaatcttgacactggttatcattttgaggacagcctggtttggatatttatctattaagaggaatccttaattggtgtctttgactggagtatttgaaggagtctttaattgggaggttttaaggcaccagaaaagattcattaggaatgactgacctcatgttatataaatgagaaatatttaccatttgctgtacacgtaattgaagcatgattatacataaaagcatataattaaaaaatgtaaataaatacctaaataaataaatgcctataactagcatggcaaaggattctgatatcagctttcaatctcttttagtagagactggacaaatcagaaaaagaggatttatacctgtcctcctatagattatgctttcttctcccatcatccagttttaattgaatctcctcattgtgctttctttcaatcttgagctgcacaagttgttttctcctgtcagagcttttaatacacattgacaagaattattagtctctatctgcagttgttccaagtgcaggtttgaaataaggagtcgtcatcaatgtgctaacgcgtgctacttttggtatttatacaaagtgcctgctgccagttacttgccacttagaatgtgtttttcttttcctctcttgcgttgtgggagtagaaggattctctgtttcttttggcagacagagaaattttcagattggggtctaatgaaagaaataggttccattatacagatgtacagatgttctaaggtcacgatacctcctataatattcttatgtgaaacctcctctttatgttcaacctgtgtacgttacacttatacatagcaggcatagtagccatcaatattagttactttaaaacccaggcctcctaggctgtggtttgtactaaaacatcatattcaaataaaagcattccaatacaaagtggagaaacagggacaggcatggtggcttaagcctgtaatcccaacaggctttgggaggccgaggagggcagatcgcttaatcccaggaggtttagaccagcctggccaacatggcgaaacctgtctctactaaaaatacaaaacttagccgggcatggcggcacatgcctgtaatcccagctgtaatcccaggctgagttatgagaatcacttgaacatgggaggcggaggttgcagtgagccgagatcacgccgctgcactccagctttggtaagcctcggtaacagagtgagactctgtctcaaaaaaaagaaagaaaaaacgtgtagaaagaaagagaggatctgattaagctcacaggaacattgcttctcaaattttaatgtgcatacaaattgtctgggaatcttgttaaaatccagattatgagccagtgggtctaaaatgagacatgatgttctgcatttctaacaggtgatgctaatgctgctaatctgtggaccaaccacactttgagaaggaaggaagtagactattatatttactcattcacttgttccatgataactcttaaaacagactggtgactttaatacaattcagagcaccaaataaagattgtcatatgccttatttttaacctatcgtcttatatcaaaattatctgataaacttcccaagtgtgcatatatattgtcattttaaataggtttcaataaaatgaagattcgtgagtaagaatataggaataaatgacattaaaatctttctttataatttatatttctactttcttttgaaagaatttgtagtggcttaaacataagagcacaagatgagccagtgacaggaaaaaccaagtgcatctgacatcttagcttattaggtctagaagacaacctccattacttggtagcaagcggctgggaatattggtgttcaaagctgtgctttcctgaaggcaaaaacagcatcaaaatatgaaaagctttttacttctggcatgagtgataaagatgccgatctgagaagcaggtgaaaaaacttagcttatgcttctaaaggctaattttatataagtgttcttgtccagctgttcttggtaagtccagctgctagttgaacaggacaggtggtaatccctgttcagtggctcattatcacccagaggctttgatctggctaatacataatcaatcagcttctgaatattaatattcttcctattttcatttcacttgttttacctaaatttattttccaaagttccagtatgtttttgttttttaataagatttttgatcatttatttattttgacataactaggctcatgatatgccagctggagtttattacacccctgaatcacaaactttttttcttccctctttatctccttacaagatccaaattgcaaaacctaaggataaagttctaattttggaagcacaaaagactgaaactattttagaggagagcgttaatgaaaatcaatatctaaaatcctcattttaagactgtgaaccctatagtctatacttctagtgtcttcagagttgtgatatgcatacattaaggactaagaaacatttttttaaatagtcagatttgggagcattagatatgtttgtagagggaaaaatcaatttatgataaaaattactgacaatggtttaatttgtattagttttgcccacttccctgttatctcagaatggcacctccatggacagtggaatggtcctaacagcctaaatatggtaagctttaaaaacagatggcttggggccattctgcttattatatcattgctttcaatagcataactgttcttctccaatggccctctttgttgtttgcttcattactggcacatttctttaatatgtaatctataacattaacatgaaaatggctctcaaatactattactttctccatctgtgacccagtactgtttatcatcatctaatgatcattcttattgcagatggccctctttaaatgtttcagaatagcattttaaagacattgagggtgcttcctacgtacattggcagactgaatgttttaatatcgaaaatctcggtctacacgatgtgtgataaatgactggagatgcaaggcaccagtcagttccaaagcaaggtgtaagagggacaggaggagagtgataaaaaagaatacatactttgcgtgtgtgggtgtgggtgtgtgtgtgtgtgtgtgtgtgtgtgtgtgtgtgtgtttaagccattagatttatctttaaggaagcattatctttaaggaaagttggagtaggaagaacaaaatttaatcaaaagaaacagttcttggccagaggaggtggctaatgccggttatccgaacactttgggaggctgaggtgggagcattgcttgaggccagcagttcaagacctgcctagtcaaggtagcgagacaccccacctctgccaaaaaaaagaagaagaagaagaagaagaagaagaagaagaagaagaagaagaagaaacagttcgttattgcagttcttaaagaaggagtttgtgtttcctttctgatcattcaccatggcagtgatacaaaggagtgatatcaaattgataaatgagttccctaaggctcaacatatactaaatgcctatgctgaacttccaggtttcaagtccctagagcctctctgtctgaagatcctatcaccaaggattctttgtcttcatctagtactttctttctcctctctctattctttcctcatttgcggatgcttgctggggcctgtcaatcaaacatagatgatccctgacttacaatggttggatttaggatttttttacttgataatgctgcaaaagtgatacacattcagtagaaaccatacttcaggtatccacacaacccctctgtttttcactttcagtacagtattcaataaattacatgagctattcaatgctttagtataaaataggctttgtgttagatgattttgcccaactgtaggctaacgtaagtgttctgagtaagtttaaggtaggctaggctgagctatgatgttgagtagattaggtatgttaaatgcatttttgacttagaatattttcaacttatgatgagtttattggtacataacctcattgtaagttgaagagcatctgtatctgggttggagcagaagtattgctagtaatgcatccatgagtcaactgtttgcttaattggtatgctaccacacatgtcttgagcttgttcatcccatggcttgccattgtgttggaaaggaaggtgttacagcattgccgttaataacatttctaaatgggaccaaaaacagtattttctttatctgctagatctttttattttcttctttctctgtatacgtgagctgttcccaaaatttagcacacatgttttatgattctcaacataacgtttatggtccttaacattaatctcatattagaaaataaatcatgatgaaggtgaaatatagaccaagcaggggcagttatgaggaccaaatcgtcagtataaaacttttataattaatattttcatgaattgatagcacttgcttcagagagctaaactcagaaaaaagagaaatattctaacctgaaaatatatttttaaaaactcataatttaaggtagggggcaagtagatttggccatattttgggctttcttcaccaattcagacacgataatgactacatttgtatcctagatttaaatttgctagatggaaaagaaacacataaatataaaccccatctgcgcaaacaaacataaccattcacattcttatgcaggattctggggtaggggagggctttttttgtattataacatagcatgttaatttttaagataaaatggaaatatttttgtgcttttgttaatttttatgttaaaaatgacattttaggcacctaatcaaattctctgagttctttcactaaagaattttgcctaatatttgattaaattcattattattaaagatcaatggaatttctttcagtttgaaaagttgaaaaaatgagttgacacattgattcatagaaaaagttatgaaatttgagaaaaattattgaaccaattttatttaaaatacatatagatattatgtgtatctgccttcattttcaggataatgaatgtcagtgttaaatgtggaaacattctaaaattggaaatcagactccacttggttcaaagaacaccttattttagataagccttttaaaataatgattgaaatccagtcaatccataccctcacacataatcctcatgcatgatctttgtttttccctatctctcctctaaatgtcctttacaaagatgagaaatgttcttcccaacacaaaattcctttgattgtatattagaaagaactgacactttgcagcaaggtttaggaaaagctaacgtaagtagagcttctctgaaaactgttttaccaaaacatactggatttactgctgttaaataatggatttttttttttttactatttatatttgctcctcattgaaacttgtaaatgactttattagtcttaggcaacacatttcattttgcattggataaagatgcttcttcagtaaagtgttcatttatagcattgagaatcttgaaatataaccggtgtcatcaaagggtaggaaggtagaggcacagagaagtgattaatcacttttccctccaatgaatgatctactgtcaagttcaataatcatatttcatctataaagagcactttgagcaaagcctgttttgcacacgtcattacatttgattacaattaagtataaatatatgcctattatttagctctagttaaaatctgcaaaaatatagaaggcttgtgggtgatgtaaattggagatttgcataggtttagggtacaatattagaaaacactgtagttttatttttgctttatgactaaaaggcactagctatgttatctcgtttgttcaccaaactaaaaaacaacagctaaaaagcaatgtaacaaatttcctctaaccttcttaacccatccactgctgtcgcatgactctcacaaatcagaaataaagaaccatttctctactgaaggtcatcaactcatttgagggccatagatcagtaaaaaataacttagtctgagacattcaaatcacttgctttttaggtaaatattttggcttttaaaatgacacaaatctgaccaaaatgttactcagctttatgggaacgggattcttttctagataatcttagggacgatcttaactcatattgtttttgttcagagactaggtctaatttgttagaagtgctgccatgggatctcattctactcaacaggagtgcattcttcttatccagtatccactaaaagtcactcctcctcccatgaaaagagttgccagtggaaaactcagagaaaacatgggaagggattggtgatgtcatataaggagattagaaaacatttttttaacgtttaaaaagtaaagagatgaattttaaaatttacaaaccaataagtttgatgttgatgagcaacaaaatcctggaaaatgacatcgtactgattattaatgattacataggataacatgctgctgggaatcagcgtgatactctcaaaatctgccatgtcacatgcacctcattttcattttttttatggctgcttgatggttagatgagaagactgttagagacagcataacttaggattttacaccacatttttcaagttctcttttgagaatattgggtacaagataaagaacagtggggctggctaataggctgaatttgaagctgattaaataatgacatctaaagaatgtcaattaatagatctagatcaacacaaaatagagtctctgtcgttggccctgcctttgcacatggctgtttcttcttcagtcatctcttaagctcaactcagccctctgcctgaagacctcatttggccagttttgcccattcattactactgtgaactctcttttgttatttttttcctgttttattctgagaatggattgagctagatatgtggaagttatgggaaagcatattttaactaaatattaaagaaacttttgtaatcgagctctccaaaaaataaaatccgccactttgaaaagcattaaactccctgtacagtagattttcaagactgaaatgactgtctcacccctaaaggcaatttctgtattggatgagaggatataattcattaacctttaaggtcacttgtgaatctaatgttttgatattttcggaattaatcagaagggaactgacagcatgacctgaatctgtcctatatttatgtaaacatcctgtgtgatgcacctcattctttgtgcagttgtatgcatttttgaatgttaaatttgattttagggcaaacgcttttttaaaaaaattttaaaataaactttattaaataaaaatttacacacagtaaactgcctccatttaaagtggttcagcgatttttggcagatgtgtacttgtgaaaccaccactgcagtcaaatgacagaacgttcttactcccccaaaagcctccttgtgcccctttgcaggtcatttttcctttcacccctgattctaggcaaccactgatcgtctttctctcactgtgtattactttgcattttcaagaattttctataaatagaatcatacagtatttttgtatgtatctggtctcttatattcagcataatgattttgtttccagcttgaggatattatgaataagactgctaaaaattgtatacttgtttttctaaataccccttataaaatcttacttttgagaagcatattactaaaataacttcccaggttatatgtgtatttgttctttctgttcatttcagcattatcttattaacaagcaactggaggacatgcaccaaggataaattgactaggtgctaactgaatttgtgagaaaggcctagtttctaacgttctttcttgggagcagatgtgtaacagctacttttgctgtataacagaccaaccccaaaacttactggcttaacactgaggtcagcaaacattttctgtaaaggacaacatagtaaacactataggctttgtggagcactttgcatctttgttgcacattctttttctttttacaactctaaaaatgtagtcatacttagctgagaggctgtacagaagcaggccatagaccaaatttgaacaatagttcataaactctataacacaatggccagccatttacttagctcactatttgatgggtggattgggccatttatgtggtgtgaccagttgtactactgtttgccaggcatgcttatgcatctgtagtcagctggcagctggataagctatcgtgacctgactcatatgtctgatggttgacaggctgtcatctaggaacagatgcaactaggtttgtgtgtatctcatcatccaacatgctagttcaggctagttcacatggaaacttctcaggtttctgcttgtgtcatgtttggtagtgtccattagccgaagcaagtcatgtcatagggccatcccagatgtaaggagtggggaaagactccacctgttggtgggaagagatacaaaggcacactgcaagagctggacaccaaggagagggctagaacttttggccatgttgcaagatatcacaaaatattcaagaaaagttacaggaaggttcctctgtggactaaattctcttctgaatttagatgtaggtaaaatggagtgtgctgttaaaattcatgctttgtgagtaatcattgctaggctaaactgtttgtggcttcacagccaatggtagacatacagcatccataatctagtgcttttaaaaatataagaaatactgattacaaacatagttaaccacttattagtactgggaatttaatgaaagctgctgtgattaaatactgaaaaaagaaagattgtgggtttccttctggtaactttcaaagctggtcactcttttgaaaggaattttattcttaaagctgttatttttactcataatatgcttaatacccccatggctgcagactgtctaaaatgttcctacaattatatgagaatacttttaaaaatcatgataattatcagtcttcatggacacttattcagattaatttccccaagcacttaataggatgaatttataagcattaaatagaatggggaccatccagccctaaaatgtgaccattctgtcaggcacacacttgccaatttgttggcgtggacctgagcacactagcaaggactttgaattaggtctcactgcaagatggaagcagaagggcatttctcagtttatgttttgaagtgttttgttcagacaggcaacgtgcagttgtgtatagtagtgtgagctacctgttactccccttaacaatacttttagcagcaatgtttttcctcctgcaatgtgacaatatcaccatgccatttggaagaaaacaaaaaggctgagtgattcctggtatactcccaaacagccacccaaacgaacagctggcagagaagacaccccctaaaacttggagcagattctcagcccctgcagcatctcatgtggttagaacttcagacttgatgaacgcctccccaacttgctccccctcctgaatcttttaatcctcctccagtctcttgtaatgttccagcccttaccagggaataagactgcaaactgtcttccgtcaacttctttccaaatcctagtctagagaaattataatgatgcatgattgtccagtgggcatgtatagtttgtccatttctttatgtagtaaagcctgtagctttcatcttttttgccaatccactataaaaattaattttatatgtcatcctggtacacacacacacgcacacacgcatctatatctgtaaatctttttctgtctattcatgcttgtatgattgaaagaaaagtttcacaaaacattacttacccataccaaatagtacactttcatattttttttttttttttaatttcaacttctattttagatacaggaggtacatgtacaggtttgttacatgggaacattgcatgatgctaaggtgtggggctcatgacctgttacccagattgtgagcatagtacccaataggtagttttataacccattttccccactccaacctctacactgtcatattttctattcttttctgtttcattaagaacaatactggtaatgatccactatatagatttcatgacgtactaagggttcatgacctgcagtttgaaaaacactgtagttagttttatctccacctcaggccaggtcatcagaaagctgcattcttagaccactttgccttggcccccataagattgcctcaactcaggtgtacctcggcatcatgttcctggcttatgtcgaggggcactgaaaactgctgaagggatttttctgaaagtcgacaccatgcagtgtctcccaccttagatcccatgcagatctgtttattcaatctaagtcattccagacttggattttcctttgtttcacttacactctttcctccttatcaataatccaaataataaaatcgatcatatttccttttatattttttcttttgctttgacatctacaaaggccacaaccaaattatacccaccttttaaaacacttttttactgaaatatattaggcatgtagaaaataagggagatgctggttaaaggatatgaaacttcggttaggaggaataagttcaagagctctattgtacaccatggtgactataggtaatgaaaatctagtatagtcttgaaaattgctaagagagtagatttaagtattatcaccataagaaatgataagtatatgaggtaatgcatatgttacttagcttggtttagccattccacagtgtatacatatttcaaaacatgttatacatgataaagatatacaatttttatttgtcaattaaaaaaaaagaaaaaatggcttaaacttatacagttcagtgaattttcacaatctgaacacactcatttaaccagcatccaaataaagaaacagaacattaccaacctttagaaggccctttgtgtgcccttctgatagttacctgtcctccaagggtaaccacaatcttgattttgaacaccattaaatattctggcctgttcttgtcctttatataaatgaaattgcacagcatgtactcttttgtgtctgacttctttaaacctggattcatccatgctgttgtatgaagtggtggattgttcattctaattgctatgtaatatcccattgtgtcaatatcctgcagtatattatatactctactgtggatgggcatttggtagaaaaaaatgatgttataaacattctaagacatgccatttgatgaatatatgtatgcattcctttgaggactatatcaaggggtagaatttctgggttatagggtctgtgtgtgttcagcttctgtacattcttccaaacagttttccaatgtggttgtaccagtttgcactcctactaacagagcatgagagttgtagttgctccacatcctttctaaccctgtgttgtttgtcttgctcattctggtgggtatgcatagcaaaattttcataaccacatcatgcactgtgatcttcaaagctgtgttctggctgggcatggtggctcacacctgtaatccctacactttgggaggccaaggtgggctgatcactagaggtcaggagttcgacaccagcccggccaacatggtgaaaccccgtctctaccaaaaatacaaaaaaattagccgggcgtggtggcaggcacctgtaatcccagctacttgggaggctgaggcacgagaattgcttgaagctgggaggcagagtttgcagtgagccgagatcgtgccactgctctccgacctgggtgacagagtgagactccgtctcaaaacaaaaaacaaaaaacaaatctgtgttctaaattttcctcgcttcttaaagttttatgctatttatatttccttagtgctgggttttattaatttttaagagttatacattgttataagttgccctaaagcctttacagaacaatgcacagtataaatatgtacatagtatatacacaaatatgaatccatgaatgcacagctaatagggccattatcaaaaatcctacacttttccttttcctctagccctcacattcaattggctcaaaagtagcattgattttattctataacctgtcatgaattcagcctctccacaaattcccagtgctcctttcttagttcagactttcatccactcttaactgggctgttgtcatcatctacttggcatacatttccattctgatccctaccctcttttccacccttgtttcttcccacctcaaatttaattctattttaaaaagaaagatattcaaaagtacaggtggtgccaattttttcttctctatccatcatatgcaaagaggcttccaattctttgtcgacctgtttctaagggatgagagtaggtcaagctgtgaggacttcaattcccacgtgaaggtcttgttcatattaactcaataatgtgctttgatgtcctaatggggaaagtagtattttctgccagttagccttcccaagatatcaaatccaatattggccaaatacatttttgaattcctaaaaagcctaaactgatgtcgtaacacagctgtatattaacataaaaactctgtaccttagtaaattattaatatgagcgattagctcacagagtcaatgtaagaaacttgtttcaactcttcatattctagcaaaaagaacacacacacacacacacacacacacacacacacacacacacaaaacctgatttaagaactaactaggtgattaaagcctacttagtttttaattgaagtgcatattctctaatcccaagaggccaaactaatcacctttccctttttgctgctttttttctctctatttctgtaattattataatctgtctgatactgtgtttagctatatatgggtctatcttctctcattagatcataagctccttaaggaaaaggccatatttccttgggatcccacttaaaaaaaaactggattacaatgttgaaatttttatatatttccatgtcattctccaaacactccccagtttttaccaaccataaagaaaaaatgagaagagtttaaatgataagcaaatacatatgtaagtgttccataaatacactatgtttgaagttatttaaagaacttaatataggataatatttaatagagaaacttagtctagatagagcacataaaaaacattcttggaaatttgtggataaataaaagttccttgcatctgtattttcctttcatcttgaaaacatgccttgacaaaagtaagccagagctggagtacaagattcagacattggtagatcattaattggttaaactggattttatcttatttccccttttatggatccctgtctttgtgtggaattcctgccacttgctggctgttcaaggcttgccaccaggagactttctccatcaagctaggggatatttctccctcactgtcccccaccaaatcaatattcacttgctctctgactactccaggtttctgctgtctgagaatatgaacatggatataccttttaacatgcgtgaatactattcatattttaatctcggccccactgaatgatagcaaacgctgtgaattttatgcctatctcaggctacagctagtgccttatcttgcacacacacaaaaaaaatcttacttttcctacttgcttccttcttaagtgtaaaaagcaaaaagaggaaaggtgccttttgtaaactgctaaagagcagtttacagaagagcagtttactaaactcagacctctcattttccctcacacgacaatctaaaacagaatgttaaagtgaatttatttggttctgtatacctaactattcctgaacatactgagttctcttttaagaaatcatacctgcctgacaggctgctttgcatgaacacagcattccccagccttcaaattgctgtcagagccgttgtgtcattttgacccacaatatggcagtattatccacattctatagatgagttaacaaaagcttccaagtggttaagtgacttgcctgtaaagggttaagtgacccacctctaaggggtagaattggtctggacactctgcccctctatcttcatgcctttgctataatacacagctacgcttgctgaagattaaggaagctgcttttgataaagcgtgattcttgtagatattcatctcaggaaaaaaaaaaagaaaaacgctggtgtcttcatctgtagcatttgattattacattttccttatctgtttcaacttaggatgacttccttgttcgcttaattgactggtaattcctttgtttacttttttccaaatctcaagaagcaagtctagagtattaacaatggttacattagcatttaaaatttttttttgaaatttgagtatttcagaaaggggtaatttaggcaggcatgtatgtagaactttgcattttaattaaaaagactcaaaatgaaatgaacctctgacagtaacagatgactacttctaaaagctgcattactacttgatatatgctcagtattttcttgtgggtaagtcctacgacttgtttcaagaaaagtgacaggactaaaacaattaaaaaagacaaagctgctgttttttaatcatatgttcataaataaaactaggttgtgaattgtttccagagaagcaattgacaaagtatgagtaaatcactctaagaactaaagctgcgttgattttttttaatgttcaaccaaacatctatccttgtccaatgatgaattttctttgacaaataaatatttacaaagtatgaaatatagactctgtgcctttcctaaggccaaagcatactgtttaaactaaaatttaattttttttctcacctcaaatacaccaaaataagaacataactaaaaattaattctctcttgtagtagactgtccattaatcttttgttagataatattagcattgtgagtgtcaggtagaaagaaaaactgtaatttctagattgatcagaaaatgtgagtatttatggatttgaagaaaacaataaagtctgataaaatagaattttctgtaacctcccttatggagtcaagaaggaggaatctttcaacatcctcccattttgcagtgaaaagtcttcatgcagtaaatagtttgcttgggtagatcaaagggttaatttacttctgatttgagaagagacgcagacttccctgatttttttacaaaaatgtgttgtgtgggaggaaggtagaggcctcagaatgaattcactaattggggttttcacctgctgtgagtctaatcgaatacaaagccttatttgtagctgaagaggaagagagattatgcagagtgtaagaatttctgcccagttttgaaattccgcttatttggcacaatcggtggggaaaggcagacaaatagttacaagtttgagctgttaaggtagaccaggaatgctgtagtcagatatacttgaaccacattaaccagtgatccatttttagcaggaggtggtgtgggtcatatacatgggttatcgctatagctggcaggctaataggtactccaaattctttcccatgaagcaaccgtcggcctgtgaggttaatgaagtatggctttattttagtgaagatgctaaaattcacatctttttagatgttcggcttgatataggtggctctgtgaagctttgagaaatcttattaaaagaaaactgtgtgagagtgaagcagagctcgactttatctggaacctgtctggtgaaatctctggtttagatggcagctggctcacagagaactttcctgagtctggcttactctgcctccctaaagagacagggcctggaaaaataggcttttgtgtgggtgtgaagtgctctgtgtctgaacttagaggcctcttcatttgctggttaatgtgacctggctggatattcttacatccagaagatgttggtttcagattgatctagggggattgttatatatatatttcaattagtatgctataatatttgccctaaccagcaatgattcaccatacaccaacccatttgttagatgtctgagtcactgttcatggttagtacttgtactatgcaaagaggaatatggaattcttatgtctttattgtatacccaaatgctgacattttactatagaatatgtattcgagttaattgaagtgatacctatactctaaatgaatttttataaagtgatgcaggttatactaaaacttagggcgcactatagatagagagaagctgaaccctaggagttggtgaagtctctcgggaccatccctccaggcaagtacccagttcaaaccattccttgtctttgtcctttcctatgccactctgcatttttacacagctagcatcaggccaacattgaaaccacatgcaacccagaaaggaaaaagatgtgtttgtggaaggtaggaacagcctagtttcagctgttggcccttcacagcctccactagatgggctcattcgaacccaagacccttccaacagtacactgcaaatccatagctccaattcagacatcttccctctgagctcaagactcagatgtccaactgtctcttggatacctgcacttttacatcaccacctccaattcattatgttcaagactggattcatcatctctttcctaaccctcttctgccccctcctcctgaaattcctagctcggagaatgctactcatccaatctttgttgtcactcaaggacaatggtccttaaccttcactgcatattagaatcacttggagagtcttagaaatcctaatgtccaagaccaattaaattagaatctcagggtggtgagacccaaacatctaaatttattaacaatccctgagtgattccaaagggcggccaagcttgaggactattgctttacttcttccctctcttccattcatacatccagtcagtcaagactcctgtagttggaaccttattgtatcatttctccacctcctctgccactgctgtaattcagatcctcctcatactgcaatctccttgtacctgatgtctgaatttcagactcttgtcttctgatcaagcccccataccattgcctgagtgatttttctaaaagacaaaccggacagagccacactcatgctttaattctttcttccttaaaaagctccctcatacctttcaggatacaagtcaaactccagattgtcacactaagccctttccagtttgcccatttctctaacccttatcttgacattctctccaaaagatcaagcagaccgttgaagctcttgtaaagaacaagctggttgcatcctttttaccctcacatctgctgttgtcaccatcataattgttgatatgcctttaccctcaaaaggccagaagctctttgtgggcctacagaggaggcttctctgaatatttatccaatgactgagtctcatctgctttttagccccagagtggggggatctgactttctcctctatcagtagtccccactcagcatcaagtctattgccccagagggtggctttggctggatgggtctcagtttggtcagggtcctgggagaaacagatggtacattcaaacggaacacttgaagagagtataatgaaaaggctatttacaaggctctaggcaggctaggagaaaaaaaaaaaaacaaggaatggtaaacttttgcccaaagggataaagggaggaatggtttgcgtaactggtggaatgctattgctgtaggaaaggactggccaacaagacttgtggctgcaggtcaaggaactcagcagctgccaggccagagatcagtaggagggaacctgaagaataaatacccaaacatcaccttcctcctgtcctttcctctccttctgtaggcctttcatcactgcctcccaattggctgaaagcaaaaggaagccaaacggcaggaaagcctgattgatgtccccacagaggtccaacctcctgggccacagagcagaatggagaaggacaaagaatagagatggatgggagaatggggaagcatcctgcacagtcccttaggtcagagatgcccttattctctaaagataccctcaaagtttaagtggttcaaagaccagagttttggctacgggaaaatgtactgggtcgccttctttgacctcatcccatttcatttcttctttatctctatttctagcaaatttactcttctctgctctgagccatcagtgagattgtctatgagtatactagaaaaaacacagacctttctcacaggaaaagaagccatgtctcttcatggcagcatagcagaatagctaagcgcatgagtcttcgagctggattccccaattccaatccttgcaccattctagacagtggtactgggaacaagtaggtcatggctgattctgaagtcaaaattttagctgaagtttgttctggtagcagagcttcaggctcttttcatgtccgtggttcatatcaaaacagtaataataataataataatataatcagaaggaggagaagaagaaacatctactataaacaaacaatatattatcatacatggcatcactacataatttacatatgacacgaaggtatatcaattatgttcttttccaaatgctttcctctaataagcaaaattcataatctgactgcaattgaacaacaaaacagtctctgtgatgcccgcgtcatttcttaatactttcagtatttaattataatatgacgtcaagatttgggaacaagtcttcaagtgcctataactccagtctaaaaaagaacttaaagatgtatttttgaggattgccatctgtcaatttttttaaaaagtctgaatagtgatttcttattccattcttttttcttgtcaacagattattcttagtagttttctaattggacactgagaaaagagacttaagcatttatagagaagcgtgtcagaactcctgaattttgagcaggtaatttaaaagtgtaaaacaaacaaacaaaaaacaggaaaggaagagagtgacaaatgtcttactatccaggtgttacaaatccttagtttatcgatttgtaatatttacaaatgtccatgctctgaggcttctgtcttttcgttgaaataaacataaacagtagttaagtgatttgccacactgacacagagattggtgtctctgatttactgcaaagggcactacttcctcattacaggacactaatccctcttccccaaggatcggagcagacctagaatatactattagaccaagggacaacttcagccaaagcaaatcttagtgtgcccccctcagaccgtaatagcagctgcctccacaactcactagcttaaaattgctaaagggcaacactaagtaatctcagtgtatgagccagaatgccagaagaagtgccatatttgcttaaaaatagcaataccgatcatacttacatgcacatatctttagtgataacatttacctttatatttggtttgttaaaggtaataaagaatcctggcattcccttttgcttttgtccagatactttatttttgcctcttttgccatgctatagcattagataaagcaaaacgggtgtgcttccacctaaaacattctagggggaaaaatgttgagcagaaaaggattatttcaaaagaagccggatatggtggcatgcacctgtcatcgcaggcacttggaggctgaagtgggaggattgcttgagcccaggagttgggagaccagcctgggcaacacagtgagacccccatcccttaagaaataaattttaaaaaggggaccacatttaaactgtagaccgaagtggaatgaatcaatcggaaaggagagtggaaagcaaatgtttgaaagaaaataaaaagaaaagcaagccaacaaaataaatggacaaagaagggcagtgaaaatatcactaacagtttatcgtaagatgctctttggatgctaatctaaggtgttatgtgaagtttgcagaaaattcttgtgctaatgaaggctttcttcttcttttgagtatttccaagcttgaaataattgtgtgtagttaacttctatcatcatactgcaaactctaaaattagaattatttgaactgttcaggccctgtaacttttccaataaaatattctattagaaacaagttccttctagatcttcctaaaagaatactaaaggaccaaaccgtgcaacagcactggtggtattgtcttaatttagagagtccataccagtgattctcaaacattagtatgctcagagtttctggttcaataggtctgggccgggcccagggaattttcatttctaagaagttcgcaggtgatactgataactgctgttcccagggtctacattttgagatccgctgctatgtcacaaatccaaatccaaagtctttttaacaatcccttttagcccaggatgagcctaacggcaatttcacgtccttatcgccggccactttaatcttcaactgaggaggaagggagagtgagaattatgtatataatttttttcttttattttttaaaaagaaaactccaagcccacactcttaattatctgggatgaggtcatttgcacctgggtcatttatttagacaacaagtagtcttgctagaggctttaaggaggtgttagcagagcggtgtgtggcttccaggttcctgggtctaccttaaatccccatcctctttctttctttctttctttctttctttctcttttctttttcctttccgttttgaaagccccaactgcccagtctctgggtgtccgggttcccaggtccctaggtgggggcggagcccgacacggccccgccccgtctgcccgcagcgccccctccccggcccgcccgcgccggctcctccgcagtgctttcagctgtgagcttgggcggcggcggcggcggcgctccactttcggggagcccggcggctctgggaagctcactcctccactcgtacccacactcgaccgcggagcccttgcagccatgagggaacagctcaaagggtaagtggatcgcggccccggccccgtctgatggccgcaatccgtgcacttgtggcgcgagcagggggcaagctgaggcggtcaaaacttggacaggcgcggcggctggacccggggcgccgggcggctgggcgtctaggaacctctcccgcgggttcccgcggcgcggctgcaggtgcgcccccggggtttctccccaggcgccgggctagtgggggaacctcttccctcggctttgggacgggctcggagagaaaaagctgatttctccccgtccccagaggggataacgcgttcctcacgcggggattggggccgggggagcttttcactcctttccaggctgccagtgtggacgtgagcaaggctggctgttcctaaatcgtcgctcttactcgtagaaggaaggggcgcacgcggcgctaccttccattgcactgcaagtgccaaaaggtcaactttctgcctgatttcttccgaggattccaactgacatttccctcgctgcattttctaccgtgctcattccatgccccaagacctgcagaaatcaggaaagaaagaacaaacaactaaagcccagaagtcaaagatttcagggggtggggatttttgtttgtttgggcttttttttttttttttttttttttgcccttcgggattgggtgtggagtcatttctagggtgttctctcgcatttctccaggtgtctgtgctcatcttcaagcaaagtttgtcactcccaatcccagcacggcaataaaaagggcagaacactttgcttatattagtcaaatttgaagttaagtttgaagctttaaattgaaggggtttagttgctcgagggaggcataatattaattataaactgtttttacatcatgaaaaaaatccatccgatttaagtggtgaacttttaagtggcgtctttaagtgaaatctacatttttccttgggcaataaactcttcttggtcttctgctttatccctgtcatctctccttgtcacccaccccccccccccccacacccccaatcaacctttctttttttgcctagcttttttattgccttttactcaagcccctctttggaggatacatttgctgttggagaagcgagtggagcaaatgaagcaacacggttatatgaaaggtctctgacccttgaacaccgtggaattggtttcagtcatcattgtttgatctccgattggacacgaccctgaaaagaaattgctttgaccaaagttgagggtgggtaggagttaaaccttgaaaagcaaataaaacggaggacaactaacagctggaacagccaccgaggcaatcatctttgccctggctttagccagacagaataaaatggtaaatatcccagggaacaagaaatggggaactagaatggatttctgatgcttatattgatgcccacccctccaaacccctgccccacggtagcagaaactttaaaatatattttaccatccacaccctgccagtattccagcaatgcaagccaagttcaacaattcagcacgcaaatgccaaggttcctctagaaaaagagtctgatcctcagattaaagggaaatcatttgtgtgtgtggatcaatgggctccagattatatatgaaaccaaactctaatcctctgcaaatcgcaagagaacgctccctttttatattgctgcatagcgattagttttctccctgggaagtagtggacagatagttttttaaaaaggcaactgtttggaatattttcagtaccaaataacaatggtggcagaagaaatcttattttaattaggcaactgccattttcccagccacagcagtagatatttgttactttttataagtgtttaatgtttgtttttaagaaactaaaaaagcaattccaataagtctgattattccagcactgacagcaggaacagctctgaggcagttataataaccttgcacactacttgaaactaaagcaggtgagagaaaatttaaattgtatggtaggaaattaggtcagccttgtgctcagtagagtaatgctttaatttcttattattgacaagtaggtgttgctggggtcttttgtcatagtcgatgactttatattttaatttgcatcagggtcctatcaccgcctcaaataaaagggaaaaagattatcatggtttgtagaaagaagaaggagaggggaaatcttcgtataaatactgctcagagaggcatatctgatgccaggctttggaaccagcagggccaaaatcaataacattttttaaagatgtaaagagcgttttaaggattatttatgaagctgatctctgtgttaatgtacgtacagacttgtgatctatgttgaacattgttgttctcagaaaggccaaacaaagatgtacccattaacatgtgaacaggtttcagaatttcccttttggttgttcatggtatatggggagtgtatttccgatgtggagagtgaaatgcagaaaagagacaattaccaaaacagtgccacccacccttccactccctcctccctagcacaccgtgtttttctatatcgtctgcatattccaggtaaatgtgggctcttctcatggagttactgagaattctctactgttttagaaggcaggcacagagtaagaaacgaagctgtaaaatcggtattgatcacagacaaaaatgtggtttgtccttcaaggtacaagatagatatgagttatgcagatttgtgcttacagtttcatccagtccatattcatagttcctatctattttggagggttaaatgtgtcccagtggggctctggattcatcacaggtagaaaataacaagccgtgaagtgaatatttggttcgtcatatagttaccaaagaatctgaaggttttttggctacgttgccaagcatttttagcattaaatgattaaaagactatttttctcgttttaagaattagtcacaccctttattcttttcttctttccacttgtgctcacttcttttgcttagaactgatttgcaattgaagtgaaactaagactgcaaaggtgaaatctaaatctgtttttctagttcttttgcattgcttagaaataaaaggtttgtgtgttgaaggtgagaaaggttagcttctggaattgtttgaggagttcatttatctatgttattcaagtcccccagaatcacagataactgggagaatagtacctatcaaggactagtatcttaactcacaaatgggcaatggaattgggggcttagaatttcctccttcttccagtaaaggagattttcagttttgccgaggactgatggattaaaaaaaaataatttctaaaacccttttcataattttaaccttcaaaataaattctttaaaaaggcaggaatgtatgtatgccaacagtcatgaaatttctttagaagatggggagctccatgaagccctcattcattctatgtgggattctcctgtaaattgtacacactgtttccctttccttttagaactgtgtttggtacaggtttatttcttgcctatgttcctctaatttgaagtccattccagatggtggcttttcaccgtggttccctgtctctgtctgatcaggcttatcagctcagctaaatgtttttctgcagacctatagaagatgctacggtccttacaaatatcctggagatgggacattgttgttacacagtgtgactagtaagggcctgtgtgagcccttgtacatgtgggcacacatgtgtgtgcttcctctcttcgctcttcctttctccctggtgcttatatcacatctggatgacctttggaaatagaggaggcctgaatgcagggtggtctcaatagaaggtaacctttccttgctctgcacttatatatggaattggtatacactcactttccgagctgagaaatgcctgagaacaagcaacactttttccacgaagctgcaagctgcagcctccttgtgctgtgcatgtaaagtaccagtcctgcctaccccttctccagatcataaaccggcttggtcatggggtgtcctaaaaccccttaaagcatagagaccatatctcctgctcttcttgctctttaagacttgaatgtcactctgttatattccctcaactgataagcccttgttatagtcctcaaatgtgagttgtctctatggaaaagtaaaactgaaataaacgtatttggaagacagtgaaacagcacttcacaagtgaacattttcttgcaaattgatttcagtagccctcactgttcaatcactgactagtaaatattacagggatggtctttgaagttgtacagtttggatgatttccatatgtctttatgaggtttatgattgtgttccatttcttaaaccaacttaaacggttgttttaacttattttttttaaacataggtgataacatgtagtgtgttggttttgctctctaggaagggtctttcttcgccttgattgacttaattacagttggatccacatctatattgtaatcaactaataacagatttgcttttaatagatgacaatttgaggggcacatgataccaaaagcgaccacatattgagcaccaaatggtgccggtcacttacctatttcaactaatcctttaaccctccaaggtaggcaggcttgctttaaatttcaccgccagtagggcgcagagccctaaaattcaaaacatacgctaaggccattcgacattgttgcctctccagactcctctttctgtgtgaggcccctgtactttctggtcctctggaaatgccccagtttaagcgatttctcttttttccttccctccccttcccctcaaaagtttatgaataggctctgcatatgagtacccaaatatcattcagaactgcattttactgtatcaaagcctgtcatgcaatccctgaaaactggaaatatgacgctatggtgatttatgtagatgggccaaagtaaggaaaagtatatgtagttatttctccagggtttattcatgtaattgaatgaggaacaaaggtgttttgttctttttgtggcaggagctgatagccagcaaccacacttcaagaaatggaagacagctgtgaatgcttcattcaggcccaagtaaatataggaagaggtgtagtggtgtatagcgtactgcgtttaaagaaaaaacactctgaaataatgggaagaaggaagttatgatatattagtcaggcagtagatataccttaagctgaaatgaaatacaggtatcatggatatgagatctgtatatgtagaggaaagagtaatggaaaaatgtcaggggcagtgaaagcaaatgagaagtgagatgatttatatttattgaactaatgtccggtatctctttgacagagttgaataataatcagttgtcggtgtcctttctgtagtgttccacattggatgggtgaagaagtcctgatagtcgattattgatcacataacaaggtcaatttatcataactgaagtgcgatcgatttgtgggtgcaaagaagaaacaaattctggaaccgaataatgtttatattgcttttctctttggaaacaaagcagaaaggggcctttctgcttgtaagataaacatttcttcaatacactatggaagcgctttgaaataaagattccgaatggttcaaaagcaaaaatcatgttgttgttattgttgttttcttttttcctgttttcttgactactcattgtaaatgctaaagtctttctttatgttttgtgttttagccacgagactcaaacaacttgctgggaccatcccaaaatgacagagctctaccagtctttaggtaaggacatggccatgtttcctccaagttaaatgacaggtgacctttaggataaagtagtttgcagtgtgaaagttacttgctatataaatacatcactagattgtttcaagggtgaaagcagtggcaccttcctatccaaaattgacagtcagctttctttttatcagaggttccttaaaaacaagttttagaagttgattgattcctaaaaattcaatatacctgagagggcctataggtctttgtagttctctttggtgcctaaaatgatggaaaaacagttgcaatttatggctatttttttttttcttcccacgaagatagaaaactgtttcaggtgcttgttgatttcttccgtgtgaaaccaagacaacccttttgccaaaccacaaatgttgtgtaaaggaattttctgccgtctttccggtgctcacaattcctaaggcctggcgggtcattaatgtgaacatttaaatgatttctttagtatggcttgttttgtgtttatgtaagagcctgacagttctgttttctttcccctcataacttgaattattttgaatgggtacagagcatacaaataagggtttgaaaacaccagtctttttacactggacaaatgtccagatgtctggtttgtcgttttagatctacaaggaatattctgaaatgagttatcttaagttgcagcttgttttgggttttgttttgggacagggtcttgctctgtctcccaggctggagtgcagtggtgcggttatagcttattgcagcctcgaacccctgggctcatggcggttcttctgcctcagcctcctgagtagctgggacaacaggaatgcaccaccacacccagctcatttttaaaatttatttttatttatttttgtagagatgggtctcactatgttgcccaggctgtgtttttatgtatttttttaatataaaaacgtcatgtcttttctactttttcaagcctgcatttctgtgaatggacatattgatagaaaaacacataaggcgatctctttggatttaaggttatgtgatgaacactgtgggaatcagggtacttaaacataaattctgtgtaggtatacgtaagtggggtgtgtgtgtgtcagggggtacgtagctattactgcttttgtgtcatagattctcacaaaatgaattgcagctatagagacaccaaggactagagaagagatattagccaaaaaatggttttattaaacatttttctaattataaatgattaaatgtcttctagaaaacctgaaaaatgtaaataaaaaacatgaaaaaggaaaaacaaagtcacttatactagccagagagatccaatacatttcgagtaatattatgtcatttcagtctggttataagtgtgtaaacgtttaaaattttaaataaaattgggatcagctaattttcaagtgctacatttccagcccctacagaatgtttttggcttataattgtggactgtttataccacaggtggaaaacgtgaatgcttatcttttggcaaatgagagaatgaaaaggcttcatctgaagtgggcagcagctgtcctgggcaagctggtctttctatcccagtactcccaggacccctgattgtacaagagaaaaactagaaatctgtccacaaagagctaatttaaattagtctgtgggcctcctgatcgtaacctgtggtttacacagatttagcccacttctaacatttcctactctaattacagtaatttctagttgtaatattttaattcactcttattttaaaatcattattattatagaattaatacctattcatatttttgaagtttaaaaatatagacaggctaacaataaagaagagacaaatcattcgtaaccccacttcttagagttagctggtgtttaatagtctaggatcttcaaaaatgtctttctatacatatatttttatagaagttgaatcattctgtcttataacttgctttttttttttccactggaaagtaatgtattaccatggccatatttccattttgttgtatagtattctctaccactttcaattactctgtaatgagaaattgcaaacatgtttgatgaaaagctaattatggactatcaatgaatacatgtttgctcctttaatacaaattaaatatacatttaatcattatatttctaaaattttctccatactttagatgtggtgataaactcaaaactgataatctctcatgacttgtgacattgggcttgtgacatcactcaattttgaattataacagaattttacagttgcaggggattttagaactcatttattgcaaactttctcttttatgaaatcaactttcaggtataatttttatataataaaaggaagtcatcgtaagtgtgtgatcaattccagccccctttgaaattctgtttcttgctagcccaataacaaaccacttgcaagtgaactaagtgttgaagtttgcttttcacctttcagagttaatatttccaatagttttgtaacaatcaaacattcgttgggcttttatccaagtggtgattcatcagataacatctcccatttattgcgggcctattgtatgttttccacatgggatgtgccagcaaccaacctgcatggtggatggtatcaacatccacatttcacaggacagcgaagccaggctcagggaggaattgatcagggctacacagctatgtggggctacacctggatttgtcctcagttttctgttagtactttcactgttctcattgattttatttactaggtaaagtatatttatgttggttactacatacctgctacacgtatataggaattgatagttttacctatgaatagtaagttacttgagtggtatttctggaaatggtatggtgggtcctaaacaatgggcactcctttcactgttgcctggcacatatagaatgattgttatatggctacatccttttttgtttgtttgttttttgagacagattctcactctgtcacccaggctggaatgcagtggcacgatcttggctcacggcaacctccgcctccccaggatgaagtgattctcctgcttcagcctcccgagtagctgggattactaggcacccgccaccatacccagctaatttttgtatttttactagggacggggttttgccatgttggctaggctggtctcgaactcctgacctcaggtgatcctcccaccttggcctcccaaattgttaggattacaagcgtaagccacagcgcccagcctgcctacatccttgagatcccatataagattaactaccagcactgcctttccccctctccaaaattacagtgtttcagagtcgaaacataagcataaaatactgaaaagaaacttttcattgattttagtttttacttattagtttatatttttcttcttcaagaggtatccctttaggtccaaattgctctttgagctggatgaaatggtcggaagccttcaactacagtcagttggtgaaaggtatcttgaaagcagaaatggtgttgtggtctggcgtgtcaaatgtttaagaccacatctagccccctctcctaatcgaacctgaacctcatgtctctggtgaggtgctgaaaatatcaagatgttgctttttccctctgtacccccactccaggcatactctaccgtggaagctacagtggttcacagtatgcatggtaggttacacattcctagagacgcccacttctaaggagatttccattctctaatttgccaaagttcccaagcagcctgttcaacacatgtttatgttacctgccttgccctcaaaagcattcaggtgttcccctgcacccagggtttgaacacaataggattagaaggtgaaaacattttgttagaactgaaaaagtagcaagtatttactgatgaaaagctataatattgcttgagatattaccattggagctctctaatacattctgggtggttttctttttcattccttttccactgattttctacaatgaatttatattatttacagttagatgtttggtaaaaaagtttcttcgtcgatacccccattccatttcttacttagtgtctctatagctacaattcattaactaatgagaacttatgacagaaaagcagcagtagccacacacacacacacacacacacacacacacgccccacatatatgtagataatttatacttaaggaccctgattctcatggactttgtcaggtaactttaaactcaaagagatcatctcatgtatttttagtctgtatgtccagttgtgaaaaatgcagatgtagacattttagtggtagagaaaatagaacttttttgattaaaaaatagataaaaaacaatataagataattaattttagattatttccaacagatctaaaatggctttgcagaggaggtttccatcaagtgttagaaatattgtgtttccctcatttatcggctgtgtacctacacaaaaaattgagagaaaatattgccagagtcctacacaaacaaagcaagacatagtaaagaaataatttaaaggttcactatgatgactgaacagtcattaggaatttgagtccccagaaaattttttacatcacattaatggtttgacaaaagcattgtcttggattttcacagggaataaatcactaaaagcaactggaaatcagttttctttcagcatttgtctgtgactacccccaatagtcatagaatggtagtagagaatagtagtggagtaagtgggatataagagaccaagtgtctcatgtctattttttgtagaccttggtgctttatctttaaaatgtgaggatattggggctgggcacggtggctcacgcctgtaatcccagcactttgggaggtcgaggtgggcggatcacctgagtcaggagatcaagaccttcctggctaacatggtgaaaccccatctttactaaaaaaacaaaaaattagccaggtgtggtggcacatgcctgtaatcccagctactcaagaggccgaggctgaagaatcacttgaacccaggagtcggaggttgcaatgagctgagatcacgctgtagcactccctcctgggcaacaagagtgaaactccatctcaaaaaaaaaaaaaaaaaaaaaaagtaacgatattggacaagtgtctaagatttttgtttttcttttactttgggctgagggtggggcaggctgtttctaaacttgctgtgatcattatttttcaagaggtacctttcggctaactctgcagacaagtggatttctaaaaatgtaatcattcctatgttttaaaatgtacattctgagaaaacaaacaacaggagaagattatgccacccatccgtgtcttacaggctgagtgaggcaagctgttgtcaaatagagaggctcttgagatatttcccattagactcctctgggtcattcatttgttattgagagggtacattcttcgtcactccctagaagtaataatatgtttgattcatgaggtgagttttagatttctattagcatttttacaaatgtaatggaaagactgttccaataggttagcttggtgatttaaaactctgagctcttcaaggctccagaaagcatttacaacatcagtagatgttagatagtaatatgctctggaatttattttgaaatactaatataatattgatttacatgaagtgcaattatgtggttaaaagcctgtccttttctcacaatttatgtctaggtccctaagttcattactgaaattttaagaaaatattttttaaaaagctcaccctgcccccacacacataatatatgctgcttagagatacttttattggggtttttttttttttttttgacagcatcttgctctgtcacatagactggagtgcagtggcctgatcatggctcactgcagctttgaacacccaggctcaagtgaccctcccacctcagccttccaagtagctgggactatagccgtgtgccaccgtgtctggctaatctttttttaaattttttgtagagatggaggtcttaccatgttgcccagcctggtctcaaactcttgggctcaagcgatcctcccaccttggcctcccacagctctgagatcccaagggtgagccactgcacctggccttcacaatttccaatgtcaaatcttactacaaatttaagtaatcaagagtatttacatatggacagatatactgaccaacagagtagaatttaggctgggcacagtggctcacatttgtaatcctagcacttttggaggccgaggcgagcagctcacttgagctcaggagttcaagaccagcctgggcaacgtggtgaaaccccgtctccccatctctacaaaaaatacaaaaattagccgagcatggtggcatgtgcctgtagtcccagatactcaggaggctgaggtgggagggtcgcttgagcccgggaggacgagactgcagtgagccgaggttacatcactgcactccagcctgggcaacagaacgagaccctgtttaaaaacattatttcttagcctgtcttattgggggggggtctcttaattataaatacaataaaatatgtggttccccaatggttcctttttaaattacaatgtgagtttttttgcatttgtgatactgtcagtatagtacaagaagaccagtttatgaaggagacatgtaggtaaaaataggataatgtgaagagagaatcgctgcacttcagaaagctgattttatttcaagcagtttattaaaatctagatgcaccgtatgttctggtgttacttattccaatttccttttccttcattgaagccctcttaaccacaagtgttttctcaaggggtactggttttccttttcttaagttatagcgttcttcagaaggatctagccctttttaatctgttgcccaatttttggatcctactatccagcatgatgctcacctgaatgatgcgaaagctctcaattttcaaaaatggacttctgagtgtttttggaattcttaggaaaagtggtctttaaaaaccataagatttgaaggcagtctatcagcacgtagcccttagcttcatgtctatggtttgcagagagcttcagaatgttaaaatgagggtttaattttagggtctgctgggcctgaggttaggggtgtgattcttcagcagttctagttaggagaactagttaagtcctagttaagtcaatggggctaaaagctttttaaagatacatcaatatcattataaatcagcaatttgcaagagagttaaaaacactgctatcaaaatccttgtacctctttcctcagcttgcccaagaggaagggatattgtagttatttgttcactctcctcttttgataggctttctacattccattaagtattccctcctgaggatgctcttgggttagaaactgcaggattctgaatgactatgaattccttccttttgcattaggagcttgtcctaatgcttttctcagcatattttgtgaactaaactgttctccactaagctactcaatatttagctttccttggctcttgcttctagttccttaatatattgctcagtgttaaaacctctgccttttgactttttactgccataacgctttgaactggaaaggatagctagattcagatgccagctttggtgtgacctcgggcaagtcccttgctttctattggtcttcattttcttatatgtcatgttggccagtgatctttcatcattaaatgactggttttgttttaacccctggctagagtaaagcttggttgtatgaatgttgtcagccctaaacccccagttcctctttgtcaccaccaacctaaaggatatgaataataggataatcatatttattaatttaattttttttttttgagacggagtctcactctgtcgccaggctggagtgcagttgcacgatctcatctcactgcaacctccaccgcccgcgttcaagcgattctcctgcctcagcagcctcccgccaccatgctcagctaatttttgtatttttagtagagacggggtttcaccatgttggccaggatggtctcgatctcttgacctcatgatccacccgcctcggcctcccagagtgctgagattacaggcgtgagccaccgctcctagcctataatcatatttgtaataattgtactttatttgtgtagcactttacaatggcgaagagttttcagaaataaccatatttaatcctcacacagctatagagtaggtggcatatgacctggattttctatcaatttcagtttcagattttttgtcctgtcatccctttgagtgtccttccagtttttgatttgggaaataatgctaccataccggtggatggggcaacttttcccttctttccatttggacttgagcagactgagactcaagacttgatttgatttatactcactatggtagaagataaggaaccaagtccagaacacacattttacaaactccgagttctctgttctcaaaggaacatccattactcttagcatgatttataaaactgctttatcggcataattaaactggaatccatatgacattctttattccctagctgacaaaattagcacaggagatttactcaaatttgttattaaggctgttataaatgttcttcctttactattcagcttataaaagaaaaaagaaaaataatctgctcttttaactttgattaggatccattgactttccccatttgtaaaatagaaatgtaacttccaaatcaaaatttatggcattttaatggactgttctaaatattataatattttttcttgttcaaataacttgatttaaagcttctaattgaagaacataatagatatttctgaattgcatctctccaagcttatttcagaaggaaactcaaaaagaattgttccttagactttgactggtttacagttttaaaagagctgccaaattgtagtttactgatctaaataagaggaacattaaggttacacctgcagctagaagaaaagtgctggatatgtacaattttatgtagctggatctgcagaagatgatttttgcacacagagtaaaggcatctaaaaacgtgtctgctcttattcagacatttccaatatttcttttttaagcccacaagtctgattacctctgtatgtctcttgggagctgcaattttgctggaaagagattcagaacagtcagagcactcacataaaatagatagtttttaaagtctgtaccctctacggtagtaataaaatgacctaaaaatattctgaaagtctctcttatgacatagtggatgaatcattagcttatttatgaattggtgatattctgtgggaatgtttcaaaatttgctattccacaaagcgttcatcgcttgcataactccaggaaagtcattacaccccctcataaatagaagcttatataacggagacaaatgttgcttatattgatatatttacatacagatttctttaccaagcattaattttggtaagaaagtgattgtttttatattttactttcttggtctgtaaagaggctatcactttaaggccaggcatggtggcacgcacctgtagtcccagcgcttccagaggctgaggcagaaggatcccttgagcccaggaatttgagtccagcctgggcaatatagcaagacgttgtcttagaaaaaaaaaaaaagaagctatcactgaagagcagtgcttctcaaactggtgaagggccaggtttttgttggtggtgggtttttttttttgtttttttgagacagagtcttgctctgttgccaggctggagtgcagtggtgcgattttagctcactgcaaactctgcctcccgggttcaagcgattttcctgcctcagcctcccgagtagctgggattacaggtgtgcaccaccacacccagctaatttttgcatttttagtagagacggggtttcaccatgttggctaggatggtctcgatctcttgacctcatgatctgccagcctccgcctcccaaactgctgggattacaggcgtgaaccactgcacccagccgcggtggtggtttttaacatactacacatcacagatttttaggtggtgctaatgaaactgacaagtatgcattcacaccacatgtaactcaacagtcaagttcaacaacacttgacctcgtctgtaccctgctccatgagatgaattcattgatcatgaatttggatgtcatggcaatgtcaaattgctatagaagttacttaacacactgtccatatctatgcttgtgaaagaccatattttgagtagcactgttctagagcacttaatttttgaaagtataaatgtaaactcaaatcaagtgactcaggtcgggggaggataattaaccaaacaggaacacctgaaaatgttatttatgcggtttaatgttttgccagttgagtcaagttcaggcagaggagggatctattttctttcccacttggtagctctccttagcaattgttttagaagacaaagcatagaaatcattgtgttacaggaaggaaccagagattaagcggcagagccactgctgcctagtttaatgtctctcgcaccccctataattaaatataatgtatataatgtgataagtttaaaatacaggtttgcttttatctagaatataaactgtgatatatgcactctttatggggtgcattcagtgggggaactaattgattatactgtgactttcctattgtcactttatgagtttaggtttggaggcaatgttttgcagcaacaaaattgttcattgactttgaggctggatttaaattctgattctgtcaccagttctctgtggtcaaaaaggaagccactaataattttaaacctcagttatgtgatgtattaaatagttatgatgagacttatcttgtgttgtgaggattagaatgacatatgtaaggtaacagaatgtctgatgtagtaactgctcaaggaattataattgctattagtgatatgcattattattattagttattattatcatataccagtgtctctccttatttaataatctattgggttcctgaattgagataccaagaattcagatagtgagagacacctaggtttaggtcttcacatttgacactcaaggagccactaaatttttctgaagtattttacttcttaaccaaggtgataaagatcacctgatcacaatttatcctaacttttggaaagcatacacgtactttaatttgacatgcaaattaaaataatacattttgtactgtgttgtttgccctcccccaattctaaaataatatatcattcaggataaaaaagactacactttgggaggccgaggcaggtggatcacctgaggtcaggagttcgagaccagcctgggcaacacggtgaaaccccatctctactaaaataaaaatttaaaaaagccagaagtggtggcgtctgcctgtagtaccagatactcgggaagctgaggcaggagaattgcttgaacctgggaggcacgggttgcagtgagccaagatcgcaccactgcacttcagcctgggcaacagagtgagactctgtctcaaaaaagagcataaatatctaataaatgatggtggtactagtctgtggtagtggaggtatcacagaatggctgtagagatgaggagggctaaaactgtgaaaagccttatatggtatgttgaaggttttttatactaaggtttttgatttggaagatgtatcaatcagggtctgcctggtcagaaaacataaaccctctagttatttcaaacaaagggaatttaatgcgggaaattggttactcaagaatggaagtgctgagaagccacacacacagcatgaagtttctgttatacctagggctggagggacaatgacaagaggtggtatcaccagagccccagatgtcatgggcatcaaggcggagttggaacctttggccagctgggaccaatgagggaggggctccgagggagctggagccaggaaggagacacagttagccagacctattgccggaggtagaatgaaaaaggaagtacgcccggcttctcctttccgcctgccctctaggcttctgccagtgactcctattggccaaacttacttggaagccaattggtaagggagcaggaaaatgtactgtaataaacagcagagcagagaaaaggcagagaaagtatcaaaaaccaacaagcaaatgattgaagtacaggagatcccatggacagtaaggcaaccaaccctctatgcagatatttcgggaacaagaaacataaaaaaactaaaaagctttcataggagtttgaggtgacatagataagataccagaaggacatcctgggttcaaaggaaactgatcttaaaggagaggaggtagcaattaaaacaaattatctgcagagaagtccaaacactaaggataagcttccatgcatttgatgaaagtacttgcgacgtttacaggtgtttatgctcatgactctcaagactaaatacagacataccttggagattttgcaggttcagttccagaacacttcagtaaagcaaatatcacaataaagtaagtcacacaagtgttttggttttctagtacatataagttatgtttactctataatgtagtctagtaagtgtgcaacagcattatgtcttaaaaaacaatgtacataccttaatttaaaatactttattgttaaaaaagctaacgatcacctgagccttcagccagtaatgatccttttgctggtggagggtcttgcctcgatgttgatggctgcacagcatggtggttgctgaaggttggggtggctgtggcaatttcttaaaataagacaacaatgaagactgccactcagttgactcttccttttgtgaaagatttctctgtagaatgtgatactatctcatgaaaccacttactttgctcatccataagtagcaactccctatccattaaagtttgatcatgaaattgcagcaattcagccatatcttcacgccccacttgtgatttcaattttcttcctgtttccactacatctgcagttacatcctccactgaagtcttgaacccctgacagtcatccatgagggttggaatcaacgtcttccaaactcctggtaatgttgatattttgacgacctcctatcaatcacaaatgttcttaatggcatcaagaatcacttccagagattttttttttttttttttttgagacacagtcttgctatgttgtccaggctggagtgcagtggcgtgatctaggctcactgcaacctctgccttcctgggttcaagtgattcttctgcctcagcttcccgagtagctgggactacaggcgtgtgccactacgcccggctaatttttgtatttttagtagagacggggtttcaccattttggccaggctggtctcaaactcctgacctcatgatccacctgcctcggcctcccaaagtgctgggattacagccgtgagccaccacacctgacttccagagattttccatttactttgcccagatccatcagaggaatcactgtctatgtcaagctatagccttacaaaatatttctcaactaataagagttgaaagtcacaattttttcttaatccttgggctacagaatggatgttgtgtaagcgggcatgaaaacgtgaatctctttgtacatctccatccaagcttttgggtgacaaggtgcattgtcagtgagcagttatattttgaaaggaaacctattttgaacactaggtcttacagtgagcttgaaatattcagtaaaccatgccgtaaacagatacgctgtcatccaagctttgtttttccatttatacagcacaggcaaagtagatttcacataattccttttttttttttccttccaagacggagtcttgctctgtcacccaggctggagtgcagtggtacgatcttggctcactgcaacctccacctcccgggttcaagcaattctcctgcctcagcctcctgagtagctgggattacaggcgtctgccaccacacctggttaatttttgtatttttagtggagacggggtttcaccatgttggccaggctggtctccaactcctgacctcgtgatctgcccgcctcagcctcccaaagtgctgggattacaggcatgagccactgtgcccggcctgatttcacataattcttaagggccctgtgatttcagaatggtagatgagcattggcttcaacttagtcaccagctgcattaggccctactaagagatacagcctgtccattgaagctttgaaggcagtcattgatttctcctctagagctatgaaagtcctagatagtatcacctttaaatagaaggctgtttcatctatgttgaaaatctgttgttcgttgtagccaccttcatccatgaccttagcttcatctggaaaacttggctgcagcttctgcatcaatgcttgctgcttcatcttgcaccttaatgttatggatatggcttgtttccttaagcttcttgaagcaacctctactagcttccaacttttcttctgcagcttcctcatctcttttagccttcatagaattgaagggagttaaggttttgctctggattaggctttggcttaaagaaatgttgtggctagtttgatcttctattcagagcactcaaactttctccatatcaggaataaggctgttttactttcttatcatttgtgtgctcgcagggtagtacttttaatttccttcattaacttttcctttgcattcacaacttgactgtttggcatgagaggcctagctttcagtctgtctcatctttcaacatgctttcctcactaagctcaatcattaatagcttctgatgtaaagtgacagaggtatggctctttcttcccttgaacacttagaggccattgtagggttattaattaccctgattttaatattgttgtgtctcagaacaggaaggccagaggagagggaaagagatgggggaacagctggtcggtggagcagtcagaacacgtatgacgttgatcaattaagtttgccatcttatgtgggtgtggttagttgcaccccaaaacaatttcagtagtaacatcaacgattactgatcacgattcaccataatagatataaaaataatgacaaatttgaaatattgagggaattttcaaaacgagacacagacccaaagtgagcacatgctgctggaaaaatgtccatagacatgctcaacacaggattgccacaaaccttcagtttgtaaacaatgcaattttcacaaagtgcaatacagcaaagtgcaatttaatgagatgagcctgtaatgagcctctttaaagcaggaactgtcttcctcatctttgtcaccagtgcctggtgcatggtagcctctgaaaaaataattgttcattgaatgaagcacagtagagcaagggagagtgattttgctcgggaggaaaacaaataccactcaagaagatggaaagatacagatgagggttttctaaggcggattattaaactggcaagatggaactctggagagatggagttctttccagaaagtagaagataaagcctcaaagtaattaaaatagggaatatcagttaagttgtagattttattggcaatttgttatcttagcaaaaccaagtgaactgctattctggaattaattttgccctaaaaggaataattaattgataaggagaaataagacccgtaaaaagtgtcactatggattcagaatttatatgacaaagaaaggaaacactgaacacaatttgatgtgctgatggcctcgttcgttcattggtttcctgcttcagtaaacatttaagagcgtgccatgtattttcaaactttagggcaacaggctaaaaatatcaaggagaaaaacgtttactgagggtatagaagtttttatgatcttacttttattgaacattaaaacatggatgttcattctagaaattttagaaggtgaagtgcaaaaacaaaatgaaaatcacctcacatctcagtacccagaaatagccactatttacattttaaaagattgcttccggtcttctttcctatgcatttttatatagttgtttgagataatagaatgtttaaagtgttgtatcctactgtaatcataagtcttctcttattcttagttcctcagagatgttatttttcgctagttgcagtttattggggtaccacttttgtaaaaaaatatttcccaatttttgaaaattgtgacaaagaaaagtcaaattcgtgttgaatttatggaaggaaatctttaagaatctggaggcttattactaacaagcttctgagaagaaagccaagtaaagtgttataataccttctgtccaacaagctacttatgtataagtgatgttacagaataaagtcagtgtggtcaaaaacagacagtcagttatcagaaagttgataagtaacatttatcctatgaaaaatatagctatgaatttaaatcaatagttttctaccacaaatatcttaatggataaaattttctttaccaaatatgtatggtgtcaaggtgacaaggcaagtatccttgtaaactttccgaattacaggaacaactttgcccttcttagcaagcaattttatacagaaactcaactttatgatgggtttctgtaagttttaatttttataataactgatatgtaaatatttagttacctttaacttatctctccaggtagaatggctagcagactgttttatcttctcaaaacatttgtgtgtacagttcccatgttcttttcaaggttcttgcttctaactgtcagttaaggcttttgtagcctcttacttcagttacattttctggccaagacgcaattaaagaatatagagctgataattatttccatagtcgtttccaatttttctactgttccacgtaagactttgaggaacacctttatgcataacacctttctacatttgattcatgtaagtggaatcactgagtcaaatggtgttaatgtttctaagcttcttggaatgcactgcctgaaactttctcaaaaggctgtagccatttacactcataatacttcaaagtgccaatctaaccatgtccttcccagcatggagtattatttttacttttgctattgtaacaaggaaaattaaaccatctcattgttaatatttgtgtattttttatttctagtgaccacaaatgttttcttttaaatatctgctgggtgtttttcttcttttttgagtaatgtgaaaacaaaacgaagttaaccaaacacaactcttccaaacttttctgatataatacacacttttttgtgtgttatgttgaggggctctagttggtaacagcctcctggttacataaatactgtacagtttaattttttttcagctaaataagccttatccctttatccatccttagtggatctattatctacccattaaattaaattttattctctataccaactcctgtttcttcacattttttaaatatatgcagagccctaaattacagtggctgtcctaataaaaggctattcagttattaacagaaaaggaagattgcttcctgcctcttgggtgaggaagactcatgtataccatagatatggtcagtttacatttacagttttctgtgaggcattgatttttttcccccataaatatggagtacttagaatgttcaaaacctttctctgggtaatagaatgcacaaaagtataaggcatgatccctgttcattgcccaagctggcgtgactctggtcatgcagcggacttcatgatgtgatagaattccttgcctatgagagtgaaggagatggtaccaggtctacttgtggccggtggtggaacacttacattattctaagtcctttctgtctgtagaacccaaatgacaaccatattattttatcttctcttattgctagtggtatcgtttattaatgccaacgtatacccattttgcttttcaaggttactttagatgtcttaggttggaatgactgaaggcttatacattcaaatttatatatgacacacacacacacacacacacacacacacacacatatcttattgttgcctgctatctttctacctgttgtataagaaatcctttgaaaaaagcctatgtcagcttcacaaaagatgttactgtgttttgggggaaataaaattgggaagtaataaaacagttaataaatgttacaagaccgtgtacaccaacttaaataagattaaggtcaaacgtatggtaccttatataggtaggaagagcagtattaattagaataattagggagagttgtttggagagtggaaaaaaacattgttctaggaagaaattttgtaatactcaggtaaagtaaaatgtagggccaagatattccagatagtgtagcagcataaacaaaggtatgaaagactggcttgtttgcgagtcagtgaagacattgttctctgagaatctactccagatttttttttttttttttttttttttttttgctttttgagacagggtctcactttgtcgcccaggctggggtgcagtggtgcgaacatggctcactggtgccacaacctcctgggctcaagtgattctcctgcctcagccccccaggcagctgggactacaggcacacaccgccatacctggctaatttttgtatttttggtagagacagggttttgccatgttatccaggctgttctcaactcttgagctcaagccatctgcccatctcggcttcctaaagtgctgggattacaagaatgagccaccgcgcctggccactccagatttttaaaagggaaatctgattcagtgcccctggggtgaactaagtgccttaaattatagagtgagaaatttacattgcatttgattggcaatgggaaaaacattgttaaatcttcagaaaagagaaataatgaagtccgtcttctgtgttttggaataggaatttggtgggtgagtttaaggacagttagagaggggagagattatttcgttttgttttgaggtaattgacatgatgagggtcttaggatagcaatgggggaaggaaaagggaacgtgactccagaggtttttcttaacaaggtagaattgccagaaggtaatcacagattggacaggttttaaagaaaaagggagttatatgtcttcaaaatttgaaggcgtggtgacacagagaatggtgataccattgaggaaaagaggaaattgcaaactgagcggagcaacagggaatagatatgaatttgattgaattacatacttatgggtttatttacaatttctcttcttagaaaaatttatttttggtggctcatataaatgtatgtgctgccataccataagcatatatttctcattaatcctttcaaaaaccctgtaaaagatatttgtatctccattgtgcagatgaggctcagagaaaataggtaattttctcacattgcaaagcagggatttacgtgtacttttaactcctaaaccagcgatttagcccctcagctatactttcttcctgagaggggacagtggcattttgaagaggaaatactctaaagccatttgaaaaggggaaccgaagaaagagtttggtccacagcatgataaaaatattacttgcacttttattatactttataacaagaagtacaggggcagagaaaggttcctaacttttactgagcaagtatatatccaagatacatctcctctttggagcttttgagatacactatctctcttagttttgcaacagccctaggaataggtactattactgttccctttaaaaatgaacaaaaaaaaaatgaagcttaggaaagttaaggttactagaccaagcttattgggagaccatagtgatgaagaggaagggctttagggtcaaatggatttgaattttacttcttaggcctttggtttccttatttataaaatgggattgaaataatgatatcacagttgaaggtaattatatgagaatttatgttatttattgcaaacatagggtaagcacctaataaatgataacctgagaatttatgttatttattgcaaacatagggtaagcacctaataaatgataaccattattactattattttacagcaaagacataaatagagcccattaagttttcttctctacccagtagtttttccattgtacaatagtactctcctgaaggacagcgggtgaagctaagaatttggaagaaatcccagatagagaaatcttgaaaagaagatagatagatttaatactcaatcattaaaaaaagtgcacatgactttaagaaatcaaacattgtaagaggatagtattgaaaagtaagtctccaaccactcttggtatcaatcccctaattttacttcctagagacaattaacagtatagtttttatgtttgcttctgtaaatatttttgcatatacaaacatacacataaaaatatgcccatttttgcacattgagagtataataggcacaatgttctgttctttgatgctattaccttttacataattaacctggagttttttttttcctgtagcgcaatagactgacagatggtgaatgaaaacttgcactatggagagttatgtcagtgttttaataagacaggaacccagaaataaatgtacgaagtttaacatcagcatctcgtggcctttaagtcaaattggacaaccattcaaagcttcataaatgctaactgcttctcatgacttcagaagcaaacaaaaaaatcattattcaaatgggaaattaagctgatcatcagaagtacagagaggatgtcctttcttaaaggcggcacgtctaagggagtgtctgagacctggcttcttcattcaggatggaggctgctgctactctttaaaagaaatgttcacatccttacttcctgacttccttctataacacagtctgcttcacaacactatgactttatatgtcagagcgggttaggaggagctgaatcttaaaaatttaagaagatgccaaggtctagaaaccactcttaacaggggaaaattagaccctgcttgcttttgggaaaatttgttttccagtcagatgtttgtcaaggttaaagaaattcacgggccctctgttcgaattgggagcaattgggagcccttaagctgaatgagtagacttgaagtcccacttagaatgagcctttatatttttgttctgtggcttgctcagggaagggatacacacttggggagaaaaagacttggattctagttgatgtttttctcctagctgactagggaattcagaacaagttactaagagctttctagtccttagttctctcatttggaaaatgaaaattttaaattagagattctatttctaaggcaccatgtatttcattttcttaataaaaagtatatatattcccctaaagaatactcataagaaaaaggtagagttaaaatttcccaaattatttaattcctggttgcccagtaaccattaaatttctcagcagtcaggcaagaaccacattcccaccttgagacaagatttaggcctttccaaacttaccctcgggctctgttccaagtttatttgtaagtcagttgcatacaatttggaatgaaatgtgttataaatggtggttaggtccctaagtcacagaatcttagttaaccctcagagtgcctgatatactgcaccatgtaaatagaaagcagctgtatgtttctatgggagcaaaaaacttttgtaggaaaaatggtagaaactcgtactgcaggtgttgattattcagcaaacttctctagataaggaggactgggaacttcatcattattggtctagttacattcctggtcactccctcatcccattgactggtcagtttccctccctgtggtccttgtgcaagggtttctgcctcaccccataccctctgctccttgcccggtatcatggttcttctgagggtactactgcccattcacccttgtgctaattaggattacactgggtaaggaaagacatttgttctgtagcggagaagcggggaaggccatcagaggctttgagtgtcagaaagatttggtcttgaatgcaggctctgggatgcaaccgtagggaagttaccaaacatttgtgagcctcattttatctttaacaaagctgataatacagaactcagggccttgtaaggactcgatggtatcaggtacacacgacatttgcccttgagtgctcagcgaatgttagtattccttctgccatcggcctgtcacttccgtttttctctttggctctacagggaatacttgcatacaaaaagagctgaagtaagagtcacctacatcttaggaaaaaagggctgctttaggtttatcctcaagtagttttgtccaggattctgaggagaataaaagctgggtcagatccagtgtgttgaaaagaaagctgaggtgagaagtgagagaaacagagaggcagagaaagggggaatgagccctgtctgctatgaagtaggaggcaatccaaaagacaaggaatccgtggtcattgccactgagaggagaaagaaggcaaactcactcctgtgacttcagggccatccatgaggtgggcagaggaactcagagtctgcccgattcttggattgaatcttcaaattggtaaagctttatatcaagcaactcccaaatgcagcatagttttgaggtgataaagaagagtcttttcaaggctgggcacaatagttcacgcctgtaatctcagcactttgggaggccaaggcaggcagatcacttgaggtcgggagttcgagaccagcctggccagcatggtgaaacctcatctctactaaaaatatgaaaattagctgggcgtggtggtgggcacctgtaataccagctacttgggaggctgaggcacaagcatcacttgaacccaggaggcagaggttgcagtgagccgagatcatgccactgcattccagcctgggcgagagaatgagactccgtctaaaaaaaataaaaataaaataaaaagagtattttcccggagtaccggtaatattggttccagattcaaatgtattgtccagatacacagagggtaaacaggaacgcttcaggcatcctttattaaaagcacctcagtctatgtcagagggccaggcagtccattatctaatgaaaatctcctaccattgatttattttatcataactgcagctgctaagtaattttgtttaaggaatgatttacatattagtgtcttcagcaggatctcatcattagcatctagtctccagaaaagttaacacataacagtgaaaagaaaacattctctatcacatgcttctgcatgcatgggcaatttgagtcataccacctgttcccctcttctgttatgctagagtatacaaaaagcagagatacgcatagtttactatgatcctagatgcttaaatatcttgaattgtgttctatcttggactcattattcatgcataaagactcaacagattctcttcttgcacctctcaaacagcaacatcaacaaaacccaaacaatgtatctttcctaatgaggtgaaagcatgcataccagcctaagacagaaatgttgcaaaaatgttttttgcaagaaggtcagtttgcttttcccatggtaactaaggttaatttctactgtggttcattttggcatccattttattcatgatgattattagagggcatggatattgggggtgtgttgatgttgggcaccagagaaatggaaagaggcagatggaggatgcaaatcattttcactcagaacctaaaatgtttactgttagataaagggtagagaagaatcttaatttgactgtcaaaacatatgattagttgaagttaccaaaactatttttttaaataacatttatcttaagagctataaataaagaggaaattttgcactagagatgaagttatgaacatttcattaactctaaagagttaatgaaaaactagttgattatatgtgttcatttataggttgacacgtgaatttccagagaagtaacttgtatgtttttaaattccaatccttatcttacatctgggcagaatcagacttgtgaacgtcccattccaaacaaatggctaaacactttgcagactttgtctagaagagtgccttacccatataagccctctgttataaaattgttttaaacgttaaattagctgtcaagctgttctgcatcagtggcaccacctggtagcaaggatggagatctctgccacccaagatctctttagtgctcacgtcatttctccaccgcaaggaggattgcgggggtggacgatgctccctatttagtcttctgcattttgttgcttacagttcaattaacatgtcagttagagatgacttttggttgcagttaataaaatatctgaccaattgtatcttaaacacagaggagttgatattttttgtagaacaagaagtctggaggcaggtagttgagagctatggaagagttccgtgatgtcatcagagacctgggccatggtttattctgctgtaccatttttaacgagtgactttggtcctgatggttccaagacgactgctgcttctcaggcaggaagaaagagaaaggacgttcagcctcagagtctctttgtctttccatttgggaagggaaatcctttcttgcagatatcttctcaagcattggccaaaactgtgtccacacagcttcccctggctggatcagggaattgagatcctccagcctttgtagcagagaaagaccaaggagaaagaatttgggaaggggtgttgagtgagccaacatacagttatctgccacaattaaatacagcggattcaccttgcaaataagcattctttttagaccatttattttctttctctctttgtcccaattcctttattccttaggaaagtcttgatatctttgtgaggtgtgtttcaaaaaagaagctccagctcaggttgtaaggagtaagcaaaaataataattccagtgattcagccatagaagtggaaaattatattatttgaagaaaaattagatgtaaaatcaatgtcatcgacagcttaaacctggtaaaagcaaggaagttcctttcagaatctaattttattccaaatacatttattgagcaccatcatttattgccctagatgccaaggataagtgaacacaacatgacctcttcagaagtctgcatttttctcatcttttttccctcaagtataagaatgaaaaataaagctatttctaattagttacatcagtcatttctatcagtattactatagattttatttttattgtatactggatatttaaactaaatttaagcctttgtgggcttagaaattactgtttcatgagtaacatggcttatgtaggaaatttccaatgccattaaccttaaaaatgttcattggaatactgcttatgtcatcttggaaactacctttgcggttgacatataaactgcacgatggtctattttcattatatgtttctgtatgtacataagcatcctcatgataaagattgtctacttgatcaaacttcagccagactcctgaaccttctcctaggcccacctgtgcacttctttgtaaaaatccagctgtagcgagaatcctgctaaatcagtttagcaagaaccaccttcctcttatgtatctgatcaggttcctcatcctccaccatcccccatgtgacgtctgatcaccctggcctgtgtcttcagcaaggttcctgttaagttttttttagctagaatcccccttacccccatgctttctcttagtagttttccatccaccaaaccccaccctgctccttggctatcaattcccacttgtccatgctgtattcagagttgagcccagttctatactgaggtctctttcccactattgcaatattcctgaataaaatctgtttttaccactttaccgtccatctctggtttttctttgacactcacataaccagagttttgtatgtgtgtgttgcttgacacatcacaaatacctgggatacgtgtactgattttttacagggtgaataatctttttgttttccccaatatcttagaaacctgaatctttaacccctgggcttagtacacagttaggcatataataggtgcttaagtaagcgtcaactgatgattttaaatgcagaagtaattgtcacttaatgaaatatagtcaggagactcatggattttggcctgtcttcctacctgttcttgtactgcaacagtaagtgtattaaggcaatatttttggcagcacaatcatttagtttgaatgcattagtaaaaggtggagtccaaagaattaatcgctggaaagttttgggaaaacccagtaacaactgtttccatagagtaatttgagtgacagccaggtaatagctacttattggagggactccacagtcagagccttgacagggacctgaaaaagagtgtaactgaagggtaaatgtaaaagcttttgggagaacaagggagtggtcaggctgaggcaaagatctgaaaagaaatgcctcctggggccaagctggtaatttgaatgactgaaggtgactgggtgggaactggggcaacctgaaaagcttctgttagggtaacagagcctccgttgcagctgactgttctatgagaatgtgagtctctattgtcaggtcttcaggttcttccagagaagcaagacaacgggaaatcaccagatttttaactaatggcgtatcattcaacaatttcaaaaaccattatgtgagcccaaactgaccaacgaatcaaacacacacacacacaaaaaaagagtctgcagactaaattcaaccagttggtgacctctggtctgtggttaccagagaagtaattgaaatggagttttgggagaaagatcatatgttgaaatcttgggagataagggcagagaaataagtaagccgagacggcggtaaggccaaggtagaaaaggtagcctttaggaaaattaagttaagactttttaaaacaggaaggggcaaaagatgaggttaaagcagatgaggaaatttactgttatttattttcatcattaaaatacgctttccacaaatttttcaactgtaagagagagtgataaattcaaaataggtaatgtcaaccatattatgaagagtatgtttttgcaatccaaaaaagctaaggcacaacattaaaaaaaaaaatctgtgaatttggctttgcaaaggtataagaattaagtcacatctgatcatttttagagtcttaccttttataacaaagaggaaaatttaattaaactggctctgccctggcgaatctgggatgtgtgttcacttatgaagagagactgttaagattcgttaattaatgaggttgagaatagagttgaaggagattggggtaaatttataagtttgtgtcattctgagagttctgtaagtagctgagttacccatgttgtgactgagaaaaacaggagagagcagtgactgaaggttctgagccaaaggaggagaatagtattgtttattccagcagccagagtggcctgtgtgactgtaagtcgcctgtcaagagggagactgcaaggaaagtgcattgatttgatttggagtagttgtaactgcagcatgaagaatatgatatatagggatgataattgaggaacaatttaatggctgcataccttgctgaagttgaagttccttctggagataaaggtggcaaaaaagaaagtgcttaggtagaagagctttttaaaatgagttaacagaaaacagcagactaaatatggaattgaggagtaggaaatgaaggaaatgaatttgaagatttactttctttcaggatgcagagctggtatgtaatccctctgtttccagtgccttctcccacttccaaatttcactgctcctcatgcgccctggtgtgtggtgcagcttcgagattaagcctccagccttctgtcaggatgaagcagcaggtggctgagatgctaggctccaagtgggggaggtgtttagggctctaaagactttcaaccagtccttgtattttcagccacatttcagtcttcagaggaacctggagcctttcatttctgagacttcttggctacataaactggcatgcgtcttgttagttcctcccactccctgccccaatctccttgtctccccaacatcattaattgagcttgggatttctctggtctcctaagttggttaccagcaggtcattttctaagccaccaaaatactggagctctgatctgttctcatctcctctcctgttttgttaattttcttttgggtaaatgccattttttattcctcttctatcaacctggtagagtttcagggataaagagagacaaatgagtctgctccatctgctgtgtttaactagaagtcccaacacccaaaatccttcacacgatgtgcagggctctgcagtgggcctccccctgcctacctgtcaggccttatctgtgcccactcttcctccttcctctctgagatttcagcaatattggccttctaaggattcttaaagccccaccttcttctctgcttcagagcttttttttttttttttttttttttttaacatgtgctgacctattacgctgctgtgttcttacctggcacgctcccatcatccttcaagtctttgcttcaatgtcaccttctccaagaagcctctcggacctatgtttccctatgtatacagtctcatcacttcctgtgtgtttccttcaccattttaccacagtacatatgaatatttgtttgttagtttgtttgagacggagttttgctcttgttgcccaggctggagtgcaacggcacaatctcggctcactgcagcctccacctcccaggttcaagcgattctcctgcctcagcctcccaggtagtagctgggattacaggtgcctgccgccgcatccagctaattttttgtatttttagtagagacggggtttcgccatgttggcccaggtggtctcgaacttctgacctcaggtgatctgcctgccttggcctcccaaaggctgggattacaggcgcgagccaccgcacctggcctacatatgaatatttgattattatccatctccttcgctacactgcaaagtcaataaaggcagagatttattttggttaccagtgtattccatgtacttggcatggttcttggcttatagtacatgcacaataaatattgaaaggatagatgaaaggattatggatagatgaatgtcttttaagcagttataaaacagttctgcctaaagagtcttttttaatcagtagtattacttcaaatacatatttaaatacacatatgttataaatatataaaatatgtatttaaatatgtcatttgtactattttaaatgtatttaaaataatatatgttatatattaaaataatactaatgatttttaaaagatcaggcaacactgctttgtagctttttagaagacatttatccttatggatccataattattatggattgtatgttttatatataatgaaggttttgggagttagagccctgatccttccgctcttgaagcttgatttaaaggagcatggcacagtggtgcctatatgagtcagccctccattatctggggcagaattcaggccccagaaatggtacttaagatacacagttctcccccagaaaactttatatcggccatttgttacagaaactgctttctcaacaaaccttttaccagggcagctaacaatgagcaaaactaatttgaatttcaactctgccattattacagtgttgctaagaagtagtgagattctgctgaggaaggccaagcaagaggagggagccagaaatgccttaaacaatccacagccaggattttgtgctatcttttatttcacagttgaacttctcagtattttttggttcataacctttttctcttttcctcaattctgagtcttccacatttgtgccatactaggtactttattgcttctctcccttttttttttttcttgagatggagtctcattctgtcgcccaggctgaagtgcagtggtgcgatctcagctcactacaacctccacctcctgggttcaagcaattatcctgcttcagcctcctgagtagctaggattacaggtgtgcaccaccatgcctggctaatttttttgtgtttttaatagagacggggtttcaccatgttggccaggctgctctcgaactcctgacctcgtgatccgcccgcctcgacctccataagtgctgggattacaggtgtgagccaccacacctggccctctccttcatttcttagaagagttttacaaagtcattggtgataaataagtaataccatttcacatctggaaacataacttgatagtaattataaattcacagactgtactttctgtacttatctaagtatgaatgcataattcctgtttatctgtgtgtaggtttatttttcccccatttaagtaaagctctatgttgatgatgaggtttttacgagttgagattttaagaggcctcaaatatatctaaaaaattatagaccaagtatgatgtgttagtgttcctcttctctcagctaattctttaaagatatgttccagaattcctggtctgttcttgaagatctcccaataattctagacttctgaagcctggatattttggcttaatttgctttcaagacagactggatttaaattactcaatttgtctgaagtctcattaagatccaaggttcttgtctgttctagtgagtttgagctggcaagaataatacttgtcatctgaaaagtccattagaatcctttggaggagtgagactggaaaattggagacatattattatattttaaaatatgccacctttctataataggagtatgtggggagactgccttgttttggcttcttgggaaaatttggaaaattagtaaaataggcaggcagtagtagttcaatgcgtattgtatgccaaacactgaatttagaacaatactcccccaaaagcatatgtgctctaaattttatttttcacttaccacctgggagatttggattaaatttcttctgggaaatagagttggtatgaagaaacaaagaccactataccaatttatctgttggaataatcatttagccgtacagctctttccactcataaagttaatgaggtcattattgttctttctagctaatagataggcatattgaaaccttaggcctttccaaaaagtctccataagccattggaaagatagactaaaacactccttgttttaaattctagacctcagttcagtcagagatagtaggatttttgcagtattattaaaaagacagaaaccagctataaaattgaaatgaagggacttaatgttttttttctgtaatatctttggaatgcttccatggctttaaaatgctgaggtgtttctcactatttttcaaaagcatgtaacatgtagatatgtgacgcaaacttgaccagttgttcctcttttctggtgaattttgacacctgctactattacacagagtaaaagtgaaagtcataaaacagaaatacttaccaaagtcaagaaaaatgcatagactaaacaaaggggcaagagaagcctattacttgtttcatgtttcaaaataaaagatgaatggcctatcacttcagtagttggaaattcaacttgagaaggtaggtggtttgatgtttgcccttgttccttacgtttctagatttctctatttataggctagaaccagccctggataaaataatacaagttatgaagagaaatgtgcagttcagcatttttacccttctgaagtgcgctttctcccagctgccatggaaacatggcgtaactggtttcttggatagtctcactcctcttgagttccggctgtgagagctagtgagctcattacaacttggatcagagtcctggaaagtcagctcccagggaaagtggaggacagtctctcatggggcacgggaatggggggctttagctttattaaactgcatacatactttcactacacagtcatcccaagctttagcccaggacagtgtcacattgttcacagctgtattgcatcttgaggtttctgtgtgcatcctacacactttcctaaggcagagacttatctcttccagctgtaagccggagggagtggtgctgcagactcctagcaacacatgcggactcaaacaacacaggcagttaactctcttgagtagtagacttgtagggcaccagaactccgttgcagttcactgacagttaccagatatacatttgtatggcttccgtagcattgtgatggaagctaaacgtttgccctgctactttcttttttttttttttttatttttttattttttttttattatactttaagttttagggtacatgtgcacattgtgcaggttagttacatatgtatacatgtgccatgctggtgcgctgcacccactaactcgtcatctagcattaggtatatcacccagtgctatcccccccactccccccaccccaccacagtccccagagtgtgatattccccttcctgtgtccatgtgatctcattgttcaattcccacctatgagtgagaatatgcggtgtttggttttttgttcttgcgatagtttactgagaatgatgatttccaatttcatccatgtccctacaaaggacatgaactcatccttttttatggctgcatagtattccatggtgtatatgtgccacattttcttaatccagtctatcattgttggacatttgggttggttccaagtctttgctattgtgaataatgccacaatgtgaaggacctcttcaaggagaactacaaaccactgctcaaggaaataaaagaggatacaaacaaatggaagaacattccatgctcatgggtaggaagaatcaatatcgtgaaaatggtcatactgcccaaggtaatttacagattcaatgccatccccatcaagctaccaatgactttcttcacagaattggaaaaaactactttaaagttcatatggaaccaaaaaagagcccgcattgccaagtcagtcctaagccaaaagaacaaagctggaggcattccctgctactttcttctggtatgcctgaatcactgtttgagaatggattggactttggtgcgtggaaaactggtagcagaaggcttattcactgcagtgggttgggggtaggctgaaaagatgtcagggaggattaactagaggcagaatgtgtcatagttagaagtatttagaagggaagaaagtttgaactctgatactgttccacactaatattcatgccctgaaagaatcagatcattcttgcctctcccacttggatctctagctactggaatttgccaattcttgatatgaacgctaagatttggatggagcttgtgacctcatttagaccatttgttctaaatgctgaatagaaccaggaaaataggaaaagagggtagaattggggtcataagagaggaatcgtcgttctttgaaagaagaaagatgataggaaactaggcacatgagttacgaggcagtggagaaggaggattagaaagggaaaaaaagaagagaaactttatgccaatatcttctacaagatgtttggctggcacaaaactaacactcaatacttttgcataagtaaaggaatgagagaaaatttgggattggatgcttatcccctggaaactgctacaggctggtgttaatgggaaagggatctgtatttgaccaaaagtgcatttccacgtctctacatttctttttataaagagtcaaagggactcaatgatgagtgtgtgtgtaagggaactccacactagcaagtacaggaaaaatttgatggtactggtgaaggatgttgcaccaatctggaggggaggacaggaattggtttctcatggattgatgccgcaagacaattcataccatgagttggctgagaccacttaaaaaagtaagcagtgatgactgggcaaaagagacaaaggaagaaccacatcttttaggggagagagagagaaggacaattaaagggactcaactagatcaagttctgctcactaaaggacagcgtccaggcaaatgttaattatcttcaagaagcaatctgtatatatagcatttcaagatactccgagatgcttttaatttattgaatactttttattggtatttatcataaacaagagactcacaaatatatcccagaggggaggttttggtgtagttgactatagtagttattaaataatctattaataaaagcccacaaaatggaagatagaaagatagaaaaacaaaagacaacacaggatggtgttggtatacagaatttatacttgaagtttaacaacacggaacaagaaactttattaaaatattcatttaaagaacttccatatgaatcaccagaggctcttagtaaaatattgattcggattcacagatctgggtggggcctgagattctgcatttctcataagctccaagcagatactgatgctattcttcctcaaatcacactttgactaacaaggactcacacaggttctctgtaattggtgttggtagtcattcatggttagatgtagttgaggactgccctcttaactacctctcggctgccaggttataaagaaagcaagtctcagtacaagttctgtcacttaggagcatttattagccaatgggtacaaaacaatcttacagcctgtgccagagacacagtgaagtcacagttctgtcttttggggtgcttggtgtgagaggctcacagtctacacaggccacagtcctctattagagtggttctcaaagtgtggtccctggaccagcagcatcagcatcacctggaaacttgctagaaattcagattcccaggcccttcccatacctactgaattagaaaatctggaggtggggcctaggaaatctgcatctttaaactatccactccaggtgattctgatgtttgctcaagtctgaaaaccattgttctagcagcaggattccctcaaccatctaactgaattctggcaactaagaatccggtgaaccacagctggacattttggaattcagcctagggcaccatttctaaagatggagaacctactggattcttcttaaactcaatttaaaggcagggagtgtttctaaatgtttttcaacaatcttcatattttgcaaaccactaatatcactacacaggcccgtctaactattaattaggaaaattaatgaaacccctggtgtaataagagctaaatataactgaatcacttacagtggccgcctgtggcatgaggctttttgattaattgctagccaaccacccttggagttcactcctgattaagacaactgaccacctctacagtgtagcttaagctaacacacacatacatcagagtgtactgttcatgtgagggtttttaaagactcttaaaatttaccttatcagggcataatttaaacactataacatgtttccattttaagtgttcaggttagattttggcaaatgtatacactcgtgtaaccaccatgccaatcaagatataacatttcgatcacctagaaaacacccttgtgttcctttgaggtcagttacctactcccaccacaccccaggctaccatctggcatagtagctaagttttgcctgttctagaagttgatataagtgaaatcaaacagtatgtactgttttgtgcctggcttcttttacccagcttagtgtttttcagatcagttcacattgttgcattatcagtagttagttcctttttattgcactttgcacagtagtatcccactgaatgactttaccacaacttgtttatccattaccttactggttggtttccggtttttgactattatgaataaagctgctatggatattcatgtacacatctttttgtggacatacatttttttttattctgtgcaaatatccaggaaaagaatatttgagtcataatatacatgtgtgtttaatttcataagaaactgcctaactggtttcccaaagttgtcgtacattcccaacaagcagtgtctgagaattccagtcgctccatatcctcaccaacatttggtattccggtcttttaaacaaaattgtatgctgaatagtttaaattacagacattgttttctttcccctagttgaaattcaggcttttatgtttggtctctgcgatggccataaagctgaaaatgttgacccaagtgacttggatatggattgaattattgccctttcctaacacctcatcagaattggtttcgtaggtgtcatttgattatggcagtcatgtatgtcagtgtactttttctttctttcattcttttgtttattgattcagttggtcagtcggtccatgatctgtattaaaacagctttttcagagggcagttgcatattaagttgctaggaaaaatgacagaagtaggtgacagagttcttgtcttcaaggagctttttggagctgagttcctgaaataaatgtagcccagtatctatcaaggcttgtgcagacttgagtaagaacatcatctaaatatagcttcctgctaggtggcgtgagtcagggcttgatagaccggtgactgcagaaaccacagtaacatatattgttgttattctgtgctgaacattagaatgattgtaccttagaatatagagccaaatgtttattttattcctaattatatttttaaatacatatcacacacatagacacatatgttggataaaaaatactcaaaatgttaacagtgcttatttaaaaggtttatataaactttttttgtagagatgggatctcactatgttgcccaagctggtcttaagctcctggcctcaagcagtcctcccaccttggcctctcaaagcgttgggattacaggcatgagccactgaatccagccagttgtgcctatttttgagtttatgggcttgtggatgatttatttgattatatatgtatatgttaaatgtctaagttacccaaagtgagcatgtataacttctacagtcagaaaaaatgttatattgccacttgattgtttaaggtcttatagctatttaaataatgtatttcttgttctctttaatcttgtgcagaaaagattcactacagtagatccagattactttctagaaaaaaataatgcctgtccatctctttcctcttgggaacaggactacatgaatgcccttcaggctataccactttagtcttcacagaacttagccttcctggttgtcaaagggcaaaaggaattattttttcttttccccacgttaacagaattttcacctccgaaagcttggcgtatacacactatatgttttctaggctatttttgtggtggttgtagttattggcaaatcactgggcgtcgggggtgggttgtctgttatttctgatggaataacaaatgctctttgttttccctcttttcagctgacctgaataatgtcagattctcagcttataggactgccatgaaactccgaagactgcagaaggccctttgctgtaagtattggccagtatttgaagatcttgatactatgtctttgcttagaataaaaagtaggttgggtacatttttacttagagaggggagaaacagctgtcacaattcctgttgcaatgtataattcattctttaatgtatccttggcctagagtttgcctagaatgttttgttttatttttagaatcattcctgtcaccattcctcagctactgatgttgaattaagatattgagaatttttattttccaactactggcattggcatcggcatccataattacctttgtgaaacttgcacaatccttgttctacctttgtttttttttctttttacaaaatgtacttagtattagaagactatgactatctgatctaaaccaaacttcatagacatgtgtggtttattagcttgaatgctaacgtgcagatgaatgaagtggtagaggaaaaatgacagaattgctttcctccttttttatcatacatctgtggaaaaatcctgaagtgttacacagctctatcatgtcatcaaatagtttatgtataactctactattgtctgagggtctgtgtgcattgatgatatgcccatgaaacaggcacagtttctttttctttttttctgtttttttttttttttttttttttttgagatggagtcttgctctgttgcccaggctggagtgcagtggagtggcgcaatatgggctcactgcaacctccacctcccaggttcaagtgattctcctgcgtcagcctcccaggtagctgggattacaggcatgccccaccatgcccggctaatttttgttttttgtttgtttgtttgtttgttttgtttttttttgagacagagtctcgctctgtcaccctggctggagtgcagtggcgcgttctaggctcactgcagactccacctcccgggttcacgccattctcctggctcagcctccggagtagctgggactacaggcacccaccaccacgcctggctaattttgtttttgtaattttagtagaggcggggtttcaccgtgttagccaggatggtctcgatctcctgaccttgtgatccgccctcctcggcctcccaaagtgctgggattacaggcatgagccaccacgcccggcctaatttttgtattttttaatagagacggggtttcaccatgttggtcaggctggtctcgaactcctgacctcaggtgattcacccgcctcagcctcccaaagtgctgggattacaggcgtgagccaatgcgcccggcccaacaggcacagtttctgctctgatggaacttacagtctaacaagggataaccaggatgttcatgaaatttgtagacataagcaaatatatgtataatgtattaagaatgtctacagttggttaaaaaaataaagtgatcttgtctctatttccaagaccatttcaatgtcatatatttagttgtgcaacagtgggacaatggggtactatgtgaacagctaactgtgtggaatgagattcaaagaatgtttgtttgaagaggtgatgtctaagctaggtaactctagaagagtaagcagctctctctctaggaagagcgttctagtcagaaagaagagcatgtgctgaagggcccagagaaagcatgacacattcaggaactgaaaatatgtcagtatggctaaagcacagaattccaggggaaagatctattgtgaaataataggctggagagagaagcaggaagcagattgtgcaaggtttttaaaacccaagttaaggaatttagaggtcaggggatttggcctgggggtgacataatcagattgtcgcttagaaagatgattcttgctgtggaacagagtatggattggtgcgatgtgggagtgacaggagaaaaacctgttgcagtaatctaaaccagcaatgtggtggcttgaattagcagagtagtaagggagataagtggagagaatttagaaatatttaggaagtggatttgacaggcctcagtgattcatttgatgtggtgcagggatgtccaatcttttggcttctccgggccacagtggaagaagaattgtcttggaccccacataaaatacactaacgctaacggtagctgatgagctaaaaaaaaaaaaaaaaaaaaaaaaatcgcaaaaaaaaaaaaaaatgttttaggaaagtttacgaattcatttgggcctcattcaaagccatcctgggccacaggttggacaagcttgatgtggtgggtgaaagggagtcaaggaagacacttaggtgcttggcttggaatatcaggtgaatgtgggacttgtctggtaaggttagacacggagctgtggtgctcaggagaaatatacaaacaacgtttagggatcatgagcctgtaggtgctgcttgtaacgggggagaggattggatagctccaggaaagtgtagcgtgagaagggaagttatttaggacacaggataagcaacctacagaagggactgcaaaggaatggccaggaggaaagaaggaaaattccaagaggttatgatgccacatgctccatgggaagaaagaaagaacccgttaccagggtcagatgttgctgggatgtcagcataaagttgcggaaaatgcccattggacttagcaacaggaaggtccctagtaactttggtgagattttagaggcacagtggaagtggtgtggtgagttcaaaagtgaaccaaaagtggagaattagagaaggtatgaatgattcttggagaaatttacttatgaaggggagaagagtggggtggtagctagttggagggggctgaggagttaatggaaatgtatgtacagtcacgtgttgcttaacaatggggatatgttctaagaaatgtgttgttaggcaactttgttgttatgtcaatataggagagtactacacaaacttagatggtatagcctagtacacacctaggctgtatgggatagcctattgctcctaggctatacacctgtacagcacgtgactgttctgaatactgtaggcagttggaacacaatagtaagtattgtgtatcgaaacgtatttaaacatagaaagatacagtaaaaatatataatagtgtaatctcatgggctcgctgtcatataggcagtccattgttgactgaaatgtcattatgtggcacaatatgtgtatataagtgtgtgtgtgtgtgtgtgtgtgtatacattgatccttgaacaacatgggtttgaactgcttgggtcaacttacgtggatttttttcaatcaaatgcaggccaaacatatagtattcgtgggaatgtatttatatgagtatgagaagacagggtgagattacaattattggcccaagaggagatgataaataatgggtgttctcagagaatacgggcaggtaatccagagcccaagggagggaagagatacctctcttccactgtaatgggtggggtagagggaaggatctgggcaggtccaggtaactaagaaaccaggtagcagcaaggtgaaggatgtcttactataaaggcttccattttttgtatggagtggagagtccctgcaacgcagttaacagcaggagatgatgaagttgggcttatctttgtggagaataagagagagggcggagttgaaaaccagctgtgtgaacccagaggcggctgagtgtttcacggtagctccaatctgcaggggtgtggtatttccccaggcacgcttagcacttgggagccagatgcttctgtcctggggtagggagggaacagctgggcaagagaagtgaggatttgggcaaaagattgattaaaatgatactgacaagtccctgttgggtaggagaagctgtgaacgcatatggaaactggtaattaggaggtagagggatgaaaatgctaactcttcagggaggtaggggaagaagtagtaaaggaactgaaggtcaagaagttgtggtcagagagaatcatagatgaacattattttgaaggtggaacagtttcaggtgattagatctaggatatagccatttgagtaggtggcagaggtagagtggatgtgaatttccatggaggtgaaatagcaagttaaggaactgagaggctagaatgatgcatgagtcccccatgccaatgttgaaatcatgcagaattggagcgagaactgggcaaaagagaaggaccgtgaaccctggctgccaggtcttcagaaataaaggggttcaaccagaggatctgcagaggctagcaataagatagtcaaggagtcacttggcatatggttcttacacagagatagagaagaaatgccttagaagtggaattatttggaaagagagactaggccttttcccttcatcttggtatccccaatgcttagtacaaaacctggcacacagcatggttcaatatgttttcatgagatgaatgcatgaatgaaagtaaaccaaggcttccatttccttatagcccgaagttatcatttttcagctatatagttgccaagtttaactggtgtttaaagggctttccaggtcgagggtttccttaggacctgttaatacgtcatagctgggaaaaagtagtttgggatgggatcgagtcagggggctgaatagagaaagttttcttgcctctttttcttcacctgcccctgcccctgcccctgccccatcccagagctactgctttcctttaataaaggagtaattaggcactggttatcatgaagtgctagagaatattcctgtgagatcctaaaagttcagaagctaaccatttgttccagtttatactatggaaaaaaaaaaaaaagaaacccagaaatagaccagatggaaaaaccttataatgactgttcctttctataatgtccattttcaccctggatttaggcattattcgattttcctgctcaaaaaaaattccattcacatatgtgttttattgtctgtcatttcaacttataatttccaataaactttgggaaaatgggggaatttcataatatacaaaattttgtccatttgaggtgataaccttgtaataaaggtaagctccgaatgtagaataatttctttaaattttcacttttaaatcaatttgaaattctctgcatttcctttctgagcatggcttttctaatatgtgaaaaagattcaagtatgccaaaattaaggtgtatgtatctaaattaagtattgaattctcattaatgctaggagggtgccatatatagtaaaactatagaatgaagagttcaccccatccttttattgaacatatgtgtggtcacattacttactttcaatatatgatttaagaattttctcctaattttatatttgcttagatttagcttccaggcttttgtcatttctaagcctgcaaagccatgataaagagctattgtctgcggtacaggcaaataaaacttgccctggctagctttccctaccaaaggccacttctaccaactctaactttaaggaaaattaatgatgttatctcagtgatttcctggtgccagtgaagagtttgaattacagatgccttggaaatatgcacttccacctctattaagcacttgatcttatttttttttcacttccctatcaatgtttccgtattgcagaaagccaaataacccaattgtatccactatagagaattcactatttaagtggagagcatcaccgttggcctataatgtccccagtttgtaatcagttaagtgttgcatgactccttactgcctctcaacacattggaaatgaaaatgaaacttggtagaaaagcaggaacaaagataaaatcttggtaagaaggatttataaactgtttcatatagctgatactccattgaaagttatgaagaaggtaatttaagcattttctttctccctttgtagttctgatgacattctacaggtgtgaggcttctaaaattaaaaagccaacttgtaagagcagaaataaaaacgcacttaacaaagcaagtgtatttagtttattaataatgtgtggtgggttggagagagcccaaaccatagggctaaatatactgcagttgataagtgtgacaaatattctgcaaacagtaagaaatagagaacattttgcctctattcagcaactaaagcacacattatagagatttggtacaggctggagttgtgtgaatagtcacagtttctggactcgccctcaccatgacaaaccaggtgaaaaatgcaccgccttctctgtaaatgcacctcaccttttgatggtgcgctaagggtgacattagataggcttcagttgctaaagaagactctcaggacccacaataacatggcttacaaatccgcgctctattgccagaaaaggctacattacaagagcattactgtcaggatatggatccacagccacaggctgcctccacagcaagggggtctcgagaggccagtgtaattattttgccactgtcctacaaaaatctactttttctatataccatgtattatttttcacataggttagaggccatgtctctgttagttctgagtttaagacgtcttgaggacatggccaaactaattttctcagtttatatggtttgacagatattagtgcccaagagaggtctcataacatgacccatctatctcccaggggaaatactgtaatcttgtttagctgttacccactagggaaagaatggttttctctcagtcagatgctaaagagattaaagaacacctcgtaggttccgttttctagtaattattggttccattctccagctatcaaccttggcagcttgccatccctatccttcctcctggaattggatgcccttgaagtgcgcttcttgcactaggaagtctttctcgtcagtttatcatttctcattcaaagcaaattctacctggccaggtatctctagcccagttcctaattctcctaatagaagtttcttttatttcaagtggattcatgccccttggcccaccagacatgttgccattgagaaatagcagctttaatgggaaatacacatgagacacaaaaatgtgactaggctaaaatcatatgaatagtagtcactcctaaaaggactttggtttgggtatgtcacagaaatttctgtagccatccatatccaatttctagcttttcagtctcaggaaagtaggcccaccaaattcaacttaaatatctgtcactgattcaagctgtcccaattgtccctccacccactaatggctttccacacggagtaatggggcaaatagctatttttttaaacacataatgttatgacagatgaaacatacagcacgtaagccttctatcacatgcccaatacctttgttaaaccttcatcatcacaattgatggccacacagtgtttattgagattgttataaatcattgttcttcagatttgactgggtaaatattccctcaggttatttcctgacacagctgattaataacagatatgtcctgtgaaagaagaaccaaaagacattaacgaatactaaccaaaagccacattaatattgctccatggtgttgtagtcgcagttagaacgcccatctcgtcatccagtgtgttggataggttggctgactctcccactcacatcttggctctttcaaggaggaggaggttttagcagagtcccccaccccaagaggcatctgagtctaagccaagggagcatattattctcttattttaaacctctccgtaggcagcaacattatattaggttttccctttaaaaaaaaaaaaaagtatcggctgggctcggtggctcacgcctgtaatcccagcacttcgggaggccgaggcaggcagatcacgaggtcaggagttcgaggccatcctggctaacacggtgaaaccccatctctactaaaaatacaaaaaattagccaggcgtgatggcgagcgactgtagtcccagctactcgggagtctgaggcaggagaatggcgtgaacctgggaggcggagcttgcagcgagccgagatcgcgccactgtcctccagcctgggtgacagagcaagactcggtctcaaaaaaaaaaaaaaaaaaaaaagaaaaaagaaataaaaaagtatctttggtggtttccttccccttgcaacaatctcacctttttccttttatcattaattttaagccaaacctcttccccagctacacacacacaccacacaatgcagacagtccccaacttgtgaagtttcaacttaacaattttttgatttcacagtgatgcaaagtgatatgcattcaatagaaactctacttctagatttgaattttgatcttttccaaggctagtaatatgcggtatgatactctctccccttgctgggcagcagcactgaacctcagctcccagtcagccacaagatcatgaggctaaacaactgacactttactgtgtaaggtgttgctagacagttttgcccaactgtaggccgatgtaagtgttgggagcacattgaaggtaggctaggctaagctgtgagtttcagttagttaggtgtattaaatgcatttgtgacttaagatattttcaacctatgatggggttgtgtgatagcttcaattaggcaaggcacaaggaaggagtaatccattccattgatccttgtggaatgcttgtgcttaagtaccaactaatagccatagtatcttattttggaatattaccagcctttgaaactcttaattgtagccccagttcagggactactaggtctggcatcaaaaaagaaacctgtagtgacatagggaatacctgtaagtgccccacttgaattatctttttaattgtaactggtctcacaggtgtagcccatttctcaaaaatgatagttgcttcagctttttggttgggactccacctgcaggccagagagggtgaagcccagtggaaagaaattctgaacttaacattagcttttggatttttttttagcagccttgccatcagtttgcaattgcctcctaatccattttgttagctccttaggttcaagttctctcacttccagattccactagaaagttacaccatcagtaaccaatttcaaagcctgtgttacttttcaaccaagcgtagcttgttgagcaacttcaaaggttctttttcatcccttttatcagaatcttctttttttctttctaaataatgcctcagtcatacttttagctaagaatgagttggaggtgttctaaacaatcttgcttctgacactcactgccctgacagtggaagttaaacagggttcaattgctaaagaggactcacaggaaccaaatgacagtgcttacgaatctagagttccttgcagaaaaaggatgcaatatacccacaacattaaaacaagaataagtgtcacagccacagcctgcctcacagcatagggtccagagaggacaggtgcaagctataattgccctctgtctgcaagagccacaccacgatgcattttctctcttggaacaagagctactgatgtgagcacagaacaccttggaaaccagggagcacaaattggagtttcagccagggtttcttatatcccgtgggtaacctaggcatactgttcctatgtaaccagcctcaaactcagtggcttccgttggtctgactgtgcccgggtaaaaatggtcaatgttactgttagcaataaacaatggtgataacctgcaacccatggctacacttcaacacagtaagtcactttgaaaagcaagtgctttgaccagggctctgcactgtgtagatattttagcaagtcatctcgtgccaactccagcctctctggaattaacccttactgcacagacaactacatcaaagtgcattgactttcttgaagtgcaaagatttgcttgggaggtccctcagccataagtgtaagttgcctgtagagtggcatgcctgggcaagaaaaatcagcaaacatacagcagttcttccaccattactcacctctttctgtttctgtgctaattagatcacagaattatttatacatcaacatagaatatacagattgacctataggatgaacttggggttatatgggcaccatgagactttttttttctccactaaccaactttttggtgcttctgttttatcctactgttgtcattagcatggaatgcagaatggttttcctgttctgtaaagtcagtaaggacaccttctgccacccacttttcccccttacaatatgtacctccatgagaaatcagaaaacctagatatcctgccataacacccagagtgagtctccatatctctggtctcagttgtctcaactgcaaaatgattttaaagcaaccttctggctctaagagtctatcactctgtaaaagacaaaaaaaatctgtcttacataggaaggaatagcaagagttagctactgtggcatacatagaaaggaaaagaatgagcttttgaagctagaaggttgagaagatgattaggcacaaccagagcctcaggaaccattagtgggatccctgtgttgaagtcctgcctgctcgccgccccccaaccgccactgtctgcttttcctgcacagcaaagaggatcctggagagtcagccatttcttttatcctgtccccaccctctctcacccccacagccctcatgcatagggtaccaccacatggtccctgttcttcaatggcttcaaagcctatagcatcctctactgtaaacataatttagaaagtgaagatgtattagaatacttgggtttttatgtagctttaaagatatatctactagtgaatacacacaaacacacacacacacacacacacatacacacacacatatatatatatatatatataatatatttaatggaaattcctagcttaaggaaacaatggtttcacacaactgtatctgctggttgcttattgagggtcctagaaagagctaatcattacatttaatgtttcatcaaaaagtctaggtgtgttctctaagatgctcattttgaaaagcatatgcatggcaattaaattgtccctattgatattctcacctccttttcgggtccatagcatggattgtgtatacctaaatggaaattttttcaaaatagctccatgaaagttgaattctgtttgacatgtttgtttagggaaatgtgctcttcagtcttctgtgatggattgttcttgtgtttaaccacatccagttttagcagagcacactgcacagtatttctctcctaactgtgtcatcttctgctcctgtaatttcagagcaattgctttgctcccctctggagctatttctactcaacatttgctgttctatgtgttacccattcacctgtacagagataagagcaggccccataaaatgaaatgcatgcagtttttctctgttcatttccatcacacggctaaataagactcttaatacaaaagtgattcgaaaaattttcactagttacttcttaaatgcctggatcagaggcaaaatatttatgatgactaaagcagagtaacaaaaaagaaaataattgaaaaacttcaaaccacccatagcttccttcagtatataaggaaacatgttgggaatattggtgtttggaagaaatccattcctctcttccagtaatggagctggcataccgtgtttctaagtgttcctactacgtgcacttgagtatgtgccctctgaggaaaacaagcacacagaagagagagagaagaaaagtttgagtcttttgtctctggacctcgctccagcctcccacgcagtcttctttcagccattccctcctcacgtcctcccgtcctcctgcctccttgcattgctttttaaaattctttattatttttctcacttgattcttcagataagtctcccaagttatcttccttcctcccactttaaagaaagtctcagcttccatgaaaagggtcatttctctatctttagagtatttcagagcaaaaacagaggggccttcccttccaagggaggagtgcagactcctgcttccaccaccatgtctgtttcatgcttctggggaaactccaggattttctgttttcctttttttaaaagagaaaaatgtgtgcgcaatataggtggaaaagtatttttgcacaaacctacataggtattaaccactatttttgtttttttcttaatatttaattagaactggccatgaataacttgtaaaatatactaaagccttaagtttgcatttctttattactgggaaaggtgtttactgagcgggatttacctctatttatgtgaactacatttataattgaattgccccttccccctagatgcatgagagatttacttaattagcattgattccttgcctcaaaggactgagaattccaaccagagcttaggtgtataaggtagtataaaagcaatgttgttgtgtttctagtttggctaataaattggctttagagaaatgcatcttttcatgacacttgggaataaagcttgtgatttgctgatgttggacaaggttgaagtttcacttttgttaaatttttgtccccagcataagattaaacacctcctcagatcaagggaattttcctccctcagccttataaagttgttagaggacttagaaagaatattatgaaatacaatttgaaggtgaaaggagaaataagcgagcctcaggtctgaaaactggatagattatgcaattactttagtttgcctatagaaaattttagtggagagtatttttttcacctaatattagggtagcagagagatgctgaggtgactgatatttcaaggagaaaagcgcttaatgattataaatgcatagctagaaatagagtttacacaaccttagccatacagattaatctaacagatcttctctaatgctaatacaagaaagtatcatcggatctctttaaaaatttctgctaaaacattttttttttcttattcaggtgacaattgactctgtttatgtagaacaggctaggtccccttaactctcagatattccccagtaatccaaggatgggaattatatctttgcccatatcttcacccaatgccagtgagatttaagaacaacttcagatcctgaatactgatcaaactcatcaacttagagtcgaggcataaaaataaaacacctttcaaagagagtgtggttcacgtttggtgtttattaaagggtatgagagagtcctagctaggattctcagaggaaaaaggacactgaaaggaaggttttactctttgagtcatttgtgattttatttgttttttgcagtggatctcttgagcctgtcagctgcatgtgatgccttggaccagcacaacctcaagcaaaatgaccagcccatggatatcctgcagattattaattgtttgaccactatttatgaccgcctggagcaagagcacaacaatttggtcaacgtccctctctgcgtggatatgtgtctgaactggctgctgaatgtttatgatacgtacgtatggcatgtttttatttcccgggctctgtcacaggaggcttagcgtacagaatggtgaagtgtaattagcattacaacagggccctggaagctgtggacctaatgctcttcctgtgataaatcatttttgcatttatgacttgaaaaatattttgataagctaggagttaagagccagaatgtagattgctctcagattagaaaacaaacaaaaccctgagacactcattttgcaaatagtggaatgagtcgacatatagcctttggttctttccctttctcgcccatggattttggaattcttccatgcacttcaggggtggcttcctctcactggcggccatggctgtgctcctggagatactggcacacctgtctccagatcagaatggtcttagctgatacttaggacacttttgcagaagattatgaattgataggccaaacaaaatgaaaacaagcccttaatacagcaaacttagcttctcaaactgagaacatttttcgttttcttttgttttttaataagattttatgaagtttcagtttggcgcctccattcatcactctctcttagagaacaattgtttgttttggattgcacacaagggagatatccccagttctgatttttttttttcttgagcttaatgaagacaattgaagaagggagcagaaggaattggtcttaattttgcctaaattcttcttagatctcaaaattattacatgcctcatttcaccaatcaagaacatactcccatttggaaatctgggaaggttttctgaaaagagttgcaaaacaactgttttgccttttacctttgttgtagacttctactaccttttgaactaaaatttatacctttttttctttcttattttgataaggtattgctttttaaaatttcaggaccacctgactattacattcatcatagtcatctaccaagtccttgaacatgtcggatttcaattgtgaactacgttcacattagttttgataagagtttgtattcaggtttcccctcaaatatattttggcactgttttctttgcagatgacatgtgaatgcattctgaatgtataacttccttctacctgactgaaaagtatttggtgacaattttaactccttgaagacctgagttgctgtataaagtggatttgttaaattttgatctaccttttcttaagagggagaaagataagaaaattttccagtgataggaatttgtttagtccattagtgcccaggatttctttttgactgagggatttaataaattttagtagctggaagttgagcatattgttcaccgaaaataaccgccattgggacctatcctttgtgattttgaagtgctaataggcgaattattctgaaatattttctcctttttctttttaccaatatctaagggccagtagctttccgtaataaaataagaagccaaaaaactattgaaagacactttttaactttaattttaggtttcggggtattatgtgaaggtctgttacataggtaaactcacgtcacgggggtttgttgtacagattatttcatcactcaggtattaacccatttatgcctagtgttccattattggaacactaagcttgtgggaattattcctatcctactgctcaaggtcatcgccaaggtctgattttcacaaaaagtaatatgcagcctccagcataaatgggttaagcgcagtacccaacagttgtcttttctgctcctctccctccttccaccctccaccctcaagaccccagtatctgttgttcccttgtgttcgtgagctctcatcatttagcttccacttagaagtgagaacatgcagtatttacttttctgtttctgcattagtttgctaaggataatagtctccagctaatccgtgttcaaaagacatgatctcattcttttttatagctgcatggtattccatagtgtatatgtaccatatttctcattgatgggcattcatattgattccatgtcttgaaagacattttctacaaaatggaaaacttttcattcttatttttcctttttttcccccatggataaaattagcttattaataaatttgttatgtgaaatgctttatttcagttttctatatgcaaatatagaaaatgctatgcaaataaaagcaatctatattaaaacactgatatagcaacaggttatttataaatttattttttagatcatatatttgaatgttgtttaatagagtatgatatttttcttacggagataaacatttatattctatattatgtgttatgtggcctgaagtaattaattttctttcaataaggggcaatctgatgaagatctgagcatttaagagggctgagcagttagttgctggtaatttttttggcttccatgaccaaagtaggtaatttgctttagtaaccaaagtagattggtgaagattagtaattcttctgcttaccaacttaaaccaaggtggctttccataggtgaatagaatttttttttcttaatttatgtagaacttttgcagttcaaataagggtttttaggaattgaaacttggtaaacattcagtggtcaagttggttgaatttccattgcattgtaggtcatcagtcaaagagataatgaatttggaaaagttcaaaacaatcttaataaaacagtggtcaatagagttcacacatcattgagcactttactcctttatttttccttttcaaggctttattcttaactagaagtgtttaccctctaggaaagggtcagtaattgttttctgctttgattcttcataataggggacgaacagggaggatccgtgtcctgtcttttaaaactggcatcatttccctgtgtaaagcacatttggaagacaagtacagatgtaagtcgtgtatattaatgctgtattcttttattaatgttggctaattaccctagttctagatgggaaatgacagactgttcttatttgacagcagattcctcatgtaagatgtagaactgcttttagagtgtcataaaatttggtttgtgccattccttgtcaaacattaaattgcaggcatttaagtagagaatgaggattagcttttccagtccaggtattattttacattacattgactgtgtctgaataaaacacatgttcctaggggataaagtctgattttctaacctctttctgtaagtcggaaaaataagtgtgaagatttaatctctgcacttgtctagtctttgggttcttatttaaagaataccatgtgacattcatgttcaagaaacattgtttattttataatcatcttactgcaagttgtactgacacatccaattccgtgacgtgactaacattttattatttgagagacagatagcttgctgtttcttaaaggatagatacgtaccaccctacagaatttccttttgattacgcattgggttcttctgcttaaaaactgtaaaaccaaattaaaagccaatgctagaggagtgatggttcagatgaccaagtgaccatccattcatattgtgaaaggctgcagttggttttccccttgaaatgcttataagcaatcttttcagtaggaatattaaacaaattcagcctagcttgtcttttctctcttcccctgaggcctagccacacatgtgaggagatgtgctaagcttcaggacaggcaggagataaaagccactctgtctcctactgatcatttctccttcaggagtaagccacaaaatacacaaaccattttggccctcacttttatgtagtttccacttgagttttctcatcctcagaacgagagaaaaataactgaacagcttttgttaaccattttaaaatgtatttcggatgagatgggatacctgtgtgcttttctcctttaaatattgtagttacttagtataggttaggttctaatctaccgtatatatggtatagtgacagcacattgtaaatataatattaaattgaataattgaggaagctttgagttggtgtttcgaataactactaagagggaacatgtttttaggttggtgaaacaaaaatattaaatgcaaaatgagatgtttgaaagtaactcataactttgaaaataaacacctaggtatgtatatcggagagcagataaaaagctgtgcgtacaatctcaatttttagtgccatcttaggtatcctgttaaaacatttaatttcctagagtttaaagtgtgcttatgggtacagaaagctttcttggatttactttttttgaggggcaacttctaggtgaatataaggtatgattaaaattttatatctgagaacaaaacataacattgcaagcattcagtatgttcattcattctgttacatatattgggcacctactatccaccgggtactgccattctactgtagatacttctggcacacaactgaccaagatatggttccttccctcaaggggatataagtctcctgccaaaaacgatagacacatattgaatcaatgccagcataacatgatgtgagctattaattagaaatacgcagccaggcgcagtagctcacacctgtaatcccagcacttagggaggccgaggtaggaggatcacttgaggtcaggagttcaagaccagcctggccatcatggtgaaacacgtctccagtaaaaatacaaaaattagctgggtgtgatggcatgtgcctgtaatcgcagctactcaggcggctgaggcaggagaatggcttgaacccgggaggcagaggttgcggtgagcagagatcgcaccactgcactgcagcctgggcgacagagcaagactccgtctcaaaaaacaacaacaacaacaacaaactatgcacagtatcctgtgggaacacatacatgatggactagaagctcagtgatcttatgactccataaagaagtcccaactgtggtacatttttgaatctctggtgtccaaggagggtggtgctttgggccagttatatgtctcttaatgctaaaacacttattttttgatgtagttacatcctatatacaataattcccaaggattatgttctggcttagaagaaatttaagtgtcgagggtacgtgtaagcttgcgcttcttgcagtgacacagtttatgtaaaagttatcacacttcatatatatacagtgatcattaacttgattcataaaaataataaatatccagattagcacaaattagaagtaaccccactctgtggaaatactggctactcttgagaattgctactggaattgagttggatgtcaggttctgctggcatccatgggtgctgtgttttgactgttgcaattttcttcttcctttgtagaccttttcaagcaagtggcaagttcaacaggattttgtgaccagcgcaggctgggcctccttctgcatgattctatccaaattccaagacagttgggtgaagttgcatcctttgggggcagtaacattgagccaagtgtccggagctgcttccaatttgtaagttattcaccttctaggtaacatatttattctttcatattttagaaattaattaaaaaacccacagagcttcgttttctcatattagctcttcagtaggcagtaggtatgggatttgggatatttggaacctctgtaagtaagcagcttctggaactctaggttttgggaaagaagacagtgctgaggaaggaaaagaaatctccatctgcagcagggaccccacagttattgaggtgctagaggggaagaagttcagcaagggaggaaataagtctctagccacagaaatcctatgtatataagaaaatggcctttgtaggcgagtctcttagtctctgagtcctttctctaattctatcattatagcctcctttcaatggctgttggtaaattgttagcacagctgtccttttttttaaaactgtcctttgtagctttgacattcccctattattccaaagtctagaggtgtatactctctgctaatgtccatcactgactgaacacactcttgtccgttctctttcctatcctgtcccattgctttttctctgtcgtagtcagtgccccagaaacaccctcttcttcccaaatgcctgagcactccactggtagacattcatcttgttctaatttttttttctctttccttttttttttttttttcttttttgagttgcagtctcgctctgtcacccaggctggagtgcagtggtgagatctctgctcactgcaacctccacctcccgggttcaagtgattctgctacctcagcctcccgagtagctgggattacaggcgcccaccgccaccccaagctaatttttgtatttttagtagagacagggtttcaccaggttggccaggctggtctcaaactcctgacctcaggtgatccacctgcctcgaactcccaaagtgctcggattacaggcgtaagccaccgtgcctggcctctaatttttattaggtagatagtgctacaatgaacatccttatcgtttagcttttgtctttgaagctttctttataggatcaattctcaggcgtgtgattgccagacaaaataatataaacattttttgtggcctttcttcaaaagttgttctaattgtaacgctatcagtattgaaggagtaagatgctttcggtatcacattattcacagtgttcttatgtttttgtttttggttttttcaagtgctaagagctgtttttcttatgtagggtttctcaatccattctaattctattaacaatggctgagatttacaaaatggaactagctgtagaactaactgggttatatctgaagtctttgaccacagactaggatgaaactatagaaggtttcctgggcagatcactgtgaatatttaggtgtttaaagcagtttgagtatttatttaatagttagttggatagatttaccggatgcacacataataagttcatttatgtaaagtgggatatactgtttgaattattttgccaaaattatggcaaattagttgtaaatgtaaaatgcatgtggagaaataaatatcttttcctcctcatacccaaaccttccaaaatgcagatagatgatcaatccaatcaatcatcaaaatgtagacacaagtaacttccatacaatgaatattaatggccacaggcaatctaggttcattttgattttttaaaatccaattataaaacaacttgccataaacgcgagttatttcctaatcttttggttgtgtgttttttttgttttgttttgttttgagatggagtctccctctgtcgcccaggctggagtgcaatggcgcgatctcggctcactgcaacctccgcctccctggttcaagcaattgtcatgcctcagcctcccgagtagctgggattacagggtgcctgccaccatgcctggctaattttttgtggagacagggtttcaccatgttggccaggctgagctcaaactcctgatctcaagcaatccacctgcctcggcctcccaaagtgctgggattacaggtcctaatcatttttcccctttagtcaagtctcagttactctttgagttctagtgaaacacacacacgtgttcatatatagggatatataaacatatgtgtgtgcattgtgacttgggttaaaggtaaggctcagtgatggtccctgctgcaaagtaaactaggctgtattcagggccagctggattctttgttttctcgcccgagtactgactcatcaggaagccaccaccatcctcactgcagcctctggccctcttggatttggttgtcaggataagcggtggccatacagaagctctgctttccctgggctgccccccttatcaggagaccaacctattccatttctgcctgctacatccttttgctggataacctcctactcccctaagcccatgtctctggtttggttacatttctgtctctgtaataacaactctgtattctcagtctcaaagctttgaattcagtccatccttgcatatttgttgaatgcctcctggttggccagccagtctccaagctctttgaaatgtgaaatgtgttttgttttgttttcagaaggggtctaacttcgtcacccaggctggagtgcagtggcacgatcacagctcattgcagcctcgacctctgggctcaagtgatcctcccacctcagcctcctgagtagctgggactacaggcatggaccgccacgcctggcatttttttggtgtatgtgtgtgtgtgtgcgtgtgtgtgtgtgtgtgtgtgtgtgtgtgtgtgtgtgtgtacagggtctctcgccatgttgcctaggctggtctcgagctcttgggctcaagctgtccacccacctcagcctcccaaaatgttgggagtacaggcgtgagccacggcatccagccttgaaatgttttctatgagactggggggaaatcagtcaagatatgaatggtggtaacaggtggcttttgattttctctgtactatttttattttctgagttttcttctttgaacatttataattagaaaaaaaattagtaaagtgctgcctctttttttagggaaagaaacatgttttgtttgattgctttccattgccattcttacattgtttccaggccttctcatcattgcactggcttcctagcaagcctccacttcacactccagtccttttcattggtcttattgccctcatactagttttagagaaaagcatttcccatatgatgccgtccttgaaaatgtcagtatctttctgttgtctagtgaacaaatcctaattcctctatttaactctcagacctttcctactctggtttcataaccacccatagtttgctttcactatcatgaaacagcttctccttaccatttgtacctattatgcttataaataatattgttaccattgctactaacaaaactttgttcacatgaattctctcatttaatcctcaccaagtctttgaggggaacagaatagtcaggctttggagattttgcttttattattgtttaagtggatgaataatttatttgcgcccttaaagtccctcagctggtggaagggtttgattcctagtccagtatgcccaccgccacatttactacctcattcccaaatatgtagtttctgatacttctgctctccagcttcccaaggccaaacaacagctacttttcctgagtcctggatagaataagaaaaggtataacaagacaggggacccttgagggggaagaggaattagtttgaagtgctggcaaatgtagtatttctaatcagatgctagtaaattccatatgtatggcgaggctttcattacttagatttggggagcctctcagcgttttagcaatttgcaatcaggttgaatggatccattgtaaatacttaggaatacttaggaatccacgtcctggccctggcatgcttttcctcggccaggtgcactggcggtcaccttgcctttcattgtgccacgtgcataaaaatacaatgtttgctgtagggaaagataacaggagtgaaaatgtcctctgccctttgtttgaagtataggaccttcagaatgaggctgggctggttccttcagcaagcttgtgctcaaaggctgctatttctaccagcctgaggtaaacggtaataaagtacttgtttatcctacaagtgcattccttgcattgcagatttgatttcctttgatttcttgtcaccacctggaaaccttactttgtttcaggttggtacagttagaaaggtactgaatcttctgattcagacaagggcccagtagtggcaagaagagaggtacgtgtttgtgtgccacactctctggattatctattaaaggttttctcatatccctccccactaaccacttagaaaaggaaatcacctatcaggtctaaatgtaaaattttgcttatttaaaaatcactataggtcttccaaggaattatccattaagccaggaaatgaagtcacatccatggatatgaaaaaggaatagtcactgtaaatttatggctttgacagtggtatcttcgtagatactaaatgaggcaacaggatatgtttccacattaatagcatattgcagtcaacacatttactgggaaattgactcattttggtagtgatagaagtaaagttttgcaacgagtttaagagatacagctgtaattaatatattgccagcttgttcctttctcatattccatggaaacagccctgttgagagattagattgatttttacgaccttagtaaggccaagcctgccctggcagtgagtcacatagactgcctgaaggaaccttgaggattttctgcacctctcctttttcagatgagaaaacaggcccacagtggcacaatgaatctagtctacatcgtgcaatttacatcatgttatggcttcaaccagttcggagactagattgaaatgacagagtgttaatgtgtcaatgtgatcccctatatgaattttagattgtaatagaatgagatagataaataaacacccctcccccaaaacacatacatgcacacacacccatctttattgaaaatactctaatcccaacatagctgtttagtctatcttcagataaaaccaagtatcacttttaggtgggaaaactatacagtcatgtgctgaagaatgacgttttggtcaatgacaggccatatatactatggtggtcccataagatcaacgtaagaagagattataatggaactgaaaaattcgcattactttgtgacactgtagccattgtaacatcatagcacgaagaattatttcacaaacctgcactgccagtcatttaacaggtaaaaaagtatgttttaaaatatttttaattattatggacacataatagtactcatttatgggttacatgtgatattttgatacaagcatacaatgtgtagggtaacacaatcagagtaattggggtgtccatcatctcaaacattcatcatttctctggtaggaacattcccatttcactcttttagttattttgaaatatacaataaattattgttgccatgcatggtagcacgcacctgtaggaccagcgtttcaggaggctgaggtgggaggatcacttgcgcccaggaattcaaggctgtaatgcacaacaattgcacctgtgaatagtcactacactccaacatggacagcatagtgagaccctatctgtaaaaagatttaaaaatatattgattactatagtggccttattgtgctaccaaacactagatcatatttcttcttactgtatttttgtacccattaaccatcccttttttatcccccgatcttcactacatttcccagactctggtagtcatgattttactctatctccatgagttcaatttttttttttttttttttttttagctcccacacatgagtgagaacatgggatacttgtctttctgtgtgtggctgatctcaacataacgtcttccggttccgtacatgttgctgcaaataatgggatttcattttttatggctgaataatattccattatgtgtttatagtacattttctttatgcattcatccactgatgggcgcttaggttgattctatatcttggctattgtgaacaatgctgcagtcaacatgggagtgcagatatctttttgtggtttcgattttgtagtatcttcttcagtaaacattttaaggactttattgtttagataacgtcaagtataccaactttatattcaatatgcttcacctatgagagctggagtgtcaaaatctgtttattttacatctgttttctgcctcctgttgtacttagtattccaaatgagtaagttgcttttccatctatcttctgaatttctctatttgtatgacaaaaatgaataccatctatgcacagttgttgtaataatgtagaatgatatgaaaatgagaataaattacagtctcaactgttgagaacaagtatttctctgtgttagaaacattcccaattctactcttttagttattttgaaatatacaatgtattattgttgccatgcatggtggcatgcccctgtagtcccagctactcaggagactgaggtgggaggatcagtaacacataaatgagaaagcattccagaatatctggagaagtgactggcagagtggttaagtgcataggctttgaaaccgaactgtgcctgagtccaaatctgagctctgctatttgctggctgtgtgactgtggacacatttcttaaccttcctggcccctgaactcctggaggtgattgtgaggattaaatgaaccaatagaagcaaagcacttaagagctgtagtggatacatagaaggtgcccagtgaatgttagctatgattatctaaagtgtgttgtggcatgaaaatatcctgccaatgttaacagttgcttttatctataacaaaacatcatctgtggattgcattttagagattctggagattctgtttctctgcaaatgttaaaatgccatatcaggagacttttggctggttagacagcattccccgggtcaactgattacttttttttttttttttttttttttttttttttttttttttttttttttgagacagagtctcgctctgttgccaggctggagtccagtggtgccatctcggcacactgcaacctccacctcccaggttcaagtgattctcctgcctcagcctcccaagtagctgggactacaggcacgtgccaccacgcccagctaatttttgtatttttaatagagaaggtttcaccatgttggccaggatggtctcaatctcttgaccttgtgatccgcccacctcagcctcccaaagtgctgggattacaggcatgagccatcacacctggccgattccattttattaatagattttccatcctgaaagtaactcctaaaaaccctccttcacttaggtttcctttggctttttgtgtattaatcagactgtgggccctttggttccatagacattccttttacaccccttttggacggatgaatactcactagtaactaagtaattagtaagagttactacaatttggtatttataaagaggtggcctttcccagaattgaaggtagaccctaatagtccaatcagccttccatagagatagctggctgccatgaaaagctgagagatatcaccgacctcttactgggcctgctcatgaacagttagttaaaattcctgcaattttcagaaaagacccttatcagagtattatcagtattgtcttaagtttaatattggtttccagttgttatttttaaaaattttaagctaccgtgggttaagctttatgatgatctgtttaagtggtttgtttgattaacttctctattggagtaatggatgttttcttcaccagaattttgaagataggtttgtgttgtagttgaaacctgttttgtttatacacttactgctaaggaaaagcacatgtcattttgttttccatcttcatccttctaaagtagcacttcattgttatgaccaaatctttctttcttccttccttcctctcaccctgtcttttccttccttccttcctgccctccctcccgcctctcttcctttcctctcctctcctttcctttctttctttcttttctcttttctttcgttctctctctctccctccctccctctctctgtccccttctccttccctccttccttcctttcttccttccatttctatcacccctaaaattccatcatgctgtatcatctcactaagtcccaatctctggaaaccacagctctgttttctgttcctgtaattttgccttttcctgaactggattttaaaggattgtaggaggcagtagtggaagagctaactttatatcttgttcttttacataatgcgccctgatccacacttgggaaagtatattccatggtacctatagacagatatatgtgctttaccatgtatatgtgaaacttttctaatttaactttcctgttaaattagaactcggtagcataaattaatactgttgagtatacttagggatttgcatagatttaaaattgtgcatatgttccctagggccatggcgttaattggtttattagtcaggtggagtgcagagcctgaggtcaggacagttgtccttgaacatggaaatgaagagtggataatcaccatgtgttattgtttgggctgattttatctttaatgggtgattcagagtcctgattaatatttagagcagtgactgctggcctcctacctgctcattatcttcagaactttaaataaaatacttgatttctacccaagatggtagttatgggaagccttttacttcttcttgtctcacaaagacaactcttgacctctcaatccttaaacaaaaagttctgcttctgcgcatgtggggactcttaaactcattttcatgcctggagattcacatttagggatctaggaaaagcacatctaggcagagtcgatgaggagatgctttaagaaccgtgacaaggacaggaaggaaatcaattttgcgttaggtttgtatttttagagaaaacgaatcctggggaacttttcacactcattactattgacattaataccattgtcctgtccctttcacagttactaaaatcactcttgcccaccctcctgccttgcccacaacctattcccatgaaggggtgacttgggagaaataacggtttccaaccaacgttttattttggaaacatttcaagcacaaagagtagttgaaaggatagtctaaagaacactcatctgtgtcatacatctgttcaatccatggttgcttttcgctctacttacctcctccaccctctcagctctgtttatgtatgtgtctgtctgtgtacatacacacacaaacacattttcccctatgccatttaaaagtaaaggagcatcacaacataaacccctaaacacttcaccatacaccattttcttaaaggatgacattctctaacataactgcaatgctatcgttacacacaaatttaacagcaatccagcaataccctctgatatgcagtccacactgaactttccccagtgccccagaattgttccttatagccactgttttcttccagcatctagtcaaggtttttgtctgtcatgtctctgtaccttcatttagttttgaacagtctcccagcattttgttttcctttcatgacattgacttttttggtagggggacagagtctcgctctgtcacccaggctggagtgcagtggcgcaatctcggctcactgcaacctctgcttcccgagttcatgtgactctccacctcagcctcaggagtagctgggattacaggcatgcaccaccacacccggctgatttttgtatttttagtagagacagggtttcaccacgttggccaggctggtcttgaactcctgacctcaggtgatccacctgcctcggcctcccaaagtactggaattacaggtatcagccaccacgccgggctgacgttgacatttttgaagagttcagaccagttctcttgaagaatgtcccatactctgggcttttctgatggtttccttgtgattagattaatgttaacattttttggccaaaagacgataagatgatgctctgtacctaccactgtatcacaatctggaggaacaaaataacattttgttcctattggtatcactaagaatgttaaggtggtgtctacaagatactttccttgtaaaatatccttttccctttgtaatgagaaagtaattttttgatattttgacatattataatatccattccttaaccttttaccctatggttttagcatttatggatgatccttgtctaattcagttataatattggtggttgcataatggtggctttctaattctaccatactttctgcatgtattagaccattttcttatgtaaagaagagcttctacctctcccccgtctattcatgaatatcactgtggacatccaaggtggttctgagtgtacaaagaatgatatctctctttactgaactgccattggatactatttttgtcttggaattgtttaaaatggcagtgtatggaattgaaagtcctttctccagagagccacataaacagatgtctaataaatacatttccatattaaccaatccttttatgggaacaacacattgacataattaaaacacgtaacatgaaaactgtgctgaattgagaagctcatagagttttgtttcttttttttcctttttgccacttcaatatatatggacccgcacctgtcagtccaggtagctcatacatgccgtagcatctaatggtacgagggacatgtaatgctgaaaagaagggggaaaggagttgatcagatgagatataagtatgcatttatcagtgttgtggggtattcacttgcaccttccattggctctcgcagccatgttatcggcatataattcagttgaagatttatattcacctggaaattgtcctaagtgggccttgcttacttagctatcagactctagtactttcaaacaaattaaagattcaaaagattttggggatcgccttgctttttcccataggaaatcacttttgtcctgtctttttaagactattttaagcatatatttcagtattaaaatcgtagataatcttaagctgtttccttaacctctttgggccttttcttatctgtaacataaagttaaaacaggttatctcaaaagttacttatccctaagtgtctttgattctatgctaaatgttataaaggccgaaagggaaatggattattgtacttatttcaaagcttggccatgatcagcaaagtcttacctgatcttccgggtaacaactcttgtatcagagctataagatatagaaaacagtcttgtacatagagtgtggcatttcacatgagaccaagtgttctctgaatggaaacacacactaagagcaagatgtgaaaaaccattgtgtacaacctcatgtaaatgatcccttgcgtccgtacactatagtttcctcagtaactcaaaggtaaaacccaagtatcttgtgtctaagaggatcaaaatgtcaccttccttctgttttatttgttacatgcaggttttgtatagttttatagagtctttttatcactcatttgattttcataaaaattgggattgtttggaagaagagtcattaatattctttacagcttgttcttgttcctccttttatgttctctgctggtgcagacttctctcttatgtaaaatattccactgatgcccttggtagatttagaggttgttaaagaaattgtaataacagatcagggaacagtcagggactgcctgtcctatactgtctgaccctgactaaccgttctccttgtagttttaaatctttgtgtacagactgtaattcaaaaaacagtttttataaatttaaattcagcaaatctttccaaatgctaaggctttttataacgagggctagaaaagttgagttgtcagctattaatgccaatacctattaacaatggcaatgacattgaaatgattttttggatttatgaagggaacatgttactaatgaaaatagcaaatgaaaatggccactgtattagtccgttttcacgctgctgataaagacatacctgagatggggcaatttacaaaagagagagggtcattggacttaacagttccacgtggctggggaggcctcacaatcatggcagaaggcaaggaggagcaagtcacaacttacctggatggcagcaggcaaaaaaagagcttgtgcagagaaactcccgtttttaaaaccatcagatagtgtgagactcattcactatcacgagaacggcgcaggaaagaccaacccccataagtcaatcacctcccaccaggctcctcccacgacatgtgggaattgtgggagttataattcaagatgagatttgggtggggacacagccaaaccatatcagccacaaaggagagattaccctttttaaaaatctgtggtttgcccacaatgttttccataaatttacctttttctgtcaataaaaatgtttaggaattctatttatggatatgtatgtatttaatatttgcatatttagttcttattttttctctaaatggttatgacctgtactaagtaaaatcaaaacacacacacacacacacacacatacacattgtactagcagacctgctttaccttgcttgggataattatctgccatgattaaataaataaatttctgcaactgtttatcctggaatacactgcatagagttgtcagtttgagaagcaacttgatttcaaatctgagtctacaattttagcgtgtttccttgtgacttctagtttggggcttttaatttcccttttgctctctctaccctcagtttatgaacgagtgtggcatttcggcagttgaataggcctatggtagcctcccagtttctgtgttgtagaggatagttgccggcttattaaatgcccttgcaggactctcagggaagtctgttgtttagtgaatagtgatgaatcaatgtggatttcttagttttgacaagtgaaccatatggttatgtaagatgttaacattggggcagggtttctcaaccttggtgctactgatgctttggcccgaatcattctagttctttgttgtgggaagctgccctgtgtgctgctggatgttttgcagaatcctggcctctatctactaaatgctagtagcaccccctccccgccctccccctcccccccccccccccccccccgcccagttgtgacaaccaaaaatgtctcccgtaaaagataccaggatgaaatcactttttgtcagtcccaaactaactagagccagggcagcatgaaaggaggagggttcatggttacatgcctgagataaagactgtctcaaggactttctaaaatcgccccacaagaaattcctctgttaggactgcagcagtgcacgtaatatgctctcaaaagaacatctgcccagtaatggcatccccactaataaactgacaccagttctggcgttgagcatctgaaacgaactatgtttccaagcagcttatgtaaacttctgtttttaccaataaaagtttccctctacagtctcctcttcagatgcatcttgggttgtaatcctcatttctaattccaaaataaatttaacatatttggcgatgtttttctctgatgttttttggtcgacactccaaacattgttatatttcctctggggtacggcatcatttccggttgagaaccaccgacctagagaaaagctatctgcctgtgcagttcctttcaagggccccaagtgtgaattttgtgtatacctatattttaagccagatcattctgtacataccttctaagtccagatgaagtctgttagccttttatgtgtgataccatcacatagaaaccaacacaaggacatttactgtaatcgataaaggaaattttggacagtttgagaaagtaacttattttgtcttctgctctttataaaatctttacaagtgtatgtttttgctcttcaggatgactaggcagctttttaaaattctgacttcatacagattttataatcttccttttatttcttgcgatcatattgcagttgaattcccacccactgttcaattcagcagattttaacagagactccagaagtatagttcctgtctttaattaatctgcaatttaggaaagaaattaaggaggtatcgttctgtattgtttccaggatggtggtttcttgttatctgagaattactgggcacagtctcttgcccaatgtttacttctctatatagagttgacccttgaaaaacatagatttgaactgtgtgggtccacttataagtggatcgttttcaaccaaatgcgtatcgaaaatgcagtactcaagagatgtgaaacctgcggatatgcgttcagctgggcctactgtgggacttgcgtatgcgtggattttgctgtatctcaacagcaaaatccccgtgggagtggggctgcggcgggccaggaagcaacccctagcatatactgagggatgactgtactaattattgtagtttattaagtgttcacatggttttcacaaacctcacaattgaaatgccaattgccttctcctaaaaaatacaatgtacgtgttcatggtagctgggatgcagggcttgctgagaaatacttaattgcatttcttctgtagccatgaattgattttattaccttgagagaaaaatgagtattcaggtggacctcctggcaggcggttggcccttcagtgtccaaggatttatagaaagcacaacatcaaagaaatccaaaagttcttcggaaccccagcaactctcctacctccaaacttgccatgtaatgcccttttaaacttattatattgataggtaaatcggtttgctagaaattccagatattgagaattctttgtctgtgtaccttgttatatttgtataaaggtgatatttgtatgaagccaccctccagtgtgctgtaacagagcaatagtaatgacaactgattccttcccctagcttttctgttatggatagttgctggcaggtgaggaccaacagaaaaagaggagaaacccaacataattccaaactgtgaccatcataatggaaggagctgtgatagctttgctttctgtgtgtgcatgacatagaaggggaaaatggagttattgccaaaacaacagcaaaagcaaaacaaagccaacaaacaaaacaaaacccagggctaaatgacctttccaagagattttgcttgcatggcttgaaactggtgtttagagatgaggacaaggtcacccttgatactgagaggggattatatctgagacttatatgtatctcaacaaataatggtacttacaaagattatctcagtccagtgaatgccatcatacttatcttttgaccttaataacttcctgctattccaatctatccctatatatttttttctggaatgatcgaaatgtaattttagctgggtttaattctagttctgttaggtctttacagaagcttgcctggcttttaattctttccttcttcattgccagacaaaaggagagggaatataccactaggatacagagtagtttgtcataaaaatgaaagattgaaacagaatgagaacgtgaatccccgtaccttgtcttcagtctgtcagttggcgtaggtgagcagttttaaaagagccaacatgatggatcttgcatcttaggggctagaaatttgagaatgttcaacctttaagcatagaagaatctatagttttttgaaagagtagaacattctacagcctcccttggtaattcacactaatgctttaacaactttcagcatcaggaaattcttccatatgagctacagcctaaattcttcatgctgcttaagtctgtttcttcttgttctgtcctcagtggagagatcgaacagctggtcacaggcccctatgcgagagccattcacataattgaaaactgttattaaatcgccccttcagaagtcactcttgcttgttctctctctctctctctctctctctctctctctctctctctctctctctctctctctctctctctctctctgagaatctgggaagattccagagctgattaacatgttgctttactgatgaccttctcagcttttaatatgttaacgtgctctaagaattttaagaggcagatataatgtgcactgtttctttcattaatttgaccttctcgtgaagcattttgctggacgattgatctgctggacatactgggaaacactgactcagagattttagttgagtaggaaccgtgtgtgagcctacggtacagaacaaaagaaagtaatccagttacactgtctggagaaatagaggtacattctccgcaatcatatttgaagaatagttttctaaatgacaatggcaaactaagccgtgtcatatgaagaagaagtaaaaagaataggaatgaagaggcatggacagataagacagctctggtaaaatatttaaagggctgttcaaagaccaagaacttctgggttgctggtcagatggataataataatgacaataacaatagcaaacatgattcttgctatgtgtcagacacggttccaattgcctttcatttgctgactcacgtaatcataaaataactctatgaggtaggcactattaatatttccagtttgtagcagagaaaaagtaagacacagagagataaagttattttcctaaggtcacacagccagtgagtggtgaactccagtggtttaactctggaacttctatatgctgtgctgatggatttcagctcaatgtgatgcagcacttttgacaggggtatctggacacaggtgttcaggatcaccttctaaggatgtttcccagctctctcacatgggtggtgtagtggctgtaagcacacactggcatgggtaagagtttggactcgatgaatgctgagtttggactcagtgaatcctgaaagtcttacagctctgtggtgccatgccaaaaggatgaatggacttgcatgatctttttcatttttagattgcataattctttataaacttttttttccacaaagtacctctgtgatggaactctacacagagaaaagtgctcagcaacagctttttaaaatttaacttgtaagttcaggggtacctgtctaggtttcttatgaggtaaacttgtgtcatgggggtttgttgtacagattattttgtcacccaagtattaagcctaatacccattagttattttcctgatcttctccctcctcccaccctccatcctctgataagccacagtgtgtgtttttcccctctatctgcccatgtgttctcatcatttaactcccacttataagtgaaaacatgcaatacttggttttctgttcctgcattagtttgctaaggataatggcctccagctccatccatgttcctgcaaagaacatgatctcattcttttttctggctccggagtattccagggtgtatatgtaccacgttttctttattcagtcttccattggtgggcatttagattgattctaggtctttggtaaacagtagcatttgatcggaagtttgaactgataccattttgcagctaggaaatccaaagttaaacagtttattatagtgttgctaaatttagaattaggggtaatgactggagtgctgttgaggtgatcagtgttataagccaaatgacctgtcagtctaaaccctcctgcctttctatctgaaatgtggatatgtcctttattaggaaaccacattacaagagaagcaacttggctttgcagctcaaatacccatgacttgtgtgatactaagtattcccatgtcatatattcaactgaaattggctgtggaataagtaatgcttcttggttcttggcaaaagcaaaggagaatcatctctggagaaagcacttttattctaggctcaagcttttatttatctctagaaaatattggtaaggtcagtttagtacgtggtaaaaaaaaaaaacaaaaaacatattaagcacacaagaaatcaaggtggaaaaagaaagaaatcaaggtgaatgagaaccagaagaaatagcaaaccatagaagcagacctacgataacatcatattccagaattattagacagattattttcttaattgtgtttatgcagttagaaaaataaaaaacaacattgaaaaatatctacagggaaccacaaacctgagaagttaccttaaaaatgaccaagtagtatttctagatgtcaaaagtacaataatcaaaatttaaaactgtatgggtttacagcagaccggcaagagaaatggatacccagacagtaaggcagaaggaattaataagaatgaagcacagaaggatgttttaaaaagatgtggggcagagaggggggaactagggaagtcctgttcagagaaatatagattgaagaagagtaacatttatgtaacagagttctgaaagtagaatggagagggaatggagaagaggcactatttgttgagagaatgacggagaagattccacagctgattaaagactctaaatcacaggtttaagaagtccagtgaatcctaagcagtctaaatcaaatcctagaaacagcacaagatagaaaacagatagattatctttattttttttattttatttttattatactttaagttttagggtacatgtgcacaatgtgcaggttagttacatatgtatacatgtgccatgctggtgtgctgcacccactaactcgtcatctagcattaggtatatctcctaatgctatccctcccccctccccccaccccacaacagtccccagagtgtgatgttccccttcctatgtccatgtgttctcattgttccattcccacctatgagtgagaacatgcggtgtttggttttttgtccttgcgatagtttactgagaatgatgatttccaatttcatccatgtccctacaaaggacatgaactcatccttttttatggctgcatagtattccatggtgtatatgtgccacattttcttaatccagtctatcattgttgggcatttgggttggttccaagtctttgctattgtgaatagtgccgcaataaacatacgtgtgcatgtgtctttatagcagcatgatttatagtcctttgggtatatacccagtaatgggatggctgggtcaaatggtatttctagttctagatccctgaggaatcgccacactgacttccacaatggttgaactagtttacagtcccaccaacagtgtaaaagtgttcctatttctccacatcctctccagcacctgttgtttcctgactttttaatgattgccattctaactggtgtgagatggtatctcattgtggttttgatttgcatttctctgatggccagtgatggtgagcattttttcatgtgttttttgcaaaggagcaacagtcatctttactattgacttctcagcagcaacagagatagacgaaagtggagtaatatttcagtattcaaaaacaaaataaaaacaagaccccaaaacctttcaatcaaaaattttatacttgggccaggcgcagtggctcacgcctgttatcccagcactttgggaggccgaggcgggtggatcattttaagtcaggagttcgagacctgcctagtcaacatggtgaaaccccatctctactaaaaatacaaaaagtagccgggtggggtggcgtgtgcccatggtcccagctacttgggaggctgaggcatgagaatcacttgaacccaggaggcggagattgcaggagccgagatcacgccactgcactccagcctgggcaatagagatagagtcagtctcaaaaaaaaaaaaaattgtatttaatgaagataactatcaggaatatggattttttttttaaaaaaaggaggtattttcagacaaacagagcttgagaaatgcaccaccaacagctaaaggaaattctaagggacatatttcaggcagaactaatcccagatggaagatttgagatgaaagaaagcaatgaagagcaaaaaagtagtcaatatataggtcaatctatctaataatataaaaaattaaaacaatcctatagggttgaaaaaaacaaggtataattaaaattcatgaatatagtaacatataaatcaaatggtggtattttgagattgttgagatcattgtcctgtctgggatgaattgtatttcttacatttagactttgaaagagagagaaatagagaggcagacagaatcaacagggcatcatgaaaacagcgctaagccaggaggtttggattctattatcagctctgctgctagctgtatggcctttgaaaagctccttttctggtctacaaaatcagtttgcttgtctgttagatgaggctttggaaccagatgaattttaaagcccctcattatgattctatgagaaacagattctctagaaaaaaaaatcagttgtccccctcctttgaaattttatcagtaaacacctgcatttcacttctggctaacttttatgtatcagttcaaaaattaaagctaaataaagtctcgctcaggtgtgtagtttgcttacctttctcgtttgttggttttgttttcttttcttgtcatctagtagccaaaaagagtaatggcagtttaccaaagccttaggagtgggtagctctttggatatcagggagcatttgcagaaacaagctgtgaaaagccagcctagctttgcaaccattgttctttctatcttttctgtttaacttattaatcgaactgatatacacctcctttgccatcttgccttctttcctttcatccttttgccctccttctctctccctcctgtctttgcaggctaataataagccagagatcgaagcggccctcttcctagactggatgagactggaaccccagtccatggtgtggctgcccgtcctgcacagagtggctgctgcagaaactgccaagcatcaggccaaatgtaacatctgcaaagagtgtccaatcattggattcaggtattaggaaccaaaaaaaaaatgtcatttttttctcatcatttttcacctttttatgacttgatcttttatctcctgtgccagttgctgttagttcgtaccgtctccaaagtgggagagaaggtgattgggctggaacatcgatcattcctgtcaccctcctgatcgctaggttattttggtggatctcacttattaggctggtgtcccttaccaccttcactcttcagctcttcggagccacatttttggttgagcaggccaaagtgcgtgtcttcacggaggtattacagatgaactgtacctcctccttcctggaaccaaaacatttttaccatctttcctttttcacggtctttcctgtttatagaaacttcccaagaatcagttataaaactgagagatgattctattctgggaggaaccataatagtagctcagtctctcattcactttgcaccatttttttttctcccttaagtaacaagaattgttttcagcatcttagaacttgcttctttatctgtgaatctgattacattctttgtatagtatcccagtgaacttctaaaggaataaaaagtaggcaagtaaatggaagattcacaaagcagctaaaaaacaaccagtccttatacatttagaagtgaaagagataggaaacgtagcaggttattctgatagtcttaaaatatcatggaaaacaaggccaaataaatctttagccctgctgacctgtttggggagacaggatttttttttaaatgaattaatctcacttaacattaatcctaaatcctaattctgaaactgcgatgtccttaaatgtgtgaatcaacatcaaggtttctatagtgatgaataagccacaaagttgtaaactagctctatggtctatgcctgtgcagaatccacttagcagcaaagtaaacactcttttccagttacgtgtgaactggttttgttactttattttctaataactaccttgtactgttgcgtgctttttattcatagtgcttttttacttttggtgtttattgttccatagtcatgctgtttacaaagaggttttacaaaaacttttagaggtttctgaagcctagatagacaacagtgagtaggtactgcttgcaaaggtcaccttctttccttcccggtttcttggcaggtaaaaatgataccatgggggtggggagtggggaagggaagccacagtgactgcattagatttctaagctaccttttctctgcttccttagctagtgggctttgtatacaagggaaatttttataaaataaagaagaagaatgccttggaggatctgaaagagcactttcaccttcaattcttttgcccttatcatattatattattttaggacccagcacttctcattcctcctgtccccctcttgaaagatggctggaatctaaaaaagatagctttccttcccacttccccatatgtgacataagaaatatgtttatttgaattggctaaggttcttatctgagaaagcaaaaggcaggagagtatgaaacaaagaatatcgcattctgataatggaggaaatgtaccaactagtatttacagattataaattcttccatctaatccaaatttcatgttctcttggggcttcagttatcatttgtaggtaatggggtgagagatttctgaagagatagagataaaagagttcattcgagtaactgtttgaagatgaatcgtatcagtcaattagaaaacattattaaagcgagacttgttttaattgaaagttcttgttcacatttcttttgtcttgtgaaattgctttatcttgacaatgttttgaaaataattgcttcagaaaacttttgtcccatgatgggtaaggggcatgcacagcgtaagtctgtcgctcctggaagttcttttaaatttgagtatttggttttcaaaagactggaaattttccagtaccttcctacttaatctcaaagagttcctagtggagtttaaataaaagctgagtttttcttccctccttccatatgtttataggataatctttctgccaaaatgttttggtactgtaggagaggcaccggaaaaatctggaggcagaaagttaatcacttaccttgtgggactaatgaacattgctttctgtttctcaaattagaacgtggtagaaggtttattaaagagtgttctttgggaatttgattcgaagaaatacatacgtgtttgtttttgctctttatcaggtacaggagtctaaagcactttaattatgacatctgccaaagctgctttttttctggtcgagttgcaaaaggccataaaatgcactatcccatggtggaatattgcactccggtaagtttgacgccagcctgacgtgagagttagttcacctgggataaatttcagttttgtacaatactgcagatcatgtataatgctgtgatttgtcacttccccagatgttccccagctaaagtggctctcaactgtaggcttcaggatttaccctatccctggtgcctaggggagtgcctggcacatatggaacatgatagaccctcaataaatattgttggatgaataaatagggttttcattctgtgtgcatggttgtattgaagacgttttcacgtttattttgcacagccttagaggttgtgtggggcgatcttatggccatgaggcatgttgagtatgggggatggttctaggttcccccaaattcataaactaccacttttaatcaatgttgctcacctattatctgtcctgtatactagtgacattttaaaaatccattttatatgctaacacttactaaatgctaggcatttaccttttaaactaccctgtgtaaaataagtactatgatttttatcccctctatacagatgaggaccctgaggtcctgaggttaaataatttactcaaggttctataagtaagagttgaagccatctcctaagatgttattttaggaaaatgttaagtggccaatagaactgtgaaaaatcactagggaaatggcaaggatgtagacttggtggccagacagacctgagtacaaatctgcctaagaattaaagacaggctcctctcaggtttgttttttctaaaataaacctgtccctgttgactgtagagccacccttcgtgtttctcttctctttctttaattcttacagtctcctcttctctaaactttgcatgcttgctattcaagatacggtctgttgactaatcatcatatgtctattggcattaccttggtctttattagaaatgtgaaaccacaggccccaactcctgatgctctaaatcaaaacccacattttagcgagatctgcagctggttcccatacacaacaaagtatgagaagctctgctttagagcatctctctcttccatcatcagagtgatcctcccagatatttgcctgtctcacttttattcctcttatagagatggtcagtgattgagaatgtaccatgctatgaatagaccgaaatttagtgggtgaagcatgctatcattttgtactaagtagtttttaaaataccataaagtgtggtaaaatttaatgtcacctttttgaccttaagacctataaactaccatttattgagtagcctagtaagcttgtatgtttcttttatttatcataacaacgtgttgaggtgttgttgctcccattttactgatgatcagagcctctgagaagtaaataactcagccaaattagtacatgccaggcctggtttcagagccccatttgtctgattccaaagcctttgctcacaaccacaacactctccttaattacaaaacaagtgtcatggggcagaagactggagtggtcattagttttgaaatcatcctgtcctaaatctgatctcaccatgatctcccttttagactacatcaggagaagatgttcgagactttgccaaggtactaaaaaacaaatttcgaaccaaaaggtattttgcgaagcatccccgaatgggctacctgccagtgcagactgtcttagagggggacaacatggaaacgtgagtagtagcaaaagcagaacacactcttgtttgatgtatatttgaactcctctcagctgaacaccctccttcactcccaaatgcaaacagtctcttctatttctttctttttatttacattagctgaaaagagaaaaataagctgatgtccagttgccactttcccacgtcacttgacaatttctttttccaaaagttaaactttatctcacagggggaaaaaaaaaaaaaaaccacaacacaatacagccactaattgccttacaagccttataagaaatatgggactgtttacaaatgagtgattccagtatttcattttgattttcctctctcacaaatcagtaaatgtgtgtctttttgtatctcattgtgtggtcatatctagtcacttgtttctactcaaaagaaaatatagtcacaggaaactacttcacagtaagtagtaatgattctcaagatcaaaggggacgtcttcacctcttttcaacctgctcctcttttttgccttaactctgatggcagtcacacaactgtgtgtttttcttttaattcactttacaccttggtttggctattgctttccatggttcatacttaattggctggattttatttattttgacctttcagtaaatttttttgcggctgagtttgcgtgtgtctccttcaccacctcattttttgttttgcagtcccgttactctgatcaacttctggccagtagattctgcgtgagtactttttttgctgaagggtgctgctaccaccaacacattcgctcgcttggttctcttttgttctgtttatttgtttgttttcttttgttttgttttgttttatggacatattaattccccttccttcatttcagtttttttttttcttttcttgatgagactttgaaagtaccatctacacagatcaggagaatcagagtgggttttttggttcctccaccaggtgaaattcaaaccagcagaaatcctggcttgaattcaaattataatcaaagaagttattggagttttagctgtattcctgggagacatgtttatatatttcttcatataaaagcaaggaagaagcttctgattacataataacattctttagccatatttcttgagattcgatgctttttagaatctttagggtctgttataagtggactattaaaaatcagcagaattcgttttaaagtatgatgctgagtttggttgaataattttaatgaggtgtgcggactgtttatcaggttatgccatgctatttgactaatcattatatacaagggtttctaaattttgaactaaactcactttgctctcctctccaagctaaatattcagctcataaacaattatacatttgctctaggaggaaagtatttctttgttattactattggtgtgtattaataatactgagcttagataccagcagatgatttatctcagagtttataatgctagaaaactcttttttggggcctgtgatttctatattagcaaacaaagtgcctattttaaaactacattatgtagggttgttataacaaacttttggtatttcaaagtatgctttattaaaatatttattgaaaatcagacagctctgttatggataaaggggaaatgaccaattcggaagataagcttgtgtaagaattcaatttctttttattaaatcttttttattgttccaccatataatttaatctaaactagatccttttttaaaaaccctgtcgtgataaatgcatattattaattgaggtttattttcagtctttaataggcctaaaggaagtggaaggctatgctttcctttttaaaacttcgttattgcgccccttaattttgagatatggtagctataagtagtatattatctgatttatttaatcatcatgcttaaagaacttagggagttatttaggttcagttatgtcctctgcctcttggaaattgtgtttcctaacccaggtagtctgttatagaagttacaaccgttcataaataagaaacttttaaagagttgatacactacagtttcagcttgattggatcctgataagggaatggatttactctatgtggaaataagtttaaccgagtaagaaatccaaacgacaaatatgctaaagaacagttgttacaaatacatagataaaagtagcaccaaataataaacaaagagtaattaatagtccttgaaaggcaaaaaggagctacacgtaagctaatgagaaaaacattatgacaatcagattaacttattttaagtagaagattttgtctgtcttaaacgttgaaagactttaaaattaataacatcttttatttaaaaatattttctaacaactaaaacacacctcccaatttgcctttttatgaagagttggttagattattcagaaatagtgggaagttttaattttgaggaagaaaacaaatctagcagactgaagtctgtgttttctttaatagcagtaattgtatttaaagtatttattcataggattataaatactgtataaaatatattacaaagccatcctattcaggcataagagccaggtcctaacgtgtttcattttgcaagacttgtatctaatgttaacaaatcctatgatgattacaatatttgatccatttgatatggatcacagaatttgaaagtttccagagatacagaccgtttggttttccttagactaaactcttatttgcttgtgtttgtcatattactttaaaactaaagctaacataggcctttacgttgtctgtccataagtgagccagtcaaacgatattctttgagcgattctgcattgaaacctaaatgaatgtcagcttttaattaatagagttttcataaaagagaaggtggtggtgggtgggatggaattgaccaagtaggtcattaactcttatagtaagtaatccttctgggtatatggttttgtgtttaggaagtgggaagcggggaacagtattattaccttcttttggaagtgttttagaaggctttgcacttagttttgtttgtggactaagtggctttgtattttcactaattcttggtttttaaatgattcatctctgaccagtactcccttttggctcattttctggtttaataaatgtctcttttagtgtatattttttaagatttctggttattgtaagttcttgtgcttatgcatgctgtgataggcgccactgatattaataagaaaaataacatggaattatccttgaggcaaagaattaaagctctgtataagattttctgtataaaatggtattaaagtattttggatttatatgcctacttttcttggtgtacttatgctccaaggtcttaggctttcattcttgtacacacttccaggatagcaactattacaagggaaaacactactaatgtattttccctgatggtaggctttttgcttattaaaaaaatatgtaattgaaagactggtctgttccaaaagatagttcttataatacaaataatccaagtattaatttatcttgatctgcagtgaagatttcaaaacagaccttagcatttttctaataatgggctatgccagggttctagaagattaacagattaactctccaaaactatagtgaagtttcacatggaaatctttggatctgcttattaaattgagtagtcatcgttttgtttcctcttgacaatttaaacgtctttataactcatttcaatttgattatgattacacttgacctagatgacattggtttcataaataagacctttctctctcagggaagaattccatttccctagttatttgctatagtgtgtcgtaattatcttactgtagtatattaagaaatatgaatttctggcacattttctaatgcaagcttagctactggtaactgcatctttttcttttttaatgtaagaagaaacaaacacattctccttagtgtttcaaccaagtccttcaacgctacttggacactgggctaaaccagggtcctctctgaattacattatcgttgacttttggatttatgcctttacctaagggctttctgtgtcagcagagaaatggaagagaccttttgtgctattccaattaaaagaaaaagtccaagcctaaactggttttcagaacagatggttttttttcctaaggttaatccaaaagatactataaaaacttcaaggataattaatagatcagatatgaaaggatgaaaaaatgttaaccctaccagaattctagcctatggagataagaaaagataggtgtttatatacaaaaagcatatagactattcctgctaatgatctcctcttattttctcacctatgttttagcacacagtatctctaagaaatatttcagatatcatgacgttctatgaaatttagtcattcttttttaaaacctcacaatataatccagggtcattctattttgtgctagaaattagtggtatagtcttgctgctgaattggaagatacatttcttctttacaaaattgcatagatcaagacatcttgatacatggagttttaagaagtcttgtactagagtagcctctttgaagctaaaataattgtaagtatctaggcagatatacagctttgatccaataagaagatagcctataaatggcgcaggtgtaaactatttaaaattttaaaccacatagggctaacacaatttcggaattataggatgtgagaaattacaaagtaggaggacaaaatgcttcctagaaactgtctcccccaaccttttctacgatgggaattttccagagaagattttggcctctcttcatggcttttaataaaagcagaagtatgagaaatcatctctcaatcctggattttaaaatacttgataatatttaagatataggagcaactaaatgtatacattatccatagaattagaataaaagcattctaggccatgtgtataacataactgtgtggtgggttttttctccattaatggatggtatctgtgactaatcacattttctgccttataggcctgcctcgtcccctcagctttcacacgatgatactcattcacgcattgaacattatgctagcaggtatgagactagttgtatgccaggcaaatattgattgaaataactaaccaaggaaagctaacctatgatattttaaacaaatcttttctttttttccccaaacttgtctgattcctactaatcaacttgccctctaacgtgcatgccgttccactgcatgttgtttttggtcaccaacaagagcattagtccagaataatcttccctaaccctggcttttaaacatttccggtagccttgctatgtttttttatactgagcacatttactaaattggcttacaaatagtttaacctccttagaaaactgctagaccagacattcatatatgaaaaaatgatactatattatatggagaatatgaaagcatcagctttccgtttgtgtatttattttacatgatatgctgtaaagaagagaataattaattttcctaatccttggacttttctgtctcaccttctttgtgtttgagatgatttttatacctaaaaactgaattactaattttaaaatattttatgcttgttaaatccgtaagagtttggttaacttttttagttgtaaaaaaacaaacaaacaaacaaacaaaaaaccccctgtataattgcctgaggtgaagaagattttaaaggtaaaaattggtggcagaatgtttagagagcttactgtgcatccatcctttgtcaatattctaactgctggacatgtttaccaatcgtgaaaagcattagctagctgtgtaagtctgtcatcagtggaaagtagtaattgtcctaaaagacaaggggtagtgtaaggtagggagtgcacttattgttagggaagcttttcttctgaaaacaaagacctgttctcagtgaaagcaagactgatctgtagggggaaaacagtgaaatataactttccttagaatttctatcataaatgtagtgctactaactagctgtggtctaccacacactgcctcaaatggttaagccaacacacacatcctttaatttgaaggattcctttctcttcttgccatgatttatcctttagttttcaggaatgttcgattaggtcttgaatagattctaagacgtcacataagttttaatgagcttttacgttttttatcaggctagcagaaatggaaaacagcaatggatcttatctaaatgatagcatctctcctaatgagagcatgtaagtatcccatctctttttacaaaatgttcctgacaatgaaattgctttgagggatttagaggtaggatagcacaggatataggaattagcatcatattcatttgatcttttaaggagccattcatttacttttttcctttaattcttaatgccctggcatggaatgagctcatccaaattctggcattattagtattcagagtagcaaaaatagtttgccttactcttatttgaacttatttcataccatatgattacaaattgcagagtcccaagtatttatagtaatgcttaatctttgaccaaacctgccagatatttaaagggataggatattaattttaaagtcatggctaagtactattttctccactcatggggagtggaaacgtgatcttggtatagcatggctattcacatatggtaggttagttgggcattttccttcagaaatccaaagaagtagatttttgtgatttagcatcttcacaagataaataaagtgaggcaatcttatgaagagtttccagaggagaagtaccaattcaggttgcaggttgttagcaggatgataagccaaccctgttaaactttaaggacggagatagagcggtgctaagagcagcagggaacacagctatggcagggaaacaggcttcattatagagtgagggcagtgttcacaatacagagcacaaaggaacattgccatgaaccaagtaaatgctgaccggggcttgaggtagagagagcagacattgaagcaaatatgaaggaaaaaataaggatttgccaagtgaataaataacataaagagaagaaatctagtcaaagtattacgatgcctttttagtttgataaagtaaggatatctcacccatcttggagaatatagacaaagggaagaatggtaaatttatcatatgtagttggtgtggcaacacaaagtcatgctcagatgagaaaagaaccttcataaggattaggccaaaagaaatagtatcaaagtggcatatatataactagttattgaagacatgagaataaataatctcatctggtacataaacgatcaagctaataataaagaatcaagtcaaccctcagtcatttgtatatgacttacttccttcaaacaaacaaacaaaaaagcctttccccaaccataactgtgatgccttatctttcttagctatgggaaaaagtattaatggtactaatatataagatacttcaacagtaaaatgtgtggccaaagaatcagccaaatgtaaatagcttgtgcttctttggctcactgattttggtattagaagctctagcacattcagattaattcgagttgtatctacgtaacagtggctgtcattcattgactgcctaagagaacaggaagaaaagtgtagttacaactctaggttataattaaacatgggaagttctagcagtacaacttcagaatttggaatgagtgtgataaattaggtggtaaaactgcttttgttttattttaaaataagctttagcttattctgaggacataaaatccattttgactcaatgttggatggcaaaaactcatggcattttaggggcaggtttggggaagtggtttggtggattggttgacttcacttaaatgtgtgtttttaatacccaataattatttttagtcagcttttcacatctaaaccaggtaactggcttgataaacaaaaataattcaaatgagaaggactttttcctaaatttctgatatttttcaacttaagtgggtatggagaggagaatattagcgtatcatcttaatgatatctaaccagaaacaatgagctttagcctgtcattacggacagaagaaaattcttataacttggaggtaaacaggcctttccggagcttggagcaatgcattcagaaaaaagtttgtcctgtgtattagagagttcctagtttccaggaaagattgtagctgcctccccaaatagaagcctttttgcctccttttcccgcaagattagtccttaaaaccattatgtataaatttaaaaataaataaaacttgtatttaaaaaaactctgccccgaggaatgagatgttcagtcttcttttaatcagtcaccttaatgtcttttttccccttaattttcgttcttctgtctaaacaataactgaatgaaacaatcatgtatctccagtttaattgttgttgtcattctgcctcaatgacttatataagttaaaactgacttactgaagcaatactttttggttacattgccttccacttaataaaatatttcctctgttacttttagagctgcaaggtattttttcctactcagtacaacaatagcgtgggttagtgaacagattatcttgacaggcttggtggccaaagcattatacagccattattatatcttttaatattttttagctattgactaacatcaacgtagagtcccagtatttctgtaattctgcctttcatttatccgtgtaaataggccaatcaatttcatttgaaaatctgagcaagaaaacactttgaattggtaccagtagaatggtagatcacaacctcagcagtatcaaaaggtctttagaagcaggaaaaaaggtctaattaattgttaagagcaaataaatgtttctattttcaaatacactcctgagtccctaacccccaaagcaaaataagggggggaaaaaaccaaaacctttgattttattttccagagatgatgaacatttgttaatccagcattactgccaaagtttgaaccaggactcccccctgagccagcctcgtagtcctgcccagatcttgatttccttagagagtgaggaaagaggggagctagagagaatcctagcagatcttgaggaagaaaacaggtgagttttctttctagctttgtcattggtatgcagagtgcatacacttgcacacatagaaaagtgccaggaatcttcacttagagtcattttatgtctaattgttttctaaaataatctgtttagctccatttgcagattctctctctcttttttttttttgttatctgaaagaagacaatggatgcaatagtatgatgaagaactcatattttaggtgtgaaggagttaatgctgatggtggtatttgacttgttgcatgtgtctccaaggctttgattttatatttcagaatagaatttaagaaaaaagtaggttatttaattttatgattatatgattttttttacatgtgtttggccatattatctacctcaaacatttaagaaagtagggttattggcttggtcatattgggaaaccaattgtttcatcttatttttcatcatcaaatgcagaaattattatttatgctcaccatcatagcaggttagtgagacaattccaattgtcagccatcacctgtaaaagacagtcatgtaaaaatagcagaaattgtagaagagaaaaaggctaaagaactctcataatgactgcagggaggacaaagatgtaaacatctggggtactgtattgtgtcaggataatgcaaatcattggactttcagttctgtattacatttattatgtcacaggtcccttggtttaaaaagtcttctcacatgatcacttctaactcacaatgtgccttcttcagacagatgccaccaagcaaggatttaaagtagatgttgctcagatttgtgggtcttaagtactttcatctctttggttgagcccaaggcaccaaaagctcttaacgtaggcaacgcagtgtgtctgagatcagtgccctcgggagtatgccacttcaggatgaaaaaacaaactgccactcttccattgcttcctgctgccactgcgagccttctagctcttaacaccttttacctatggccatagctccttatctggttggcttccctttagtctctttcccacccttgcaataaatcctccatactgactctacttgtacatcttgccagaaccaagacccatcatggcattcccctttcactggatttctgcatgtagaaaaaaatcaagcttcttagtggggcgttcaaacccttccacaatattctcttgacttgctttttctatgccatcttcttttgttctccctgtgttctggctatgctgttgtagctagtatttctgaatacatcctgctctcatctacctttggggtcaagctcaagcttgagtctcagcctaactgctaacctctaacccaccactgccgtatctgacaaaggaatcccacctatcctccatcacactgctcaaaataactttccccatggagccctgctagatccctgcagttggaagaaatctgtcttttgcctctattcccagagcactttggacctttctcagaaaattccttgacagttttcctttttatcagttattaccagtgcctctctttaatgagctagtgtgtgtctttggggcatggactgtatcttaatcatcttcatatcctccagagtacttagcatggtttgaatatttaatggctactcaggaaatgtttgctaaaaacctgaaaatacagcaagaacatcacatgagtaccatccacgagataatattgaactttttttgttgttttaatgatagctttatttttggccgtacttttgagatcatttgtcagtgaagaccatggtagagaaaacatttctactttattgagaataatcagtaatatccatttatgttaaatctgtaattattgtaggggtcaaagtcaaatcggaataaaaagttggaactgacactgtaaatagaatttgatgttaccaaggagtaaatatatttttgaagtatatgatcgtgtaatatatcttttgagctcattggtcaagagccctgcctcgtttgtggttagcatagtctttctccgtaccattgcacccgggtcaaagaatgtttgtaaagagtactgataactatcatttatttatcattttatcattttgagtgcacttttacatattttagatcatttaatcttcttacaaacgctatggagaagagactgtcgcctttctgtgaatgagacacaggttcttagaggttcacacagcttgccccagatttcccagtcagccagtggtagaactgaattgaaatccagatttttctgactctaaataggcaactctgccttcaaccagataataaagaagagtaagtctctgtgaatgtcatttacatagaattgcggcatattccccagaatgtgccttaacttgagggactatctatgaggactgagtgtcccggaataaacctgttcatctacttgtggcacagcgataaccgctttaccctggaagatatccaagaccattctccaagaatgggatggtttgttctctaaaagaacaaaaaacataacaccaggcctacttagagctccaaaatgaggactctggggttgatgcaaatctttgtgtaagttaccttgaccttcacgaaatgatcaggatgagcttccttcattgtcccttcattttgtcctatttgaccttctaccaaattccaaagaaatgtctccacagagttcccttcctgaaaacagcccgtgtgttttctttgatctgccctgtcctgtcttcttgcagttctgcgcaaggagcttcagagccctagatttgccttcgctacccttgaattcagtgttgcttaaggagcctttaatttgccatttcctgttgagaaaacccaggaattctttagatgccctctctgtgcatgtctagctggctatgtcctaagtcagcattgggctacgcaatctgacaaatacgagcatacttttagagaaaataagaaagtatatttaaaattgagattgccccaagtcctttggatgtgtacttattgatctgttaatatatatattttatgttcctttagctgtgatttatctccaaataacagcaaaagagagaggcctggagagccccattcctgactagatatttattaaattccattaattgttcttattcatgacacctccctacaaccccctagaaaaacagaggatggctgtttgagaagtgtctcagaggtatcttatctctgcctttagaattccatttctcctggttgttgcacatagtattcaataaatatttgttgaatgcattaatgaataaatgaattgaagctgaatttattttaattgtagcatacatgcatgcacttttgactaaagttcttttacaaacctaatttcgtagagaaaagcctttcaaagactttgttttctgcttgcttttcaaaattctcccctttttcaaactgccttgattagcaccaggcatggctttgtcataaatttagaatgttaagaacccgttttccaaatcacaggcactgtatgtatcccacattggtgttctctgattcttggttgatgccacagagataaggctaaagctctgagtaaaagctaaatctgactgagtttttcccatagtgcctcccataagtttggatgactaatggtgttagtgagatatctaatctttaatatttcgcttctgcatcatatttctccctcattaccacatataattcagatacatctttatttggcaaagagccactggatcttgggtttttgccccattgtgtgtccttagcattgcagactcaaggtttacttttttttcttgcgttgattaaagccttcagtctcctgacttaagcctgtagtgttcaaatacagagatgtatttgtctctgcactgtctaaataaaccaagacttgctctgaaattcaaggtatgatcctagcaatgaaaaggtagcctttctgagagacaaagacattgtcgttctactacctgcagagcaaattgattagattgttctcaagtcaacaaggtggctaaatattaacctaattcaccataaagtctaaagttaaagttgttagtagatgttatataacacgagggaactctgtagattcttaatacctactcaggacctttcatatgtcttgttgggcagtaagaccttatgaagccaaaatttgagttttctctttttcctttaaattcctccagtgattgtgcaagattattattgttacagtcaaagaagttctagatcagttactgataccactgaattaaagtagctggaaatcatgatcccgttgctttactttgtaattgacttgatgactttggacctagtctagtagctatcaatcttcatagctacgggaaatctttattcaatgttctttcattaggtctttgtgcaagtctccaatgatggtgaaaagatggccaaaatgaagggaatctgaagaggttaggaatgggcattcctatggaatataaacaaaggtgtcagggtgaggaatggcagagtttgtttgagggaaactgcagttgtattaccttttttaagaaggcaaagaatgagaggagatgaggctgaccaggtcagcaagggcaggtcgggaagggtgtggtacccactgcagagttgctgcctccgtgcctagtctagggagcaactcaagggtgtgatccaggagtcaggccatgatattgacatgaatatacgccacacaggcagctgtgcggagggtaactttgaaaagagcgatgctggaacgaggaaatcaagctggggggagtcacatgggagcccaggaaagagatgattagagccttaagtaaggtgatagaaatgaagtagacaggctgatctgagtgatatttcgggggaggatagagctgtttgattcggtagttctgtgggactagggtatgaaggaatgattcccagggctggtaactacaaaacaagatgatagtagttatttgcagctgggactgataattcaggaggagttgcagcaggtccatcctttaatgcagcagtgtttattagaggtccttcctgaagggctgagtagctggaaggtgataaatgaggtatggaagaggtcgagttgaggtcctggtgacatctccatgtgtaaatgtctgacagtctgagagatagaactctgatgcttgtagaaaggatataagcctgagatattaggactgtgagtcgccagctcacaggtggtagttgaaaccgtgagaatgaatttatatatcccgggagcatgtagcagaaggagaacactggatttggtagaactccggaagatgtgaacattaaagtgtgtatttaattacttttatttttagtagagaatacatgtatattattatacaaaatccaaagggttcaaaaagacatatagagaaaagtgaatccttctccaaccttctcccctggctgtggtgtttccagctctggaggctgccatctttcttggtttcttgtgtttccttccaaacatgctctctacatatgcaaatatttgcaaacatatttatggttgttggggttacttcacacagtgtcgtgcagtgttcactctggttttctctttttacttaaaaatctctaattttcacatgctggagaaatgtgccagaagaagaggagggcagagcttgggaatgatgggagcattttcccacaggaggcaggagagagaagggttagggaactaaagtatgggaggaggcgtgaccttgaatgagaggaaggactgcctctgaagacaaagtggtaggtaaggaatttagggtaaggaagggaggaaagaagcataatggaatgaatgttaaaatgtccagtagacatcactggaaataattcaagactgattcctacggctgttcccacatgtttttaaagttggagtggagaggaaagcgtggtatatgatacatttaacgaaactaggcattcaagttacttggtgtattagtccattttcatacggggcaatttacaaagaaaaagaggtttaatggactcacagttccgtgtggctgggaaggcctcacaatcatggcagaaggtgaaggaggaggaaaggcatgtcttacacggtggcaggcaagagagcatgtgcaggagaactgccctttttaaaaccatcagatctcatgagagttactatcacaaaaacagcatgggaaaaccccacccccatgattcagttacctcccactgggttcctcccatgatatgtgcggattatgagagctataattcaagatcagatttgggtggagatccagccaaactatatcatttggtgacatgggccccaaaacaaagggctacagagcccttcttgagacaaagggagctagtttgatcacagaaatcagaaagccaagaccttttatggcaaggatgaataagagctgaagggcatacatgccacatttaagaagctgtgtaagaatggggtcaaccatctcagctctactcaggcagggaggacaggaacatggtagaagtggaatcaccattattcacagactcagtttctaactagcagggccagtgtaactaaatttccttcagtttatccaaagttaattgaagtctgaggggactgattcatagtatgcagttcatggcagtgaatggataacccagaatgaaagtttatttctccctttatcctaattatctctctttttaactgccttgtattaaaatgttatcaaggttgccttaaagcttttttaggaggagacagcatctggtttaagtgcaaatactagatctattaaaatgaggaatatattcattttttcggcacacagcatcctgtgtcttagaatccagtgtcttaggaatcacaataaaaatcaaattgtgttctggtgagcctagaatcttggcatctaaaattggatgtttgtgaggactgcttcatactacaaaaaaattgaagcacccctctggcgattagaatattcacatcttacaagtacagctgccatctccctagaacatgctggataagagtttatgttcttacaatccaatttcccttttttttttttttttttttttagatttttcatgaagaccctcatcctcctgttggccttcatttgccaattgtccctctacagtagaattgattatggtcatgagtttctttagctactttccaggcctgaggatgtaattctgttcaattctgcagatagttactgagtgcttaatgtaattttaaaattatgagactacaaagatgaataagccttggttcttaccctcatggagctcaaaatttattttaaaaaagttaaaatagaaacaactacttatatcctactgttacaagtgctctgggggcacagaggtgaatgatttattctatcagagggagtagagaggcctttacaaagagagtttaagagttgaagactgaatgggagttttccagtctgagagatgggggaaggatgagttttccagactggtggaccagtgagtaatgtgtggcttggaatgaggagaataagagggcagtgggatggtaggtggggactactgtttaaaggactttgtgcatcatactaaggagtttgggttttatcctataagcaggtgaacagtgatggctttttgacgggggggaggattgagaaaaataactgacctggcagaaagctaaagccatgaagattggtagaagcacagtggaatagtccattaaaagatgccaggttcttaactaaggatgtcttaggcaagtgaagaaggggatggagaaattagaaggtcactgaatgaatgagaccaagggaaaatggagagggggaggcatctggtgttacggaaagttttaatttgggaactgggaaatgatcattgaaaaacaaacaaaagcaacctagtgcacccaggaaaaactcctgatttgcaaagggttagtgcatggagagaaagagctacgtatcagacatactgaattctatttgcccaaggacatttcaagtggaaatttcctatgttgattttacgtattcagttttcagaaaggattctttaaaaagtcatagcaatacaattcctgcaatataaataatagatcaatgaacatcatagggattagcatagttgatttgactaagcttcagattcagtttgagcttccctgtagccagggagataataggaaacaaagatttgtctgtctcttaatattgaattaaagaagcacgcagcatcctaaagaaacatcattgttttcctggctctacgtaataataataataacaaaaatagctgtcctttgagtgattgctatggacaggaactgttctgagtacatatgaactcctatttaatccttaaaacaaccctatgaaagagaggctgtttccagaggattacgtggcacagagtattaaggacacttcatatggccagcaagtaataggacctgtattcaaacttgggtggtggtcctgaactcttaagcagcgttacacttgaagtgattattggctagtgtccttatcaacatttttataacaaatcccaagggaaattatatgtggctgtttctcatggcctttgataattgtggaaagcttaacattaaaacaccaaagatagggtgacagttctccaaggataaaggtcactgttgcctaaaatgtattctgcagaataccactgagatactctgagaaaaaaaggattccaaggacagtaaaactttgaaagcactcatactggaaagtcatcattacgttagcatttgcactgaggagtttggaagtgaagaaacctgattagctttgtctaacctcatgttgctcccacttacttgacctcgagcccaactgcaatgttatatggaacacactttggtaaagaaattcaagtctgaagtaaactttgaaaaccagtctaggagatagcatagttgactctctactgtagttgttgagaagcctatccgttgtgtctctgggaacatcagaagataaagctataacaggtgcccacgtaggaagcctggatttttcgcacaaaagtaacttttcatatgctctagtggtgaagcagttaccctgtagacccagaagccagaatgatttagtctgaaaaatctaaagataggtattaaattaactctcatgatcatagaaaattctttgcaccatttttgtagaatatcccaccgaataacttggcttttcacccaaaccaccaagaaaaattgccaccagtgacttgatgcaattaacttgctatcgggagttctttcttgtgaaatgattgaactttgaaagatgtttaccaaagacagcacctttagcttcatcacaattactgtggaatctttctttgtaagtagttagatgcaaaggccagttgttgcttgaggcctctcctggattgtgattttaaagtgtatcatcaacacatgggaagatatttctccctctttatcttatgacagaaatgcaggtatagctttcatctcaaagtaagattaaggtataagttacaaagatgtgtagctactatatggtcctgtgtaatgctacttgaggaaggctgttcctttcctggcactgaaattttagagcttgcataatcagtatatcaacctcgtgtggcttggtgcttagcaagtttcagcttctagagcccatggctaatggagccatccaggagaatgttggagagataggtctgaagccttagaagagaagtcttgattaaggagtaatgagttgcgggaaggggtcatggttgtggcggagatggaagcctggggagaggacagagacctcctaggaagagagtttgtgtaagaagaagaccaaggacctcctgatgtacttgattgtaattgggcatgagcagcccagttagaaatggtttcctgttggtattacatatgtacatggatggcttctgcagatggctaaactcacccattttatttttttactatcttaatagttaaaatatgaccttttcttgtgtctccaaattctgagttaccttatggtgctagtctgtctgttgtaactacaagtcataagtaaatccatatgattcttttcctgtaatttcctggtaaatcaaggcgataatttcaaagataaaaatctgtatttttagctttagcagtgagcatgattcccagtctttttgccttcgagtaaggtttgtttccatggtggaagtaaacaatatcccacactctagaatgtgagctcttcaagggtaagggacagtgtcctacatatatctttatctccacagcactgggtacataaatgtgtcataaaaatgaatgggtaaatatcctttggagtttttctgttacttgatgggtttttggggttgattttcaggtatctcccttgtttttctcatttcttacattattttctttcccaaaatcccttaatatacctgtttagtttgtgatgtcattttccattagactgaaaccatccaagttgtttaggctaacccagacttaagcattttctgggcttatttttggactctttttaaaactcatcatctgaaaatatttaatgtccacacggataattctgaagacatgtgcataccatttttcttttatgtacatgggttaaaccttgatttttccatagtaggagaaagcattataagattttattgttttcactggggtaatatcttttgtgctataagaaataaaattttgaatctagaacttagttttttataagacctttattgagatataattctcgtaccataggagttacccatttacagtgtattagtcactgattattagttaataggttaaccagtattagtaatcactggttattaattacagagttgtgcaaccatcagcgcacaattttagaacatttttatcaccccccaaaagaaatcccatccccattttcaagtcactcctcgtttctcctgcaactactcttttcagccctagcagtagacaatccctgatctactttctgtctctatggatttgcttattctggactgttaatgtaaatgaaataatacaatataaagtcttttgtgactggcttctttcacatagcgtaatcttttaaaatggtatctatattatagcccgtattagtatttcattctttctttaatgctgagtaacatttcattgtatggatataccacattttttaatctattcattacttgatggacatttgggctatttctacttattgtctgttatggataatgcagctatgaacattcatgtacaagtaccggtaattattttaaagaagttattctgggctgggcatggtggctcacacctgtaaacccaacactttggcaggctgaggtgggaggatcacttgagaccaagaatttgagaccagcctgggcaacatggggagataccgtctctacaatttttttttttaattagccaggcatggtggctcatgcctgtagtcccaactactcaagaggctggggctggaggatcacttgagcccaggaattcaaggttacagtgagctatgattacaccactgcactccagcctgggtgacagagcaaggccctgtctcaaaaaaagaaaaaaaaaaaaaagattctatagtttctgtcattgtaatagaggaggccataggatcatatatggcaagagtatatagcagtgcatgccagggagtgaaaaataggccatcaaattgaagttactgggagaacttaagactaagtctaactacgcatgagggattgaagccgggacacacaaagcttaaaattatgattcttctagagactgttacggctttttgctgaccacagacaatgaaagtttgatattttgctgtatttgtctgaaaatggaaacacacttttcccaatggcagtattcctgaggactagagttcttcacctctaaaacctctccaatcctagtttttccttttggctgatgatgaccagccactgccatttttgtcttaggttttgttagtctgtcttatttccagttataagtggttaaaatttcttatgaattcttcttgtgttgaacttttgattaatacatttagtctatagacagtaatgaattagcatctgatcaggaatttgtgaaaaacatctcagtcattaaagattaagaaactgaagccaattaatattgtcatgttctgtctcttggaacttgagcaagatacagatctacgtgtcaatgacatatccagaaaatagactccacctagatacattaaccctgtacccttggtccacatattttatttcagcaatgatccatggacatattataatttgacagtttcatcacatacctagcgtattgggtcaaatcaaggaaatctcatcctagtgatcttaactcagtgatttcattttgcccagatgttcagctgtgataaactttactaaggcacagatgatggatgatacacaataattccaaaatttgggggtggctacaatgtggctaggggctagaactcaggtatctacaggacaaatactgagtgattagtcactttctaagcgctagatatgcatatgttctgccaagctcagtaggtctaagtagattgcttccatttcagataattaagtgctttctttttataggaagtttttagcacatctgaggttctaaatccaaaaagtaaataatatatagagaaagaagtaataacaataataatagtaaccaacatttattgaacacagtatgggctgggcatggttcaaagaaagtttgacatatagaatgtcgaccatactggcttaataatcctcataactgaattagtgcttaagtcagttgcccagcctcagcaagcagcagaggcaagtaagtcataaatcaagatcttctgaatccaagaccatctctcaagccttgttctaattctctcctcagccatggatggtgaaaggcaccacaaaggcagcgtgtcaaaaagtggcattgttcaacctttcccctgatggggcaaagcttttatttttttcctttacgttctttgacatctgttttaaaatgcagatatcactagaagaaatgacaactttattataaaatcccagtaaaatgtaaatgtcttatataaaacctttatactgagcaaatttcagtaggaaagggcttggaagtaaggctctgaatgttttaaagggggacagtgctaagaaatgattagaaacaagagcctggaggggtcctgccatttttactgttttgcttaaggctgacctaaaatatgcatagtcttacttctcaccctgtgagcttatccttattaatgtctttttccacctagtttaggggtatttttgaatttgtgtttgataaagatgtctaaagctgtactgtaaaattttattgtcacttttttttttaaatggagtctccctctgttacccagcttggagtgcagtggcatgatcatggctcactgcagcctcaacctcccagactcaagcggtcctcccaccccagcctcctcctcctgagtagctgagactacaggcatgtgtcacgacatatggctaatttttttcaatttttttgtaaagatggtgggggtgtctccctatgttgcccaggctggtcttgaactcctgagctcaagtgatcctcccacctcaacctcccaaagtgctgggattacaggtgtgagccattgcactgagctttattgtaatttcaagggctcaatgcaatttccagtttttaaagttcatcttgcttgcagaatttgtctttcatttaaaaaaaaactgctgattggctacatttatagctgctgtaatagttctgtatgatttactacatttgcctgaatttagattggtggatatgatttagctgcttttaatattatatgagggtaaagccagatttctttggatctattccttttagatggcaatctttgtagttgttctactttacaaaataatccctgtgtgtgctcatgctttggtatacagttaaatgtatgatactgttaagaaaacattgatcactggaaagtgaccttcatttctttatttcataaatatcattatacaactatataactacacgtagtagggaagctccatttaaagagtagatgacttacactgaaatcatttgacctttgtaaattagtttaaattacacagagattgttgtaatgttctttatcatacataatagttacgattgctagagaggcactcataaatcattgctaaaagggccagctgctttcatgttttcagcaggttgagttaagggaacaagccttgccaatttgattaatctcttatgtccattagttggttgggaagtttttttgagtgtaaatttgtatgtagacaacagagtttatattctttatgacataaaattaatcagatatatctacatatttgtagaatggggggattcttagctctatagagaataagaaatactggatggaagactttttttaggatgactggctacaggaagaaattgtagtgacagaagccatgtgtattgaatttgaattaatgttccttagggagctaccagagaaatataatttacaagataatcaagaacgtaaatagattctctgtggagtcgttgtctgatcactgacatatattcatctgtattgaaatgacttcatgactacattctaacaattagagaatcattaggggtgagatgtacgtgtataccttcaagaaaagcaaaatatgtattggtaataattgacagctgttaaaacgagtgcattgtgtacttgttaaacattagaggctgggcatgttggctcacacctgtaatcccagcactttgggaggccgaggcaggcggatcacgaggtcaggagatggagaccatcctggctaacacggtgaaaccctgtctctactaaaaatacaaaaaaaaaaagccgggcgtggtggcgggcacctgtagtcccagtgactctggaggctgaggcaggagaatgtgaacccaggaggcagagcttgcagtgagctgagatcgcaccactgcactccagcatgggcgacagagcgagattccgtctcaaaaaataaaaaataaaaaaataaaaaaaaaacattagaataacttaccttggaacagtaactctgagggaaccttgatcatttatgagaatgatctcccctacgttaatactgcatcaaaactaacattatggtatacctcaaaaagtattggcatagatgtttttaaatataagaaaattcaaatgcgtaattgataagggctaaatggctcaatttcccaacccctaacaaaaatatgccctaacacagctctgtgactatgactgcatttattagaaaacatttagtaaaaatcatctctagttcaaaccctccagcatcagttcttcttgataattctcatgaacatttagaaataccttaaaagagaattcagactcaaatcaaaaaaccttatttcatttggttgcaggccaagatacctcttttaaccatttctggcttttagaatccttatcatgacagcttgtcctatctcagagcttcaggaggaaaaactagtccctcaaaatcaagtttgctattgagcttaataagaggtttctgtatgtcatatgtttgtttagaagaaaagcacttgttcgactcatttaatcctggcctgatgaattaaggcttgaattaatactgagggaaccttgactatacatctacaaaatcaatgtgtcctggtaggcttctgattaagataacattagctcttgcttgaaggcatctttctctgctcctaccatttatccagtggtagataatatatggagtgaaaaatgaaaaagacatagctgggctttaaagcaagatgaacatctctgtgaaccagaaatgtgaaagaaaaaaaaaaaagtaagtggggctaaattagtgggctttcagctcgtgctgtagtaacagggattaaaattctccttacaaggtagtggcccaaagccaggattactatttgaaatcagagccccacaaaaacacacctagagagagacacatacacacttacacttaaaagcaacatgaaaagaaacagtttgctgcaagggtctacagcttatatgcagctatggccctaatgcatagagccgagggaagaggcaaagattcgcagttgggaaagagagcatcacagccttgaaaccaggacctgaaccaatctacctactgcctggcaatgaaatgagtgatatctctgtatcactcagtgtaggagctgcaaactaccaacagatgtggctctaaactctaagcccctgggtatggctgggagaagccataaaaccacctgagagagagataatgagtttaaaaagagaggaaaatattaaagtacacacacatgagaataatagaaaacatacacatgcatatgtatgcacatgcaaaacatcccttgcaaaatttgtctccaaatcacgatccaaaatacatgaagaaatgggatagcaccccccacccaagttaaacatcaaaaagtgaattaggctgggaacagtggctcacacctgtaatcctatcactttgggaggccaaggtgggaggactgcttgtgcccaggtgtttgagactagccagggcaatgtagtgaggtgccatctttacaaaaaataatttaaaatatattagccaggagtggtggtacatgcctgtagtcccaactactcaggaggctgagataggaggatcgcttgagcccaggaggatgaggctgcattgagccataattgtgccactgcactccatcctgggcaacagagtgagaccctatctcaaaaaaaaaaaaagatgaattaattctagaagaaagcaaaataatacactagtacaacaaagatttttacttacatttaagatgctcagaccaggtgcagtggctcacgcctgtaatcccagcactctgggaggctgagatgggtggatcacctgaggtcaggagttcaagaacagcctgcccaacatggtgaaaccctgcctctactaaaaatacaaaaattagctgggcatggtggcaggcacctgtaatcccagctactcaggaggctgaggcaggagagtcgcttgaacccaggaggtggtggttgcagtgagcggagatcgtgccactgcaccccagcctccatctcaaaaaaaaaaaaaaagatgcttaaaggcataaataaggggtaccactcgctaaaataacaagaaactaagaaacagagatggatgaaatgtaactaggtctgaaaacaaagatatctttgccaaaaaaactagtcattgaagttactaaactcaatatacaggataaattctagactttgtcctgtcagagaaggcaagggaattagaagatgatgctgagaatgttactgtgtacaacactcacagaaaaagataagaaatataaatgagcaattaggagaaatggagaattgaccacaggctctacaatataccttactagaatttagaggtttgtttaggagtgtatttgagaggtttcagaagaaaatggaggaaatggtagagaagtaatatttgaagctgtcatagctgagaatcttccagaattgaagaaggatgtgagtcttgaaggaaatgtgctcccaagagaaatttcaaacatctgggaaggaaagaaaggcctgcattgagcaattgatattctttacagctcagctttggctgattaaaatgagccttttctgttttcactggaaaccaccaaaacagaaatgtaatgtgttgtatataccaaaccatgcctcttgaacaagggtccttataaataaatcataaaagaagagccctgtggacaactaaacccacaggatcaagataccaaggaagatctctctagaaaaggcagtctcctgtcagcacctttgtgaaaaataggtgggaagacagtaatggcttgttgtaccatcttgaggtccatgtctaaaaactgttttcaaaaggaacaccatggctgccccaatctggtagaaagaaaaatttgaataggattctacataaaaagtgttgccagttagaacattttgttgaagttttcttttaatgaagagggaaaaatagaaagtaattcctatggaatgagaccttgtgaacattggatactgcttcaagttcacagaaacattgaactgattgccagttaagttctcagaaattagatttaattaatgtggacagttacatacatcggtgcacacccagaagacccgtgtgcagaatctgactgaaggtgtacttacttcgatgaatctcttctcatcactgctttgtcaaagcagattgctatgaaataaactatacaaacaactacccttgaaggctgatagcaataggatttcaatcagtacagataggagattctatttctgtagatgaaaaagatcatacattgattttctgtgtgactttaaataaattcctggaaaccttgtaatgttaggtactaggtagaatgaaaaaaatgaagcaaaacaaaacaaagaaaaaaaccagagtagattgggttttctttctgcttccatgtggagatctagccttttgaaactgagcattttggaagacatgccgtcccctgtggaatgttcattccgagtatgggacaacagaaaatatttagcagacctggtgatgagatgatcttgctttctcaaactggacaatgggaaaactcttcttggctactcactacttacatttcatctcttttctcattgatatagatctcccacatttgtggataggaatttctctcacctgatgaaatatcatctgtgaacaacagaaatctgtcatcttattttggtatttatcacaagtagaagaaagatgtcaagagttctaatcagtcactggatatcaaatatcagaaatgtcctcaattggaattgtattctcagtaaatcctaaagcatttgggaccttcacatgtgctaatactgtttatatttatttggaaattaaccaaatataaccaaaagacagtggaataaccatagaaacctttaaatggaataaaatttatggcaatcaacattattaggaagaaaaagtatactacctagaaacagtgcaagaacaacgaggatcttctgtgcatctaactatataggtctagaaatatataaagtgaattatgatagaattaaaaggagaaactaacaaatccataattatatctcaacactcatctaacaaaaattgatagctacaaataatcaaaaattaataaagatatggacaattttaacaacaaaatcagcacactatgtatttagagactccatctttccaatggaaaaatacacattatttcaagtactcaatgaacatttttagaaagtgactgtgaactaggtcacaaaaagaagtattgctaaatttcaaaggatcagtatcatacaggggttctctgattgaaacgcaattaaattagaaatgcactaagaagtgaaaatggaaatataaccactgtgctcctaaatgactatgggttaagttaaaagaaatcacagtaagaattacaaaacataaggcactgaattgaatcaggtgatgtatataaaaacttttggtatataattaaagtggtaccaaggaggaaatgtataaccctaaatgtgttcattaaaaataaaaaatcaatgacttattcaacctgtaaagcaagaggaaaaaaaagagtaacaagtaaaacattattaatggacataaaatgagaccatagtaagtaaggagcttcactgcattcttggatgtgaagactcaattattatgaacttagttcttcccagtttaacctatgaattcaatgtaattcaaactcaaaatttcaacaagcattttcataaaatcagaaaaccaaacactaaaatcatggagaagatcaaaggggtcagaatagtcaagacaattttgaggaaaaacaaagtgggctgagaaggcctatcagacatcaattgatttaaagctggagtgtgggatctaccagggatatgcagatagaaccacagactagaatacagagctcagaagcacacctgtatatttatggacacttgatgttttgcggaagcatcgttagagatcagtgggaaatagatggaccatacaatgaatgaggctggcttcatagtttatccatgggggaaaagtaaaattagatcgcatgttcacggcaagcacaaaaatagattctgggtaaattcaagtcctaaatgtgaaaaaccaaattttaaactttaaaatgtaggtgtaagaaaagattttcgtgaacaaaacataaaaagcagagaacatacagggatatgttaaaatttacatcttttataccataggatgccataagcaaagttaaagataagctacactaagataagggtagaagatcatatttgccatgcacataactaacaatggattagcatctagaacatatccaaaggtttaaaaagaaaaagacaatccagcaggaaaatgggtaaaggaagcatgaaaagccagttaacatggaagaagtctaaccttgccagtaatccgggatgtatgtgcaaattaaaatgcacccatcaggttaactaaaacttgaatgtctgataacaccaagtatttggtgaggaggtgggccaaatggaaaacctcattcactactgaagcgagagtaaattggtaaaagcaccgatttgtcacccagagcgattcggtgacatgtagcaatgttgaagatgttgctaagatccaacaattccacatcaaactatattctgtaaagaatctcttcaacaggtatccaaggagataggtataaaaaagaatttcattgtatcattgtttataatagtgaaaagttggaaacaacctaaatgtccatggacaggaaaatgttggcatattcaagcaacagaataataataccttatggcagttaaaatagcaaactattatgtatcgacctggagaaatctccaaaatggtgttgaaggcaaaaagcaactcttagaatggtatgtatattcttaaatgtgaagttcttaaatttaaagtttaaaaacatgcaaaataatgttattagattgaatcacataaaatgggtgtttttgtaggtgaaagaaaaatacaggcaaacatcagcatcttttttaagctcaacctagtatttgttgatacattcatggtaacactgggcatgaaattcagtgtggcattatctccttgagggcagcggggaggagagaatggtatggtgttgaggcgggcatgtgagggagcttctgctttggctgttaacttttctttcttcaaaaaacttttgaagaaaatatggcaaatgataaacttatcaaggggaggtgataggaacatgggtatacttactccattcttatacatttctgttgaaaatatttgctaatgtttagagcaaaccaaagtgttgatagaggtataaaatttttaatctcatgacattataaagaaatatttacaaagtgattaaatcctttgctgcttacttatctgaacataccagtcgcgaggcttttagtgtaacataaaaaattgaaaagcatggctcccttcacacaccaggcaaaagcttcaaattttgttttgttcttttagcactggtaagattgtcatcattaaaaccattcattagtgcctcttttgcttgctgttcttcggtggcagtcagatgcatctatctaccatggtatataaaatttggtgatgatattcaaattactttttttcttctttttctttttctttctttttttttcttttttacttttttgatgccaataggaatctgcaagcagaatatgaccgtctaaagcagcagcacgaacataaaggcctgtccccactgccgtcccctcctgaaatgatgcccacctctccccagagtccccgggatgctgagctcattgctgaggccaagctactgcgtcaacacaaaggccgcctggaagccaggatgcaaatcctggaagaccacaataaacagctggagtcacagttacacaggctaaggcagctgctggagcaagtgaggagagagatgggatttttacaaacattcatttttccctcttaaacaaaactaaacctcagagagcactttttataggtgcaacaagcatcaattcttaagtgcttggtatgtgcctgcaaagtgatagtatcaaaggatagaagtagaggagatagaaaaactagtgtgtcttttttgtatttgtccaatattgtttcctaccaaaatggttttttcttgaccaatttgaaatacatcttggggaaaaaaacgcctaaaggtttccactagttctctaaaagtgaatatttcacttcttgaaatggaactatttcatttacaattagttatattttctggtatacctttgtgttttttttctcctaatccctaacacatagttctttaagcctccatcgaaaacctagcaagatactgcattgtaagaggacctacctggacatagttctggctttctgggaattttaaatttttcaattatgttctctctatcttgttacttaatacttcacaaagatatgaatcttccattacagttttgagatctcacatagtctcatcattcacacatgaccttctaaatcttccagttatttaatgtaatgatgtatagtctcattccagtgtagctctgatttttttctcaaatttataagggagcacaattcagatacaaagacagtttctatggattatatcaacagtgaaatatcccaaattaaacaatctttgggagggcttctaaagtaggaagggtcaaaatttatgagtcctgagtgtgtatcatattttgaaatttatacatttgtatgtttattatgaaaagtaattctgttttcttttggatgacttagccccaggcagaggccaaagtgaatggcacaacggtgtcctctccttctacctctctacagaggtccgacagcagtcagcctatgctgctccgagtggttggcagtcaaacttcggactccatgggtaagtgtcctagctactctcagattttgttgtctgaagaaaggtagagtcgtattacagggacatgaatatttggccgtaagtgtttgactcatcttggtatcagggagccactgaaaatcatataccaggcgaaaaaagtctaaaaagaaaattctaaaaaggtgtattctggcagctctatctggcccacagaaaacttgtataggtgagaagaccagttaggaggcaattgccaaggccaagattggtgagttctgagggcctgcacttgagagatgtgggaggagaggactgtgagactattctataaaaatagacttgccagggggctgggcgtggaggctcacgcctgtaatcccagcactttgggagggtgaggtgggcggatcacaaggttaggagttgaagaccagcccggccaatatggtgaaaccctgtctctactaaaaatagaaaaattagccaggcatggtggtgggcgcctatagtcccagctactcgggaggatgaggcaggagaatcgcttgagcccaggaggcggaggttgcagtgagccaagatggcaccattgcactccagcctgggcgacagagcaagactgtgtctcaaaaaaaaaaaaaaaaaatagagttcccagggtctggggactgagtgcaaattgtaagaagaggaatgaagggagaggatttggttggaagaagatagtgaaacttctgattgtggacataatgtgtttgagaaattgacaggtcttctaagtcatgtcccaaaagaaattaagatacagatctatacttgaagtaagtgggcaaactggagagatttgagaatgagtttcatagaattgattgctgaagggtgtgagatgagaaatctataaaatctataacacaggtgcttcgatccagtgccttggaaaagacctccatttgggtaatgggatagtaaaggatggataagtagggaggttcaaggaagatgtgacaaaaaggtgaaatgctaaagagagctcaatggaaattaaaataaatcacagtccattgggtcactataaatgcattgggtaattttgagaaaccattttaggccaagagaagggaaggtggaaaacttctgtttcaatgaaatgaaagactaggtaatcttaaaatgaatgaggattaaggaaagtgaagacaattttgaaacattaccaagtaagaaggaagccttaggcaaaagttggatgaatttgttgaggaaatggtccacatgttctgttctcattcttagcaatgttctctgcctaggactaggttctaagaaaggtggagctgatgaggcataaatgatcaaaggtcaaaacaagagtagggcattttacagtggtaatgaatggctaggacaggggttcctagccagctgctcattggtttttcctgctgtgtctggctagacaatagagggttttatgaaggccacaaatacttggtcccccttcctcatttctctttctctgtaaaggcccagtaggagtcagctccatcctctctccttacttttccctgggacctaaactggttatatacttggtcctctcaaatcttacctcacagaatagaaaagacctgtgactccttgattccatacacttacagctctattgcctgatatgatgatgtgttcaggaattcatttcatacttgagctcttccatgagggtagaataaagggaggcaaagtgccttaaccaaaatggataggacagaaaggaaaagtcaggggtgtgggtgagttttatggcgaaaaatttggagatcacagtcgggaaaattcaaaagttggatatcatggaagtaaaatactttcaagcaatttctacatctaacatggtgcctcccagcgagctgctgaagattttacttggagatcactgaggggtagggagtacagttcatggagttgatgagaccaacgttgctgagcttatcagcagaggggtgaggtccagatcctgacgacagtggtagatcaggatggaaaagatgttgaagaagatggacgagggctctgaggagatgaacatttctgaggaaagagacagggtagttgaaataaatgtgatgaagttcaagaacctggagcagtgggaagaggcacatcctcctctggagaagccaaatcttgtaggaaagccaggttttgatttttttgagaaggaaaaggatatgtttgaggttattttcctgaatttactacacctccatgatttaaggcaatctctgtgtcagattatctccctccacctgagatctgaatatagctaataaactgttgggattgtaaatgacaacacactacatgaaaaacaactgtatgcatttgcaaagtctgtaaattctgaaaacaactgagctttagtacctcttatttttttctacttcaggattttcccccttttttaagtaagtaaagcatatgaaactaagttacatattttagtggtcagattcagagccctgggtgcttagaagcattaataattatttaggtcgttgacaatggcgaataggcagcatactcgttaaagcactcaaattaaagtgcacattaggatgtggtcctgatgatctgtggagctaaaaagatcatggtagaactgaataccaggacaaaagtgctatattccaatggctaagctaagagataacttgctggcataaaatggataagctgtgttaaatttgtcctctgaaagaaaagactgaattcaagggtactttttcttgaactgtgtattaatctgttttcacactgctataaagaactacctgagactgggtaatttatgaagaaagaggtttattgactcagttccacaaggctggggaggcctcaggaaacttacaatcatgggggaaggtgaaggggaagcaaggcatgtgctacatagcggcaggagagagaaagcgaggggagaactgccacacttttaaaccatcagatcttatgcgaactcactatcatgagaacagcatgggggaaaccgccgccatgatccagtcacctcccaccggacccctcccgcagcacatggggattacaattcaacatgagatttggatggggacacagaaccaaaccatatcgaactgcataagctaacttcatttaaaaaggaaaaaagccttaccgtcttcttgaaggatgcacacaggtgtttaaataaatgcagtgtatatacttgggctttgaaggtttgagatacaaggctgggatctgctgaaccacattctggatagagctgcattctttaaatatgcaaccccgatgactgattttcttttaagtgaaacatgagacaagtcatattaggtgatgtgtctaaagagtcaacatatttcctcaagccatgaaatacttatcactgagtctctatgtaccatttgtattctgtacagttcttactgagacaatgtgctaatgaaacgtacattctattggaggaagcaaatacagaacaaaatagcaattaacaatgtttatcccctattggctctcatgggctccatatacaaatctgtgatgtccagacaactccttatctctgatgactcctaactttccaccagattactgttttttgaagcattttatattttattgatttaaaaattaaactgttcctttgctttttaaaaaatttatcatgtacatttgaggtttatgacataatggctccctagctttttatttagaacaatttcaaacttatggcaaaactgcaattaattcaacagtttgccacatttgctttatagctatttatttatgtacttttacattcatgtgttgttaaatggattgcatatatttagattaacatgtatatctgtatgttaacatatttttatatactgtatatgtttatattttatgtgcatatttaatcatattcatgcgtgtatatagtttgtggatttttttttcactgatccactcaatggttaggtttcatacataacacttcacccctaaacacttgaacacgtgccttctaaaatgaaagatattcttgcataagcacaattatcatgctcaaaaagaacaatactgttatataatgtagaatttaaattcaaatacctccaattctgccaattaatattcttcatagcgatattttacattcaggatcagtgatgtccctgtagtctcctttaatctgaagcactttcccagcctctttaaatctttcatgacattgatatattagaagaggtcgggctagatgttttgtagaatgtcccccaatttgaatttgtctgcttgtatccaagtgattgggttcgggttaaatgttttatgccagattaccatataggtaaggtatcctcagtacatcacatcaaggttttcctcaagattctccatccccttcaccgttcttcactctccctgggcgctccttccatactttggcttctgctatgctgacaactcttaagtcaagatttccagcccagacctcccacctgagcatcttctggataaaattataaataaaaatatagcctaatctgaaatcatgatcaacctttggagcatctcttccaatttcccaatctatacaaagtcattttctaccccttcttcctttacctgccttccttagctatgttccaccaccatcaatccagtcaccaaggtcagtgtgttttgctacttatgaaaaagagcaaaattcttcaattcagctacttctgcccaaatttagccctcatcatgtgttacctgaacagacaatatgaatactttcctaattggttcctctgcctttggtctctctccctttctaagctatcttccagaaacttcagttcctcttctaccattcaaattatatcatattattcccctctttaagcattttatgccttctgtttgacaacagaataaatgtgctctttggccttgagtacattatgttcttaacctgaaatatagcatcctttcttttcactcagtgagttttcttttggaacttaatcatgcattatatcattctggttttgttgttgttgttgttgttgttgttgttgttgtttcttttgtgtgagacggagtctcgctttattgcccaggctggagtgcagtggtgcgatctcagctcattgcaacctccacctcctgggttcaagcgattctcctgcctcaccctcctgagtagctgggattacaggctcgccaccatgcctggctactttttcttgtatttttagtagagacagggtttcaccatgttggccaggctgttcttgaactcccaacctcaagcaatccacccgcctcagcctcccaaagtgctgggattaaaggcatgagccaccacacccagccatgttttcagccagttactagtacttctttcttctgcctacaactccctagaacttaagctccttaaggacaggatgtaagtcttgctcattgtcgttactgtatgaggatactctgtgcaacaaacaatcagtaaagtgcttgttgagttaatattttagaaatcaagcataatacattcttgtgtacacatggaacagcccacacgtttaggaaatttagctactagtttcagtatctttcaccaccattcacaactgatcagctaataatcagcaacaacattgtacaccataatatgttaaaggtgttacacacagaatttatgtgtgaaattgaaagcatcggtcctatatcatatggaaaaaaattaattgtagccaaatgttgggtattggatacatcagtgtgctttttcttctaaaaaatactggagaaaggcaggaaatacacaagtactaagataataacacatcaagtcggaaactggttaaaatccaaagaaaaatgttggtgggcgtatttgttcatacacagccccctttatgagaaaaaataatttcttgtacacagctcctttttaaaaaaaagagaaaataatttgtttagattcagacaaaaacacaggagtaattcttgtgtctattctgcataggctgcgtaggttctggctaaaatcactttttaagcagatagaaccattatcagcgtttgaatcaaagggaagtgagtcagatgggatatcttcccttcaagaaagggatctgaaaccatcgttatatttcagaagactgaagaatatcttgccatggcaaagcattccttttcttttttctcggattaaattgagtcatcccacttcttttttcttcacttcagcagtgattaaaggagactatcatattttgctatatcacggtactatttaactttgactatgtctttccttattttaaaaaatgtttcagtgatttatttggaccacaatcagacaagccaggaagaccaaatagctaataatccaaaaaacattatttttctctttttattatttcagtagttttcagggaacccaggtggtgtttggttacatgaataagttcttcggtggtgatttctgacatttgggtgcatccatcacctgagcagtgtacactgtacccaacgtgtagtcttttatccttcacccccctcccacccttccccccaagtccccagagtccatggtatcattctcatgcctttgcatccgcatagcttagctcccacttataagtgagaaagtacaatgtttggttgtctattcctgagttactttacttagagtaatggtctccaactccatccaggttgctgtgaatgccattatttcattcctttcatgactaatattccatggcgtgtgtgtgtgtgtgtgtgtgtgtgtgtgtgtgtatataaacaccacgtacatactgcattttctttatccactcgttggttgatgggcatttaagctagttccgtatttctgcaattatgaattgcgctgctataatcttggtatgcaagtatatttttcacataatgacttcctttcctttgggtagatatccagtagtgggactgctggatcaaatggtagttctacattttagttctttaaggagcctccatagtgttttccatagtggttgtcctagtttacattcccaccagcagtgtaaaagtgttctgttttcaccacatccacactgacatctattatttatgcatgtttgtggaaatcaccttggagtagagtcaagtttaagtgttaaagcattgccatcaactaagtttaaaatcccccaaagactagcaatatgctatttgagcaggcaatgaatctgtgaagtagggataagggctgtgcaggtctctagtgtgcaactggaactcagtattttcttgttgaataagtgaaaaaagtgaaaaggtgtttttgtttttggtgatgaggggcttgtgatgacaggtattattgttagagtcagaaatattttgaggttgcctattaatatggtttggctctgtgttcccacctaaatctcatctcaaattgtaatccccacgtgtcaggggagggacctgatgggaggtgactggatcatgaagaagttttcccccatgctgttctcgtgatagtgagtgagttctcaggagagctgatggtttttaaagtgtgtggcacttcccccttctctctctctctctctctctctctctctctctctctctctctctctctctctctctctctctcctgctgccatgtaagaggtgccttgcttcccctttgccttccaccatgattctaaacttataatcatgaggcctcctgaggcctcctcacgcatctggaactgtgagtcaattaaacctctttcctttataaattacccagtctcaggtagtatctctatagcagtgtgaaaatggattaatacacctattatgttgtagctacatagtgtatgattagacaagccataaatattatatctggcttgtttcatgcccataatagtgtatcagtcagctgttgctgcataacaaataaccacaaaattctcaagttgcatatttctcattcacgcatctgttgtttggctgaacttttgctggcaatcagctggacttgacaccaagttgtggtttgggttcaggtctgttcaacatgtctctcatccttcttgggctagcaagctacctgggccatatgcttcttgtgcacataaacacaagcgggcaaccccaaccagtcaaagacattctaagcctctacttttgtcatgcccgcttacattccattttccaaagcaggttatgtggccaaatccgaatccccaggccagggaagtactgttttcccagctcttgttcactctgctttatctacattagacttcttgctgtgcttgaggaagccagtcacactctcctctcagagtctttgcatttgccaatccttctgtctggagcacttttccctcaaatacttgtgcaactcataccctccagttcttaaagcttttgctcaactgcatctcatcaatgaggacttccaagactccactttctgatgactctcattgtcccttgctagccctctcctcagagtgttcatcaccactcaagatacctatatagtttacttatttacttgttaagcctgtgtgcctccttatgaatgcgagtttcacagagagagtgtgtgggtggggtttgtttgcttattgctatatcttcagtgaacaatatgccaggcactgttcaaccatttgaacagtgcctggcatatatagttggattttaataaatatttgaataaataaatgaatcttactgtttttaaacttttgtggtttttaaaaggcattttaaaaatctgggttagtatcaaatattacaatggtattactttaacttcaggtttcatttagctgttttaacttttacaatatattctgacacagaaaatattaggcattaagcatttttcaatgagttgattcacttctactcatgcacatatgtgatgtctgatttcgattcttaaaaagagatgagcctgggcgtggtggctcacgcctgtaatcccagcactttgggaggccgaggcaggtggatcacgaggtcaggagattgagactattctggctaacacggtgaaaccctgtctctactaaaaaatataaaaaattagccaggcgtggtggcacgcgcctgtagtcccagctactcaggaggctgaggcaggagaatcacttgaacccggaaggcagaggttgcagctagccgagattccaccactgcactccagcctgggtgacagagcaagactccatctcaaaaaaaaagaaaaagagaaaaaaagcaatgcattaaaaccatcttgagaaatcatgaaaatatggagaaaagaagaaaacaagattatactctacttgtttttatactacctagaatgtaataggcactcaaaaaaatgtctgaatggatacaattatcactgccttaaaagttttccattaaagcaaagaagccaattttacatttgtattatacttggacactcatattaaagactcacagagagtttatctggaaaaataaacttggctgacatcattaggtttatactttataatttgatctttgaaataattcaggaacaggaatgccagtcacttcattgaactgtacctgaattttaacacagtacaattgagttcctagagctccaatatgatgtaattaaactgtcagaaatattaacatcgatgttcatgagcgtcgttcatgatgttctcttggttctgatttattcagtgaggcatactgtcactgaagtggacttactgccattaaaaatgcctcatgtttcccagttccgcaaaaatttgcatcagtaatgaaacagagagatgtaatcagccctgcagttgtcaggatcttgatcctcttggtagtatttcattcatttcatcttcaccagataatggtagtttaaaaccgcaagaaaaatgaaactaaaaatagtgaatttcacttctttttctaaaggcataaacttaagcaaatagtgcatgtgtgtgaggggggaggaagagagagagaaagaggagagagagagtttgtaactattccttttctgctttgtgaccttaattcttcagcacccatttcctgtacttaatattgcaaagaggtttcctgtggtatgttaccaggagactcatgtagtctgaggctttttatctaccttacgttcttatccctccattctaataaaaatatgaagcctcacatccacctagaatatgattttgtcttaatggttagcattggcaatgattcttttagcttctgctgttaaaaaaaaaaaaaggaataaatgcaggattctaatcaaacatgaaaatccaagtggcatagaccaaagggaatgagaagcatatttaagtcatttagtcactggcttccgaagcagttccaagtcagatgtaaacctgaggttgtccctaattaagttcattatggttgacttgctaaagcaaggtcttgttttagatggaagtgacaatgtgcaaaacaaacagagcttgaatagaagttattttcactattggaagattgtatattatgaaaagttagtttcaaaggacctttaaagtttaattttgtttgcacctaagaaatttccctttaacttgcaaatgctgtttgaagtgtatttctttaacacatgaacaaacaatacagacacagattcacaaaatctacaaggagatttccattcccagtgaatatcatccatccataggtttctttgcttccagatcatcattctctcctcacataaacagtcaaaatgtttgtaatgtcttctttataaaacccaaaacataattatgataaagtagtcccaagtaacagaggaaaggaccataactctccaatatatgccatatctacagtttttagaatattcatatttcattacctatataggatatatactatttttatttctattacattggagtttaaaggtacttgagtttcgtttgtatttttggttaaatgtcaaaacaaagagtgaaaaaaagacctcagtgtctcaactcccttcttaccttcatgaagtgactgcaaagtgttcaattcttactcttttgtgttgaggagacagcactgcaagtgtgcagtaatacttattttattacatagaacaaagtttcacatttgtgaatggggcacaaaagagagcttgtcagttttacctttttcaattgactttttcttttattctttttaacttttaaatttattttttgtttttttgtttttttgtttttaaatagagacagggtctcactatgttgcccaagctgctctcaaattcctggcagcaaacaatcctcccacctcggcttcccaaagggctgggattacaggcatgagcgaccgcacccagcctgttttttactgtagtataatatttgtacatatttatggagtgcatttgatattttgttgcatacacagaatgtgttaatgatcaagtcagggtatttagagtattcattatctcatgtatttatcatttctatgtgcggggcacatttcaagtaactagtcaacttttaaaaagatacgcagtaggctgggcgtgttggctcacgcctgtaatcccagcactttgggaggctgaggtgggcagatcatgaggtcaggagttcgagaccagcctggccaatatggtgaaaccctgtctctactaaaaatacaaaaattagctggacgtgttggcgcatgcctgtagtcccagctactcgggaggctgaggcagaagaatcgtttgaacctgggaggcggaggttgcagtgagccaagatcgtgccactgcactccagcctgggtgacagagcaagactccatctcaaaaaaaaaaaaaaaaaaagatatacagtttttttttctccaagggtaatgatatagataaactactgtatggatttcttcttccctttaaagaattacttcctcattattaagcttgagggttttctttgttatttatgagcaagtgaaatgaatttataatggtgttaaaaatgtaatcatggccctttaatatctgttttctataaatgtaattttccattatttgtttttgcttttattaaggtgaggaagatcttctcagtcctccccaggacacaagcacagggttagaggaggtgatggagcaactcaacaactccttccctagttcaagaggtaagctccaatacctagaagggactcagatttgctgggatcaggccactcgcttccctacccaactggtgtgtgtattttccatatggaagccaacacgcagtatcagaatggcaatttgggtccatggtgaaaagatttgatttttaagtgtgaatttgtggtttagagtactctgaattcaaatacccgtgagggcaacatgtttccaaaaataagaataccaccctctatttgtcaagtattttacttgcttcacacattagtctgaagagttaattatgaggtgccctttactgaagagcaattattatgtgacttttacagatgaggaaattaatgccctgatagtgcctttgccagggacatatggctactacgtgctacagcaaggcctagaacaatgcctactgattggtagtggtagagattctgacttgccatctgatgccctttatatttaaaaattgtatcttactccatcatttaaatatagggacaattaaatcttcatagagtagttggttattttttacttcgatagaggaaatacaggcttagcaaagaaagacattaatatttttctttttcttcatcactttggccttgcgtattttacccccatacaaaaacagcattttaccctgcagaattttcccactggcttgcatgagcttcagatgtcttgcttcatccaagatgatgttttgctgctactgttcgtttctgggggcatttatttggtttattgccctcacataaaacaaagtcactctctcgccttccttcaacgaataaaaaggatggtggcagtcacctgtgatcaaatagaagaaaagcctagagaaacaaaagggagaaaacacaaggctttgtggccagtgattggcacctctaatgggtagcctgggagggacgggcagcaggaaatctgggctgtttgttcctctccataagggcaatgaggagggtgtattgagtagtgtgtttttcctatctttttgttcagtgtcagttaacaatggccatttcctagctatttgatgtgcaagtaaacgttgtgcagtgcacattaaaagcaataatgttctggtagagcgttgctaaggaaccgtcaggggaagctaattttaaatgtctgcaccagccatcttttcactgctgagcgccactgaagtgatgattttaacagataaaaatcttatctgtcttccacccacctccacatcccccaccgccacccgcatccccattctgactatcttaggtatctccttcttctagatgtcataattcataatgagaagatcatacacaggcttgacagaatcaggtgctttcacgtgtctcctcattactttgtcctgcttgcttttactagcacctactacgtaccagtggaggtagtagggatggaaagaagaaatgacaaattccttgccttcaaggtacttatggtcaattgcagatacagaactccaaagaaattcaaatcacagtacaatcattgattactgtatgatcctggccccttgaactggcagcttgcttacctgctctggaaagttgctggctgccctgttggcaccctgggcatttcttccacatctaaacaagaggttagtagagaagaagctacagcaaggctcatgactctgcttcttcataggcagccttgacttcctagactcctttttgtacctgagtttctggtccaccctaattagctgtaaggtgaaatcctttgcaccatctccctgtgtcccgcttttagagtccttaaagctagataccacatgggtgtagaagcttcctggaagacaagaaatatacctcctctgatatggtatttagcagtcagtatctctgatgttgatttacttacttgtatggaaacttgggaaactcaattcaggccacctggatagtgtttactaaattagtgcttacggaagaatttcaggccttaagggctgatttaagttctcaaatgtgggagaaggaagccttgtccgataccaattccattaacttaagttccggcttactcagtggtacccttgtggcctgagaaaataaattcacattcttaaaaaacaaaacaattaaatacacaaaaaacacaagagagtagctaaggtattggaaaatctggcctatcattctgtaataccatgatcttggcatttcctcacgttttgctactttcagctaactcaggctttcttacaggcctttttctccccaaattcaagtggataaaaagtttcattattgtaaaaattaggctaattattgatgcactcaaaaaagtggtttttggatgctttctttccaactaaaagcacttttgttttttaattttgaaaaatggcatatgtgtgtgtacacacacatataccgtcaagtttggcgggaacatcttaccagttggtagatgtgttcagctgatattaagcagaaattcttgagaatcttaacatcttgggattacaaagtctttcaaatggaagagccttgaaaggtcattttaacacttttgacatccaggacagtgatttctgactctgttttgatggttatccatatcagaggaacattttacatcacaaactggggtaaagatataaaataaattgtacatgtgtttatgtacacacatgtatatatacacccaccatatgtacacacacacatttacagtgtcatatgcatacaaagatcagaaacaaaagtttcatcaagtgatgccttccatactacatacagtgcatgctgtttttctattttatttatttaaaaacaaaatgctggttgcaacccactaaatggattttctgaaccagtggtttaaaaatactaatctatgtgatctcagtttttcttgcctggttgaattatctttcaaaaaaatttaaattttgagatttttgccgtggaagtttctgccaagacgttgctaatgtctcagagacctttatagttttattctaacactaccatccatgttctcattgttgtgttacaaaaaacaaagttcatgattgctacagctgttttggacagctgtttgagtaactcaaaacagatgtgagagccagaggtctgacatttagtggaaatgtgctattaaataccaccgcgtggtttacttaaccctgctagataattgcccacagaggaaaagccgtttttaaaaaacttatgctcttcataaacataaagtatatagataggtaagctattatgtacctcaaatttacaacttttctgttgccccttgccacagagttggtcctgaaggtgtcagctaacctttctttatcttttattttcacaaagagtacctggaagccaagaaaagtcaagtgccttatttatggccattcagcaggttaagttaggcttctaatcttatcttaatggctttgctaaactgttatcaaaattaataaatgagtggcatgcttctccatttagtgataaaccgatggccaacactatcctgcataataggcaatataagcaggagcatattcaagatatgaatgtgtaaacattcagctttgtgattatatctttctggttggtctctagatatacttagttgttcacaaacacttgggagatttgagtggctcagtgtatatttgaacactgaatattagccaatttctatctaatctgtctatctctaatctcttcctttgtaagtatatgtgtagaaattgaattatagtgtaataagtcattatctactttactataaggtactctctaaagctctgccattctataggaaaactacatgggtacaataaacaaacgtaatttaaaaaataaccccattaagtgatttgtccataagtctctgatcatttagcagactaacaaagatatttttatatgtatgtgcattgatgaaagaaacgctctcctagtcagtagtatggtattaggctctctaaaatgtggtaccactttatatagatgaatgaataataggagccaagataagctcttaatgcagtaaaacaatccagaaagcagttagcagtgctactatttctgctacctgtacaatctcttgcctactgacctgtgccacattatctccaccagcccatgccatcctctttttttcataccatcccctctcaaataagcccgcgtacattctatcaaatacccctaaattaccaacccaacagctttgtaaaacctaccgtcttttaaaattaaaatcttattctgtggttcttttatggaagagcaacataaagaacaaaggcagatagaaatatggtgtgccctttttcaggcaccattctgtttcctgtatgctcccacaaaggatttgagcggttatccctttaatccaggactagcaaactacatacagcccaaatgccaaatctggcccaatacctgtttttataaagctttattggaacacagccatacccattcatttacatgttgcctatagttgctttctcattaccagggcagagtagttgcagcagtgctgaatagctggtccagagaccgtgggcttgcaaagcctgaaatatttactatctggccctttatggggaaaatttgccaatccctgctttacgctattatttcgttgtccattctgactcattacatgtatagagtcacaggcttctgtgctgatcaactttcagctgaacaagattattgagctgaaattgaattgatttatagatttatattcatattcaccaaagagcctgcaagtgtggccatttgaatttttttgacttataaaataacagaaatcctaaaaagggacttattcttccttaagtattttaaatagtcagtgaattaatataaaagaggctaaaagcacccagaaacagtactgtcctgcaattccaactctaaaataatgaattacaatcaataatgtcaattttatagtgcccgaggaaattagacttctcgggacctgaccaagccctttatttagactcaggactgccccagcacacttcccttttgtcttgattcatttcctgacaacacatcacattgccagatggacactgtaactgaaggtctacagaaactcatttccaaaaaaaaataaatgtttagaaaatgaaacatatctgaaactttatttatcggtcaagaacttttaaaaatgttgtaatcaagtagcctctgttttgtcagcgtagaactagtccttttacagtagaaaatatcatttgtttttaactttttctaaagtgaaaaaaaggaccttccttttgtaatgtgttaatgagtacgtggggacccaagtgatgagggaggattttagaagagattagagttagcttggctctgggaggtccattttcataaaatatggtttctgaagaaggatctggaacataacacaagtcatttgctgctacatattaagaaataatcaattgataactgagttctgaatatggcttagtgtagaattactaaagatatgtatcattaagcattcaaagaatcatcgttacattctgaagtacataaccataattacattctaaatcacatggctttctaacaacactgtccttcctaaagatctcaagttttcaaaactagaccaaagttacatgccgaaacaagttacccacctttggcatccaaactaaagtgtgccagtgaagggcaagttacttataacacagaaggactcctcttggtcatgacccaactactactttaccaattcacttcagccagtatttatcaaataccaaaagtgtgtatatacggtacagggcattgggcatagagaggtggatgagcaacatgtggaccccgtcctcaagaggcttatagtcttacaggggaagggaattaattctgccaccagacagtattatgaaacataaagatacttttttaaaaaaaccttgctaaaggaatcaaaaagaaggggtgagtgattcatactgggatttcagccatcaaggaaagaatgatgttctcctccccaaatgatgggaacatcatttggtatggatctcccactagtgacacccacagctgaggagctagtacccatttttctccctcttttccctggcttgaggagcatcttaaatacctggcccttacgtggtcaagctgaaaatctgatactcctaagaaatcgctgagtcatgtaggaaattcagaaggaagagaggaagggagagaaggagaaagggagggaagaaagagaaggagagagggaagaaaaacttagaaactatccttaaatgtatactagaagttttgaaccctaaccttgagtgagttttgaaaggtttctattggtgtcgtagctccatacctcttcattccagactagtagttctcaaattgtttcagggagtttttagtcttcttggagccactgagaatgatgggtggaggggaaagggagatgctgtacaggatctctcacagctctgctttgaactgctcaaaatattggaattccatataagattgttttaggagatgtcccattgctatagttaaaacagtttgaaaaccaagattttaaaggaaattgcatgcccaagacaggctattgacatgtatggacagaagtccctacttttctgtccaattatgacttatcatagaacactttctcatcagagtctacttttgaaatacaaataaatgcatacagatgtaggaatctatgaatcaaggccagtgggtctttagccattgcctcgtaaggctcctgatatttgctgaattggggaggaagtggaaagctcattcctggatctggctctgtggcttgcccattactgggacttacctcttcccctcatctgttctttctgttttctcaaatgcctccaatttcatcatggaaatgctcagcttctatcagatagaacaaattctcccaagaggatggagtccagcctctatgtcgggttctaccttgcatttgatgtgcagactttgggcacacagagtcaactactgtttatgtttcaatgtgctgattgtcaagagtgaagagattctgagactttttttaacattaagtttgagttgtccttgaaaacaatgcccaatttgtcagatttctattctgtgccagttttcatccagtttaatgcgtgaactctatggattttacaaatgacgtcttctggatcatgttatctgtttacactgatcttaagtgtatgtaaaggttatttgactagatgtgtcttttgggttttttgtttctgtttttttttttttttttttttccagcagagaataaatggtcatctcaacatttgtttggtaaaagaagcaaattggtatgaaattgtatatttatgcatgttttttttccctttctgatatctctgcctcttcctctctctattattaaaggaagaaatacccctggaaagccaatgagagaggttagtgagattcaggctcacggccatggcttctgtctgtctcatcctgctttttatgtttggcgtttgtgtaagaattgtgtgtgtgcacgcgcatgtgtgtattacacattgtgtcatcatgtaaggatggtagtcacctctccacttgcagctcatgaggaacattcctcaaatgttcattgccgttgtcatcaccatgacgacaagactggggttgggagcaagaatctctttaaaatggcaatcctttgtagtccctaggttggaatcctgccgttcatcatctgttgccatttgcaacactaacaaaatcttcaaaataaatttagccttgaacataactgatgagtcataaagctttcttccacttccaggaccttagcattttctgccagcgcccttagtttttattcttctgggatgacttcattttgcttttgtttccttttttcttggttcctacgctctttctctcccattttagcgaacattttttgagcacttactgtgtgccaagcattgttctcagcacttgccatctttttcatcatgtcatcttcatgacaaacctgtgaggtaggtactcttattaaccccgttttacagataaggagactgagtcaatgagagagtaagcagtgtgtcccaggtgacagagccaaggatttggatccaggcagtctggctccagacccacactcttaactctcatttgaaaggcttacatcatctcaacgtacccttcagaagatgatcttttttatttggtatttgaagccacacagaacaataaccaattcgattaaaaaattaaatattggagttttgagaggtttttaaaatgcctatttatgggttgaaagggatagggtgcagtcttatcactgaatgtggtttcaggttttacggtgaaagatgcttcttactcctattccaccaggaatattgtctgaatatcgaattacctaattaagtgactgttggatgacaaagtgttaactgacagcccaagtaaaatcaaggttgtctttaccaagaatttaatctgaaggaggagagaaggaaagctctcccatgggatgacagtgttctgggagacaggctggatgggtggagagtccttcttaaatgagaagattctggattccttagcaacaggatggactggagagaccactgattcatttaaacacaggagtcgtaatgaaaactctgccaacatcatgccatacaagtctaatcaatttaatgattcttcagtgtgtctgtgccagtgcctccttccaaggctttgggcagtggggccagggagggaatggtaggctgggaggagaaattgaggaaacctgacttggtgaagcattgaatgcccctgacggtttgcctggttcatgtacttcgtatgtgagacttcttgggttcattcttatggtaagtgccccttaaaatttattcattttaactttttgtagaaaaatgcaccataattttgaccaccttaaacatgtttcactcacaaatgaatttcagaaaaggctagcacatgtaattgaagttatataggcatttgcagacttgactacctgaggtgtatggtgttcagacaagtttccagaagccaaagaatcaaaacaataatgaccttttttaatgctatgaaaatatcccaaatgtacgtaaagcagatttttttcagagattaaattatagagaagaaaagataagcaaatttccctgtagtattccggctttcctttggacaactgaatgctaacaatttatttgggaattgtatttttaaaaaatagagcaccagattgctattgaggtcttggatctttgccagaaagtctcaattccaatcgctgtggaaaacaattccctcaggcagtggtgacgtgtgagactaaatgtgttgcagttagcgccaacttgaaaaacatacaactgccctaatgttcaaggcatagtgcctttgtgttcaataatccttaagaatggattaaatcaatactttctatagacatagttttctgtcaccttgtgcctgaaggtgattgcaaatgcctgaatcctggctgcttttcagtacctctcatacttcatagtatgagattgtaattttgactttagaaaaatctgtcaggtaacattaatgacctcccgaatgctctgccttacacacatggataatagaactaggatacaaatctactttctatagtcatgtcacagtgcagtcttacccctccaacggattaaagtatgattctttagggcagtagtttgtaaaaagagattgacttcttttttctggatctaatgaaaaactccatggaaagaaattagaattatttattctggtaaagcaggtatttagtgaagtaaccaaaggcataatatagatgatgaggtgactctaaaagttctttatttttatagcacaaagatggccacaaggtcatttgtgaaaatgcagcagtgtaaaccggttaaaggccacccaactttttgtcggagtgtgcatggcacattaagaataatgaacctgttttccctggcaaatctttaaatagcagatacccctagaacttatgcttcttgagagactcaagaattttccttccagttagtaactgaacaccatttcaaggaagagaagcaccacttggctatataatccataaatgcatttatttgttttattatattttgaactgccatctacatcccctagcacacagcctaaaaagaaagacactttgtgattatcgataagctgacaggaaaaaaaatgagttttctccccttttcgttgatgttttgtaatatgttttctagctactaggtggactacatactatagtcacatgtgggccatgagaaatacttcgaattacattcaggcaccatgttgtaaaggtcctggactttgtttttactgattttgttaaccgtaaagatcgctagtaattaaaaattggcagttagtccatctatcttcaatttatgcatgaataattatgcagatttcccagggttgctggacagccaaaaatagatacaggggaagccctccaacttgatagcagcagttatatatttgtactctgagctctaaggagcagcaaaggccccactgtgtcgtcttcctgtggtttttatggcacagaaagccaaaaatgatttcagttcttcactgagggctgccaaactattggcccactttatgaatagttgcatatgctttgttaaaaaatttttatacttgcagtctcagccaaaatccaaagtgattttctaaaatataattaatactccatgaaattctttgcactaataaagcacaaaaagatagatatacaaacttggtcaccttaatagaaatgcctgaatgacattaaacttttaataagtaagtcttcagttgatctggtgccatcactgtttaagtgcctgcccgtgaatccgcttcattttgtagagaagctatatctcttgaaataaatattaaaacaaaatactctccctagtctatagctttaatttttattgggatatctttaatttttattggtatttttaacaattattatgggaatctgtaaagttgatacatggcaaggtagtaatagcctagtaaagcatttcagttccaaagacaatacttgaatagtggaaggatttaccaatgtgcaataattaaaattagccatgtaaaactatgggacatagacgaaaaggcaagccataaagtaagtctcagattatcttactctaaatctgaattttgctacgaagtacccagggacattgtgctgttctttttctccgtgctgggagattcgtgctaggtcgtgctgcattattagtaaaaggctattgtgatagttaaccctcatttaggaggagctctaagatggattcacaaaatacccaaatgcatacaatacatgtgggtcaccttataattagggtctagagtaatttggaatgtaaagcaatttttattctgaggtttcctaattcaaatgttaatagtgcaccaaaaggtcaattcaagagtttattattattatttttcaacccaagtaaaagcagagagaaaatagccacctccaccatagcctcagaagcaagccaacagcctgaaacagctttgaaatgaaaagttggtgtggcggtgatggtggcagtgataatggtgacgatggttgggtgctggtgatggtagtggtagttgtgaaggtggtgatggtggtttgattgatagtaaaaaaaatgttcgttaatacaagtagagagtaagtaatcaatcaatcactcatagccaaggtggaaaagatgtatcccatcatggaatattcctgttctgatagaaatcttgtgcttatctatggaattcttttgatatatatttacattgggaacctgaatgtagcttgacatttttccatgtaaacaccagtagcctgatccaacattaagctgatactaacaaacaacgtgtaatggcttcattaataaggctttgcttcttcctggaaactggtgaaaaatcaaaccttgttgtgtacaccctcgatgcagcttctgtgttgtcttcacccagaaatggggaatgatttcccaaatggcaaagaaacagagtgatgctatctatctgcaccttttgtaaagtctgtctttctttctctttgttttccaggacacaatgtaggaagtcttttccacatggcagatgatttgggcagagcgatggagtccttagtatcagtcatgacagatgaagaaggagcagaataaatgttttacaactcctgattcccgcatggtttttataatattcatacaacaaagaggattagacagtaagagtttacaagaaataaatctatatttttgtgaagggtagtggtattatactgtagatttcagtagtttctaagtctgttattgttttgttaacaatggcaggttttacacgtctatgcaattgtacaaaaaagttataagaaaactacatgtaaaatcttgatagctaaataacttgccatttctttatatggaacgcattttgggttgtttaaaaatttataacagttataaagaaagattgtaaactaaagtgtgctttataaaaaaaagttgtttataaaaacccctaaaaacaaaacaaacacacacacacacacatacacacacacacacaaaactttgaggcagcgcattgttttgcatccttttggcgtgatatccatatgaaattcatggctttttctttttttgcatattaaagataagacttcctctaccaccacaccaaatgactactacacactgctcatttgagaactgtcagctgagtggggcaggcttgagttttcatttcatatatctatatgtctataagtatataaatactatagttatatagataaagagatacgaatttctatagactgactttttccattttttaaatgttcatgtcacatcctaatagaaagaaattacttctagtcagtcatccaggcttacctgcttggtctagaatggatttttcccggagccggaagccaggaggaaactacaccacactaaaacattgtctacagctccagatgtttctcattttaaacaactttccactgacaacgaaagtaaagtaaagtattggatttttttaaagggaacatgtgaatgaatacacaggacttattatatcagagtgagtaatcggttggttggttgattgattgattgattgatacattcagcttcctgctgctagcaatgccacgatttagatttaatgatgcttcagtggaaatcaatcagaaggtattctgaccttgtgaacatcagaaggtattttttaactcccaagcagtagcaggacgatgatagggctggagggctatggattcccagcccatccctgtgaaggagtaggccactctttaagtgaaggattggatgattgttcataatacataaagttctctgtaattacaactaaattattatgccctcttctcacagtcaaaaggaactgggtggtttggtttttgttgcttttttagatttattgtcccatgtgggatgagtttttaaatgccacaagacataatttaaaataaataaactttgggaaaaggtgtaaaacagtagccccatcacatttgtgatactgacaggtatcaacccagaagcccatgaactgtgtttccatcctttgcatttctctgcgagtagttccacacaggtttgtaagtaagtaagaaagaaggcaaattgattcaaatgttacaaaaaaacccttcttggtggattagacaggttaaatatataaacaaacaaacaaaaattgctcaaaaaagaggagaaaagctcaagaggaaaagctaaggactggtaggaaaaagctttactctttcatgccattttatttctttttgatttttaaatcattcattcaatagataccaccgtgtgacctataattttgcaaatctgttacctctgacatcaagtgtaattagcttttggagagtgggctgacatcaagtgtaattagcttttggagagtgggttttgtccattattaataattaattaattaacatcaaacacggcttctcatgctatttctacctcactttggttttggggtgttcctgataattgtgcacacctgagttcacagcttcaccacttgtccattgcgttattttctttttcctttataattctttctttttccttcataattttcaaaagaaaacccaaagctctaaggtaacaaattaccaaattacatgaagatttggtttttgtcttgcatttttttcctttatgtgacgctggaccttttctttacccaaggatttttaaaactcagatttaaaacaaggggttactttacatcctactaagaagtttaagtaagtaagtttcattctaaaatcagaggtaaatagagtgcataaataattttgttttaatctttttgtttttcttttagacacattagctctggagtgagtctgtcataatatttgaacaaaaattgagagctttattgctgcattttaagcataattaatttggacattatttcgtgttgtgttctttataaccaccaagtattaaactgtaaatcataatgtaactgaagcataaacatcacatggcatgttttgtcattgttttcaggtactgagttcttacttgagtatcataatatattgtgttttaacaccaacactgtaacatttacgaattatttttttaaacttcagttttactgcattttcacaacatatcagacttcaccaaatatatgccttactattgtattatagtactgctttactgtgtatctcaataaagcacgcagttatgttacaaaaaagtattgactggactgcagtactttgtttttattttaatttagttgttgttacttacttacttactttttaaataggtaatacatgcatatgagtaaaaaactataatccagaaagacagtgaaaacactcctaactaccccttcccccatatcaatcaatcatcctcattgctctatgagtagacattattaatttcttatttagtcttccagagggtctttctttattaattattatataagcagttaaaataatatatatgttcctatttatttttttcctattattatttcataggatatagcattctctgcacccagttatgcaccttacttgtttgtttgtttaaatttaaatatggactcaagaaatcttttcatttaaatatataaaatgctttctcattcttttttatagctgtataatatttcattatatgttcataggatattttatttaagcagttccctttggtgggatatgtagtctgttgtcagtctttcttttgctataacaaacaatattgcacatttctcattacatcatttcatttgtgcataaacaaacaaatctgtgggatacttcctagaagtgagattgctggatcaaagggggtaagcatttgtagactgggagatgatacattttgtgcagtgattgattgattgatagtcatagtgtttgtttgtttgttgtgttttttgttttaataatgacaagtatattaattaagtcagtttgcagttcatactttgcttctcaagagaatttcatatcacttctattcttaatgtcaccatctaagaggatgcatgagtgagtagtaagaaagagacacctaaaatgatgtctcacaactggttctggggaagaagaatcccttaccatagtcaaccaccaccatggggagaacctctcctttgcccctgccctgctctgtttcttgccctagctgcaaaggaagctgagaaagtgggtagcaatgtcagcacttcttagggagaggctatctatctttacctattcccaaggttcatggatggggtgggcggggttccccaacagtgttcagatactggtgagccaaaggaataacataagtccaccaggtgcagcctatcctagtgattttggaaataataggagatgagatgatccatctcattagaaatgatgtttgttagtagatgtggcatctctgctgtgaatcaatcacttgctaattttttgaaagtagggtgatgatgctgacctaagtgactaccacattgaaacacttcccttgacatccacacataccaagaaaaattttcatcctatttaaataaacaaatcatttatccttcccaccattacccgaacctacctttgtttgaaacacccagactggctgttttggtgacacttaaggaggtaactgaggaatcttcaatacttcaccacgtctaagacaactgtgtgtggatgactctgaggagggcatttggttttccattccatacttggcacacactagaagagacagaattaattcagttaaaaattaaaatgaatcgagctggcacagattatgcaccggcaagcaaaatgtgtgtttgtttgggagaaagcaccaagactaatggatgtgttctgtagagctgcgatgggatttccctgaatttgtaatgctctaatggtggaatgaatacaaaggcaggcactggcgcacttgcaaagactttgccttcaaattaagtgtaggaaggacacaaatcaaattctttcccacagtagcaaagccattggagtaggaactataaatatgttcttcaatgccccttgcacgtcagtgtactgtgatctcatggacttagctgacaacacaagagtggcagcatgcccaacattccataataaacaatattgtgtgaatgtgtaaagtttggggatgtttgtttgagagtagcttttgtgtacagaaaaggttacctacagtaacttgaggtttaaa

SEQ ID NO: 754 - skipped

SEQ ID NO: 755 - DNA, 21740 bp, Homo sapiens
gaggggtggatcacgaggtcaggtgtttgagaccagcctggccaacatagtgaaaccccgtctctactaaaaaaaaatacaaaaaattagccaggcgtggtggcgggtgcctgtaatcccagctacttggaggctgaggcaggagaatcgcttgaacctgggaggcagatattgcagtgagccgagatcgcgccattgcactccagcccaggcaacagtgcgagactccatctcaaacaaatatatataaatataaataaatatatatatatatgtaacttcctggcacgatggcacagacctgtaatcccagcactttgggaggccgaggcgcgtggatcaggaggtcaggaattcaagaccagcctggccaagatggtgaaaccctgtttctactaaaaatacaaaaaattagccaggcgtaatggtgggagcttgtaatcccagatactcgggaggctgaggcagagaactgcaaactccggaggcggaggttgcagtgagctgagattgtgccactgcactccagcctgggtgacagagggagactctgtctcaaaaaaacaaacaaaaaaattaaataaataaattaaaactaactaactaaataaatatctggatatctgagctgggtgcagtggctcatgcctctaatcccagcacttgggaaagcaaggcaggcagatcatttgaggtcaggagttcgagaccagcctggccaacatagggaaacctcatctctactaaaaaaattagttgggtgtggtggtgcacatctgtaatcccaggtactcaggaggctgaggcaggagaattgctggaacctgggaagtagaggttgcagtcagctgagattgcagcactgctctccagcctgggtgacagagtgagactctgtctcaaaaaaaaatcaatatctgatatacgtgtttatttttttattgagatggagtcttgctctgtcgcccaggctggagtgcaatggcacaatctctgctcaccgcaacctctgcctccctggctcaagcaattctcctgcctcaacctcccgagtagctgggactacagatgcgcgccaccatgcccggccaatttctgtatctctagtagagatggggtttcaccaggtcggtcaggctggtctcgaactcctgacctcatgatctgcccacctcagcctcccaaagtgctgggattacaggtgtgagcgaacgcatctggcccaatatctgatatacatgttaattgaaactgggtgtggtggtcacacctttaatcacagcactttgggaggattcccttgagcctaggagttcaagaccagcctgggcaacatagcaagaccctgtctcaaaaaagaaaaatttaacattgactttcctgtcagagataggaagtaaataagacatttatggtgaacttaaagcacatatggcagctaaaggtgacagtgtctcactccagctgacccttgccctatggaagtgggcctggaatggcccactatttttagtgttggcaactagttaaaaaaattaaaacattcgaggcaggtggatcacttgagatcaggagttcgagaacagcctgggcaatatggtgaaaccccgtctctactaaaaataggaaaattagctggacatggtgatgcatgcctgtaatctcagctactcgggaggctgcagcacaagaattgcttgaacccgggaggcagaggttgcagtgagctgagatcacgtcactgcactccagcctgggtgacagagtgagactccatctcaaaaaaaaaaaaaaaagaaagaaagaaatggccatttgatttagtctttcagagtcacatatttttttttttttgaggccgagtctcatctgccaccatgcccagcccagagtcacagctggagcctgaactctgcctcagtgtcttccccacttgtgcctttgtcttcgcggttctgcctattatagcctttcctcccttgctgcttggcaaacttctacttatccagtaagccttggcttcagggttaccatctctctttagtgttctgtggttgtccacctgatggatgacttactctgctggcagggtttccagtctttgattccatgtgatggcacttactacactcaagtacactttgtggtctgtgtgtctcacccacattcacccactggctggtcctgtggtttaggaactgagcttttttttatccatatccatccagtcggccccatgattggaacatactatgcagtgctcaggcaatgtttgctgaagcgcaggggttaagagcaggctacctggcttgggaacccagctttgccacttcctgtgtagcttcagcataactttccgtctttctttttttttagagacagagtcttgctctactctatcatccaggctgcagtgcagtggcgcgatctcggctcactgcaacctctgcctccggggttcaagcaattctcctgcctcagcctcctgagtagctgggactacaggtgcgcgccactatgcctggctaatgtttgtatttttagtagagacggggtttcaccatgttggtcaggctggtctcgaactcctgacgttgtgatctgccctccttggcctcccaaagtgctgggattacaggcgtgagccaccgtgcccggtcaactgcctgtctttctatgcttatttcctcatctgtaaaatgtcatccttagcagggcgtggtggctcacacctgtaattccagcaatttgggaggccaaggcagatggatcatctgaggccaggagttcgagaccagcctggccaacatggtgaaaccccgtctctactaagaatacaaacattagctgggtgtggtggcgcacacctgtactcccagctacttgggaggttgaagttgtagaatcacttgaacgcgggaggcacatgttgcagtgagccgagacggcgcccctgcactccagcctgggtgacagagtgagacagtgtccccccaaaaaaaaaaaagataaaatgtcatcctcacatcagccttttgttgtgaaaaataaaatcaagagtttactcagtcagaacagggcctgacagtaagtcttgttaaagtgttagctattacatattatagatgagcacaatgtatatcattattaaatgtcagctttattattattatttgttttgagacagtcttgctctgttgcccaggctggagtgcagtggcacgtcttggctcactgcaacttccgcctcctgggttcaagcgattctcccatctcagcttcctgagtagctgggattacagatgcgcggacgacgcctggctaatttttgtatttttagtagagacggggtttcaccatgttggccaggctggtctcgaactcctgacctcgtgatccacacgcctcggcctcccaaagtgctggtattacaggcgtgagccaccgcacccggtcagctttattattaaatgttaacttcatctgctttgtacacgaatgcatacccagtgcccagaacagtgcctggaacatactaggtgctaaataaatatttgtgacttaatgcatgaataagggtggacttcctttcttttgctctcactggagagttgaactctccttccaaaggcggtggggtggatattggcatattcagggcctttagggctgaagtcaagggcttagtggggcttaatttgtgggcgggcccagggcatggccctcattgtttctctagaaagacgtgtccaaccctcaaaggaccttctgaaatcccgctgaaaggttaagttgggaaggaaaacctgcatgcctatgtatcaggaattaacgtcttttgtcttgttttattcagtagtttcaaattgccttctccaggcaaggctgatgaaagtgcaagttgcaagttaatttgaatgtttctttttgcttttgctctcacaggaagtgaaaaggcgaccaaacactctagcattcatgccaccaaaaagaggagtgttttgcagttacaagacctggattcgaatcacgactcctcttagctgccctgtaatcaggcacaattacttgggtctctgagtctcactttccttatctagaaaacggaggtatctttacttccttcgtaagactgatgacaaggaaattatctgtgcattttgaaaccacttaagccttgtacacgttttatttctgggatcgccctggtagggcttcagaaaaataaaaaggaggtccctgagaaaaggctgggtaccgtacatctgaggtcaaccctctctggtcccaaggatggcctgggctgttccgccccgtggctccccaggggcaaagccatgaggatccgggtgagagcccagtgctggacgagcccggggcccaggggtcccggccgaaatccctgctgtctttcaggtcaaacgtcataatccccgaaccccagaaaggccgaaaggcaaggcaaccctgaaagacgacgaagtcaacctcagggcgcaggagagggagggccagtgtgctgccgacgagggaggctggagccgcggggacgaggcgccccatacagcggcaagagggtggagggcaggagctcgccatcctgggtgaaagcggggcccagcgaaggggcccggccacaggaatctcggttccaccccgctactcccggctgtgactccagtttcgtccccagccgccgggaccgccccctcgccccgcccccagcgggcactcaggccgtaccactgtgccttcatgggggtggagatagatcgtgggctagtcctgccgaggagagaggggttcttcctcaaaaaatatgattatgtatagtattcgcatgattctagttaacttgtttcccttctgcctgctcggaccctctacctgccctacgaagggggcggagtgcgttcctgcctccccctgctcttccgcgtttggtgcgcgcctgcgcggtgcgtaggcggcggagcgtacttaagcttcgacgcaggaggcggggctgctcagtcctccaggcgtcggtactcagcggtgttggaacttcgttgcttgcttgcctgtgcgcgcgtgcgcggacatggcctcaaacggtaggtaagggcgcgaggcgacggcggcggcgcacccggccgaggcctcccagctgggcttttcgttttcagtgggaccggggcggcgatcccgtgtgggattttttggcgcccctgtggcgggaagccgcggagaagagtaactggaggaggctggtgtcgccattttgtttcgctcctctggccctcgcgcgcggggcgggaagtcttttctttgcagtccgtttgcttggggtgggcgttgggagggacgcttcttaggggtttgaagcgtcaggtgagggtggaaaacgcccattctccgtggcctcgcctcccccaactcccggccccgcgctcgagcccgctttgtcgcagtgctgcatccgggcactcgcggcgcgcacgcgctctgcgggcccctcccccttcgcggcgcgggtaccccttccccgcctcgtgttggttcagctttctgtcgcgagacccttcgcggaagactcggcggcgcgcgtccggtgtgagccttgtccctcagtggtccttcgcgaatgggcgggatcgctccgttcccgcctgggttgccacgcggctgggggcggaggctcgggatcggggccgccctctagcttaacggtttggcggcggtggtcagggttcgaccaacggacttggggacggcccgagagtttttcccgcctaaatttctttctttttttttttggagacacggtcttcctctgtcgcccaggctggagtgcagtggtgcgatctcagatcactgcaacgtccacctcctgggttcaagtgattcttctgcctcagcctcctgagtagttgggattataggcgcccgccaccacagcccggctaatttttgtgtttcttagtaggggcggggtttcaccatgttggtcaggctggtctcgaactgctgacctcaggtgatccgcccgcctgggcctcccgaagtgtcgggattacagacgtaagccaaccacgcctggtctaaatttcttttttctgagatagggacggagaagaacggccgcccgaggccacaccctctcctggtcctctttcccttttcctgcgggggaagcgccgcgtttcctgtgctgggaggatgagttgatcttgttcgtgtatcttaagtggggcttttcaaaagcgcttttgttgctttttgttcgctgggggaaggcagggtaggtgagaaaacggaaccatctggagtcccagggctggggactcgagtacctgttgactttcgcctcctaaggcgagcagttgcatgatctctgtcatttggggtccaagggctcttttgattctctggctttgcactaaaaagcccacttcatctccgggattggtcaaagagtgaagaatggccttttttgagactttcttattctgtgggtctgggctgagagagcagaggccacaatctgaacactgttcgaattcaaacctgtgccactttggtagttctgcgacgttgggagagttagtctcttgactcctggcgataatggctttctcatagagtggatgaaacgaatgcgcgatgttttagagcaatcactgacatgaattgggcttgcagaaaattgtggatgtccaccaagaccttggtttttccaatggttaaggcttctgggactctgtagaaacttgcattttcttcactttttctttattgtaagaacacttggctgataacgccagtttgttcctcttctcaaccagtgtctcatggaggaattttatgccctttgttgcaacatggtcctatttttatttttttttttgagatggagtcttgctctgttgccaggctggagtgcaatggctcactgcaacctctgcctcccgggttcaagcgattctcctgcttcacctcccgagtagctgggattacaggcgtgcgccaccatgcccggctaattttttgtatttttattagagatggggcttcaccatgttggtcaggccagtctcgaattcctgacctcaagtgatccacccacctcggcctcccaaactgctgggattacaggcatgatccaccgtgcctggcctacgtggtcctttttattcatcagtgcttgagttaaggaatttagctttaattcaactctttcagagtggcagctgaagataatgtgattgtatttttcttttgcagattatacccaacaagcaacccaaaggtgagtgctatttttgggcttccagagtttgtagagggcaagggtggtcacgccatgttttctgatcacgctggttttccttttatttagctatggggcctaccccacccagcccgggcagggctattcccagcagagcagtcagccctacggacagcagagttacagtggttatagccagtccacggacacttcaggctatggccagagcagctattcttcttatggccagagccagaacagtgagtctttctcagcgggtcacctcttcctactctttctgaatattgcttttctttttcttgttttttggagacggagtctggtcctgttgcccaggctggagtgcagtggtgctgtctcagctcactgcaacatcagcctaccgggttcaaacgattctcctgcctcagcctcctgagtagctgggattacaggtacctgctaccacgcctggctaattttgtgtttttagtagagatggggtttcaccgtgttggacaggctggtctggaactcctgacctcctgcctgccttgacctgccaaagtgctgggattacaggcgtcagccacaatgccctgaatgttgcttttcttaaacctgagcagcactgagatgttgaaactgttccatatttcttttccgtgaaacagtgtataagtcttaaaactttttgggatctgagtcctttacagggcattgtggcacacctgtagtcccagctactgaggaggctgaggcgggaggatcccttgaattcaggagtttggggctgcagtgagctatgatggtgcctgtgaacagccactgcattccagcctgggcagtgtgttgaggccccatctcaaaaacataaaaaaaaaaacaaaaaacaaaaatgtttattggtttgtgattctgtttccatttattttctttggcttttaatttttttgactcttcttattttccatcagcatgaaagagagcatattttctaaaggaagaaccagttttaggccaattctgaaatggagaaaatggttttgtttgaaaatgtatgaaatcatgtgatacataaggaggtgggatttgccccaaggtcctgaagtgtaactaagaaaggtggttgtcctgtagatactgcacgcacagctgcatattacagtgctgttaacagggatccttgggcctgggtttagagggtggtgctggagatggtgttgggattggcggggtgaaattggaactgtactaaagagttggtagaagttgaagcattaaatttaggctttgaaaggagggtaactatctttgcctatgagttgcaacatcactaacagcttctgagaggctggctttatgagtataggtattatgttttctttaacccattccttacattttctctttcctggtggcttttgtgactccctttttcttatcctggtagcaggctatggaactcagtcaactccccagggatatggctcgactggcggctatggcagtagccagagctcccaatcgtcttacgggcagcagtcctcctaccctggctatggccagcagccagctcccagcagcacctcgggaaggtacggtggtgttgatgtcggggaaggcttgaaaagaggggtgaattgatgaggaatgataaagggaccagcagtaggagcagttcagaggtgtaattggggtaggggagcctgtgttgggtacagagaatggactccactaaaagtgaaaggaaattgggggctatgctgggattgtgattgtgttttttgtttgttttccctagttacggtagcagttctcagagcagcagctatgggcagccccagagtgggagctacagccagcagcctagctatggtggacagcagcaaagctatggacagcagcaaagctataatccccctcagggctatggacagcagaaccagtacaacagcagcagtggtggtggaggtggaggtggaggtggaggtgagatgtcttcagctttgtctgcagcccattttctttttctttttttttttttttttgagacggagtcttgctctgtctctgttgctgaggctggagtgcagtggcacaatctcggctcactgcaagctccgccttccgggttcgcgccagtctcctgcctcagcctcccgagtagctgggactacaggcatccgccaccacgcccggctaattttttgtatttttagtagagacggggtttcaccatgttagccaggatggtttcgatctcctgaccttgtgatccgcccgccttggcctcccaaagtgctgggattacaggcgtgagccactgtgcctggtgtctgcagcccattttctataaggatttgtattctcctgttttagcttaaaagagggttcctgtcttgtttcctagctgtctttttactttcttttgtccttcattgcctggcacttgtcaaaccttttcaaaccttttagtgctactttacaatctttttgttttttttttttaatcattctttcttttctcacaggtaactatggccaagatcaatcctccatgagtagtggtggtggcagtggtggcggttatggcaatcaagaccagagtggtggaggtggcagcggtggctatggacagcaggaccgtggaggccgcggcaggggtggcagtggtggcggcggcggcggcggcggtggtggttacaaccgcagcagtggtggctatgaacccagaggtcgtggaggtggccgtggaggcagaggtggcatggggtaggtgtctcatgagccagggagtatctttggtggggagtgtggaggattgcatgaatctccctgaagccagtccctagtgcatggtttagtattcttgttgtctagggatctgtgagggctttgatttgggggcagtgactttctttttacatccccattttatttttgtgagaacttgggagcctgaactcccatccataccactgaatagagattttgagtaatgatacttgtttccaaaaaaaaagaaaccatacatagatacgtatggattggagtcattaatatcctaggcaagaaacatggaagtgaagacttctttctctgcaagggaaaccgatgatcccactcctgggaaatagtagggaaacttggtatgtgtattcccatgtgtcctctagggagttggtaatggttaacctgacttcagcttccaggaattggctactcttcccgttttctatagtcatttgaatccacgagcttgatttgcactaatttgaccgacattgattttgtgtgtgacttggtttatggggccagctgactgaagtaagcagaccttttgggcaaaaatatgctttgacagtggtctcccacctatttgttccactgtctgccttcccctggttacttaaaattcatcagcttgtccaactggaccttctttccttcctgctgaagttgatttgaagtaaaaccttagatttgatgttaaaacagttgtcaaatctgttggtaaataagatttgaaggaccctactctgtctcccttgaaaaaggggaggaatgtcagtgttactgtttttggaaaaagtagatttttaaaccgagtttggaaatggtaagtatgcagaggtgggtgggggcaatctcaaaaacgtgcaaaaatgaggaaaacaaaaatgaggaaatgtgtgcgtgtgtttaatgcaaaactttaaaaagaaaaacaactgttatgtgactgttaacttgctctgcattttatgtgccacaggtatgaaaggtgacattgcaaaatactccgctcttctcgcagtgtagaaggggtgaccccgggggttgggggagatcaaaaacagctcagtagttaggacagagcttagctaagtttgtcttgctttaaggggaagttgcctttggttttgactttttatggaatggggttgggtctgcttgctgctttcaaagcaaaaaccacaaaaatgtgttcaaggctaccccagcctggtgtgaaatgtcttctgggtaaattggggtagggtttttaaaccaactacttggttgtcaaccacttgcgacaagaggaaaaaaaaacatctgctccatcggaagaacgaccaaggaaaatgggttattttttttccagaggaaatagataacgtaaccttttaaagcaaaatctttataaactgtgtctgagaaattgcacacgtgtgtgtgacatgctcaaaggtcagacaaggggtggtcaggaagggatgtattttagtagccacttgtatctttttccaaaaacacctacccatgtttggggaatgttaaacaaaatcaaaaaacaaccttttgtagccgttggaagcttcatgtcctttcttctaacttgtcttctccagcggaagtgaccgtggtggcttcaataaatttggtggtaagtgaacagagtttccaaaattcccaactcccagcaatgctttgtctgattgttcatttgcagatgtcttagcgtgttaatttaaatgtcaaaggttttgaggtgtccagaaccacctccagaaaggggtagggtagaatgccacctgttgcctggtgtgtgctaacctggagcaggtaggggtaagactcaatagtcatcttttaccaaatgggtttgccccaggttaataagaggggtctagtaggccttggactgggccgttgccacacctggcacttagtgaccatcatcatgagaaactggagagtgcgtgctggaacacgtggtgccatcttggctttaggatccttttgatcgttgtgtccaaggcttgtgtgtgtgtgagtgtgtgggagacaactccgaatgtttaattctggaagagggatgtaacattgccctgaggatggtgaagttggtatacatttataaagtacggaatggtgtcaatgaatgcaattctatgtatatggacttaactgagatgggcaaatagaaactagctctgggaaggaacatgtgcactacttcaagaaagattggaagcatgtgtggctcatgggaaataaccaggtcttaaacagcacaaactgaattcgtggaccaggaaggtcttaaacagcacaaactgaattcatggaaaaatgacaaatttgagaagtctcccagtaagctggaacttttctggtttggttaacaaaaggtttcttgatttgtttcaagatttaaagccaaaggtgtgggttcatgacttaggtgtcattgcgtgtgggtacaatatttatatatggcgaattcagataaacattggtcaaagatggtctctggaaaaacaaaatagaggctgcattacggaaataagatttctggtctgttccctgggacatgcttaaaaaatacaatagctattatgtatggtttttattttcatgtggtttcggggaaacaacacggttttaaggatggtttctaaagatgaaattaaaaattgttccacaagggttaagtgtctggtggtaaagttgggagaaactggatggatgcacatcgcatggctggtggcgagcccatctctcttctctcgggtgagagaaccgggccaagctgagttggtttgttcactttaatgggtctccgtttcccctgccacctgtgctgaggacatttcccagcctgagctgggggaggcagcatttgctgaagtgtggagttgtctctgtggagactcaagttacagatcttaaggggcctgcctagaattttctcctctgggcaggcgacccaggaaagggtttggagtgaggctgtgagcacttacttgatattttacaagtttggatttggtgttaatttttttccttgtccgttttttcctgttgactaacggctcatcttttccttgtttttgttttttttttgttctttttttccatgtcactaaaggccctcgggaccaaggatcacgtcatgactccggtgagttcacacgtggtggcatgaaaagagtggctaaagtggtatcaagactgcctggatgttctttgaaactattataaaaaggaaactgaaaaaaatggggatagagaaggaagggagttaggtgtgtccttagttagcagtgagaagtatttgttacgaagtatttctcagaaatacctggcttgtgggttccacccccagtgatttaggtctgagaggaccctgaaaatctacctttctaacaagtccccagtgatgctgatgcgtctggaccacactcagatggtttacagcagtggttctttcaaaatgtggatcatgtccaagttggtgaacaaaactagtgaaagacctgaccacatgaagtaaagcattgaactcctgtttaggttgtattgatgtttgtgtactagatttgaatgtaaaatgggtttcttatttaattcggggaccttcaactgaaagttgataaatactgatggacttttctgtgtggtcttgttgggcatttcactcctgagccctggtttccatactgtatactgggtgttaacatgtttcaaaggataattgtcaaactgaatctgaaatttatcagcatggctggcatatagggactcaaaagggatgtggatttctttttagttgtcttccataaaccaaatgataccagttgcttgatggatactaggtgctttaggttttttcctgtgttttttattttaccttttcacatttgcattttctctgttcaacaagcagaacaggataattcagacaacaacaccatctttgtgcaaggcctgggtgagaatgttacaattgagtctgtggctgattacttcaagcagattggtattattaaggtacttgtggagaggagtgggagctttctgtcagtgttgtaggcttgtggatttcacacattagtaaaagcaagtctttaatggttgccagcagtaaaaacaagtcttagtggttgttgccagcttaatttgttgaggaaagagccttagttactgttttctaaaagagaagttctatcttaacacaaaaagtataacttatcagagtaccctaaactcttgagatttgtactctatagtaacttttagttttatctttcaatattggagtgagagacagttttctttaatggaggtttacatgtgaggtaggaagaagtaactgggaagaggggagctgaagtttgggaattataaacctcatgttctagaggaagaagatggaaagggagtactgtagcctttaaaattgatgttacctcattttgctttcttcagacaaacaagaaaacgggacagcccatgattaatttgtacacagacagggaaactggcaagctgaagggagaggcaacggtctcttttgatgacccaccttcagctaaagcagctattgactggtttgatggtatgtatgagaaggctggcagaggtggggctggggatatagggcagcaagccttaggaaacaagccatagtttgagggttcttttgagtcttccaacacttactttagctgcggtttcaggtagtctcatttttgcttatgtgtcagcagattataaaccatttgagaaaggcacgcttctcttgtattttcggattaatgtgtcttgcatttaaagtctgttgatgattttttgtttctctaggtaaagaattctccggaaatcctatcaaggtctcatttgctactcgccgggcagactttaatcggggtggtggcaatggtcgtggaggccgagggcgaggaggtgaggagctacctgctagtggtgcagaggggtaatggggagagtgcagaagatggtaaaggcttgcatggaatgggttagatttaccaaacttggagagggagcagacccatacttggtctatctgcattaggacccatgggccgtggaggctatggaggtggtggcagtggtggtggtggccgaggaggatttcccagtggaggtggtggcggtggaggacagcagcgagctggtgactggaagtgtcctaatccgtgagtgaaacttaatttttttcttagttctcttgcatgcgtgctctttgatatattggtactgaggtatgtgcgtgttttccaaagaagtaaatgtcaaggccacactgttggggtcagatttagccaaaagcttacctaggtaaggttgatgtaatgggaaaggtaatggattgggttcagtaatactgatttttgttcctgactctgagaagcaagccgttttgtctttctgaagcttcagtttcctcactgtatctctaaagtcaccgtagtttcttcctagttctaggtcttgcctattccccatcgctccagactgattgtcttcctttctccttagcacctgtgagaatatgaacttctcttggaggaatgaatgcaaccagtgtaaggcccctaaaccagatggcccaggagggggaccaggtggctctcacatgggtaagaaaggcagacctggtgctagggagctgggaccaaagaatccttaatttttcagcggggaggctcggggaacataggggaatgggaatatgatagatcttgtttcttttgtcctagggggtaactacggggatgatcgtcgtggtggcagaggaggctatgatcgaggcggctaccggggccgcggcggggaccgtggaggcttccgagggggccggggtggtggggacagaggtggctttggccctggcaagatggattccaggtaagactttaaatcagaataaaaaagtagagcagttgaacagaggccataggataacagggttttgttgagaaagtggtttcattttgagggctaggtggaaagacctgaggttgtaaccagtagtggagagggaaggaaaattaactcagggggagtgaatctgtagacccacttgagataagatactcgctgggttaggtaggaggggcagataggatatctaggcttggagaggctggtaactcaaatataatggatacttaatttttttttttttttttgcaggggtgagcacagacaggatcgcagggagaggccgtattaattagcctggctccccaggttctggaacagctttttgtcctgtacccagtgttaccctcgttattttgtaaccttccaattcctgatcacccaagggtttttttgtgtcggactatgtaattgtaactatacctctggttcccattaaaagtgaccattttagttaaattttgttcctcttcccccttttcactttcctggaagatcgatgtcccgatcaggaaggtagagagttttcctgttcagattaccctgcccagcaggaactggaatacagtgttcggggagaaggccaaatgatatccttgagagcagagattaaacttttctgtcatggggaaagttggtgtataaatgagaaatgaagaacatgggatgtcatgagtgttggcctaaatttgcccagctatggggaatttttcctttaccacatttatttgcatactggtcttagtttatttgcagcagtttatccctttttaagaactctttgatcttttggcccttttaatggtgaggctcaaacaaactacatttaaatggggcagtattcagatttgaccatggtggagagcgcttagccactctgggtctttcacaggaaggagagtaactgagtgctgcaggagtttgtggagtggagtcaggatctaggaggtgagtgactcccttcctagctgccctggtgaacagcgcttgggtagatacctgctataaggagactggtctggctgggttactttcacatcctgcctgtactcagagggcttgaggtcattgacattatgagattttaggcttgatccctttttgattggagggtggaaggccctcctaagggaatgataagtgataagagggggaaggggttgcagccaatgagttaaaaccttagagcagtgctcctcagcctcttaccatgtggttgtaaacttgcacgtacctgccaaccagttatttagcatgctttttattttagttacacagagcgtaacattaacccaagagcagaaaggttttatttacagggttttcgaacttggtttgtaagacagctgccatcacaagcatagcttacaaatgtgctggggacccctaattgggaagtgctttcctctcaaatttttattttttatttttagagacagagtcttgctctgtcatccaggctggagtgcagtggcgtgatctcggctcactgtagcctctgcctcctgagtttaagcgattctcctgcctcaggagaatcccagcttctgagtagctgagactacaggcgtgggccaccatgcccacctagtttttgcatttttagtggaggtgtggtttcactgtgttggccaggctggtctcttaactcctgacctcaggtgatccacctgccttggcctcccaaagtgctggaattacaggcatgagccgctgcatctggccatcctctcaaattttcaagtgttccacaagtatgttctctactgaagagttgctgcatccttgaatcttgggtgatttgaggcacagaaactatgactttattttttgagatggagttttgctcttgttgcccaggctggagtgcaatggcacgtttttcggcttaccgcaactgccgcctcctgggttcaagcgatagctgggattacaggcatgcgccaccatgcccagctaatttatttgtatttttagtagagacggggtttctccatgttggtcaggctggtctcgaactcccgacctcaggtgatgtgcacacctcagcctcccaataaaccatgacttttaagaggaatagcaggtttacttcccctgccagcattggggtgctctctaagcaacagtaggcggagagtggtctggcgtattaaaaacaaaggatcgtcaagtgggccttcccaggcattgctttgacttagtacatgtagaggatgtggcagttctctccgtccctgccactgctggtttctttgttaaatgtttagttgaaatggcctgatacgatatttgagtagttcactgttggtgctttgcctagcaggattctaatcttgctttggttgtggtcccctgatgccctcctgttaggagtggaggaggtcgaagctccttgtaagatatgattactgggaccattagtgtcaagttcctgtgtccttcaaatggcatatgtgattggccttgaccttaaaaggaaatagggtcccaggtgactgtttagtgggtaggtccagtttggggggatcttccaggagaatggatagagacacctagcagcagagagaacattggtgcctctcaagccaacctcccacctcagcctcccaagtagctgggactacaggtgcttcctcgctaccacacctgggtaattttttttttaattacttttttttttttaagaaacagggtttcactgggttgcccaggctggtcttgaactggcctcaagtgacctgcctgcctcagcctcccaaagtgctgggatcacaggtgtgacccactgcgtttggccagaatactctattcttactgaatgattgaaatctgtcttgaagcattaggtgtcccatttttgtgagttggaattgggacaggctaagtaggaagtgaggagggtggggagagctgtgctgtaggtctgtttgtcccttccttgatgtagccttcagttagccctttcagcttttttccccatcttgtgccgggccttcctgggtttcagtacttggatgtagggctgcagttatgtcagtggtgggtagattgaccaggaattaaggtctagggtccagcccatgtgagacttgactcactgatctacctttaggcatgtcttccttccagtctcatcctttttaaattttttttttttttttgagacggtctcactctcacccaggctggattgcagtggtgtgatctcgaccaactgcaacctctgcctcccacccgcaagctatctgcccacctcagcctctggagtagctgggacgggactacaggcacctgccaccatgactggctaatttttttttgtattttttgtggagatggggtcttgccatgttgctcaggctggtctggtctcaaaactgctctgggctcaagtgattgtcccactttggcctcccagagtgctgggattaaggtgtgagatactgtgtccggctatgaaaattttatttttaattaacttgtatatatttatggggtacaatgtcctatttctgtacatgtacacattgtggaatcaaatcaggctaatatatccatcacttcatatcattagcatgaatgagaacatacaaagccactcttagaaaattttgaaatttatgttatttcagcccttttatgctggaggttgcaaatgttttgtgaataatcagaccaaaaataaaaacaaaaaatgattgacttcagtcattcagtaagaatagtgtgttctggccgagtgtggtgggtcacacctgtaatggagcactaggcgtaaatgggttgaaacgggtctccctatgttgctcaggctggacttgaactcctgggcttaagtgatcttcttgcccttagcctctcagctgggactatggatgcatgccactgtgtctcacgtttttatgaactgtagtcaccatgctgtgcagtggcttaccagaactcatttcttgcatctgaagtgttgtaccctttgtctccctgcttacccatacctccaagcctctggtaacccccattctactttcagtttccgagtttgactttctagattccgtgtataagttcatgcagtctttctgtggcttattttagcataatgtcttctagatttatcgattcacccatgttacaaataacggtttccttttaaaaagctgaatagcattctgttgtgtctacataccacatttaaaaatccatccgttaattgggcacttgggttgcttgcatatcttggctagtgtgaataacgctgcattgggtgggagtgcagacatctctgacgtacagatttcttttttcttttttggagacagagtcttgccctgccacccaggctggagtgcagtggtaggatcttggctcactgcaacctctgccttccagattcaagtgattctcctgccttagcctcccaggtagctgggattacaggtgtgcaccaccatgcccagctaactcttgtatttttagtagagatggggtttctccatgttggccaggctggtctcagtgggccccagcgatccttccgcctcgggctcctgaatgactgggactacaggtgtgctactgcacctggctattttgaaataatttgacttagaagaatatttctacaattgtgttcaccttcttatgcaaatacaatcttcagtggcgctggcatatacaagctgagaaagtattgtcaagtgggttgtgccagcacatctgaccaggattttttgttgtagaaatattggatcctcacctgaggccaggagtttgagaccagcctggctaacatggtgaaactccgactctactaaaaatacaaaaattagctgggcgtggtggcaggtgcctgcagtcccagctgctcgggaggttgaggcaggagaatcgcttgaacccaggaggcggaggttgcggtgagccgagatcgcgccgctgcactctagcctgggcaatgaagtgagactctgtctcaaaaaacgaagtattagatcctcaatctcaaggtattctaagaaattttggagaccattgagtctaaaattcccagtatctttgaggcaggaacagacttggagaatgtagtttatgagcaggagtttggagctggaagaaatactgctttctgttggtggttaatgctgtcagctccttggattgtggctttagccctaaatattggggcagtagagactcttacctggaaaacaattgagggccacccatgttagcggcaagaggcagaggaaagcttggatggttgggctgaagatggtggatgtgctgtccctgtgagagtgctgatgctggactctggagccaacgacaaagtgtttgagcaagcagggtccaagcaagggcagtcgagggccggatgaagtgggcaggaaccgagtttcccaggtgacatcctgcctgtgctcatcacgccgaggggtgttgcacaatcacaccgattctttgtcactactgagtgcagtgttcttaagaatggggacctggcagctgggtgcgatggcttgtgcctgtaatcccaacactttgggaggctgaagtaggcagatcacgaggtcaggagtttgagaccagcctggccaacatagtgaaccctgtctctactaaaaatacaaaaaattagccaggcctggtggcaggcacctgtaattccagctactcgagaggctgaggcaggagaatcgcttgaaaccgggaggtggaggtt

SEQ ID NO: 756 - DNA, 71616 bp, Homo sapiens
gagaggcctctgcctgaagctcccttaatctgtcagatcacagatcaaaagctatcacacactgcccaagggaccctaaagggagccactctcagaaaataaatccaaacctccttttttctggccactgaaacgttcaataattagttcattatctacatcattcacatgtttaatatttattgactttggaattattgattactttgctgagtatcttatgaatttaatctatattaatattaaggtgatgtatcaaattgcattccagagtgtggatttgactctagtgccataatcagtctcctgggacaaacagctgtttctcttccctcattatagaaaaaaattgcccttggcaaatgtcaaagaacatccttttatcaatctctcttaccaatcaatccaagcaaatgcagtgggatttcttttccccagagttgaagtcacctcctgacaggaagttaagtctttaggcactgaatcatagcactgagctgaagcccaggactaagcaagaatgagtgagaatttggagacttaaggtttggtcatctgtagaggattgggttttgtcttgttttgtttttgttttggtgtcctgcaaggtttctcactgcccttcatcaggtaatatgccctgtccctgaactggccaattgtgttaccccattcccttagcaacagtgattgctactgaagaaacaggaggccaacaaagaatatcactcattcaccagtagagtgtctatgtcagagatattagataaacaggaaaactaacaattacattgcaggctgtggaaacagagagaggtacctaaggcacacctgtgggaatatgaaagtttggtttcataaaaggattctggaggaagtcacctctgacatttgagttgagtcctacaggatatgaagaaagtagccccatgttccggttactatggctgtgtaataaattacctaaaacatactggattaaagctatgaaaacatcttttctgcccagagattctgtgggcctgaaattcacatggaacacataaggcataccttgtttctgctccatgatgtctaaggattcagctggaagactgggaggctgggggctggaatttatctgaagaatgactcatttacatgtctactggttgaccctggctgttggctgagggggcctcagctctctctacattgtttctctactttggctagtttggatttcctcaaaacatgatggctggtcctcagtgtcagcatcccaaaaagagaatgccggacacagtggctcacacctgtaacctcagcaatttgggaggctgaggtgggaggttgcttgagttcaggagttcaagaccagcctgggcaacatagtgagactctgtctctaccaaaaatttttaaaattttaaaaatcagccaggtgtggttatgcacacctatagtcccagttacttaggaggctgaggcaggaggatcacttgattccaggaggtcaaggctgctgtgagctatgaccacaccactgcatttcagcctgggtaacagaatgagactctgtttcaaacaaacaaaaacccaaaaaaaaaaaaaagagagagagagggagttagaaggaagatgcatcatttttatgacctggacttggaagtcaccaagcagcacttctgcagtaccctgttggttggaatagttgtagcccaaacccgaattcgaagggaggagaatagataacatccctgggtgacaggaatgtcaaagtcccaaacagcatatgacatgtgacaaatattggtgtggccttctttggaagatccaatcttccataccaggcaaagggatggaagactaaggaacaacatgagggatagccagagagggaaaaagcatcacttgttctaggaactacaaatagcttgaagaagcaaagatgtctagatgcctcccaatatgcagagtggggtgtacagaagagagtggtaagggcgctgggagagctaaggtgggcaagagagcttcctctgtcatgctaagaaagttggaatttatcttgatggtggtgaaagcagagggctatggttagattcacatttgagatttagatttttagatttaaaatgatcaccctggtgacactggcttaactcacaattttgcccaaggcctatgctaccacagtgcttctgaaactttaaagcacattagaatcacctggaggtcttgttaaaccatggattgctgggccttgaaaccccagagattctgattcagtagatcgagaatagggcctgagaatttgtatttctaacaagtttccaggtgatgctgaggctgctggcccagcgaccacatttgataatcatagccctctgataaatcctatcaaaatatcctaatggcagagcaagggaattctggtgatatcctcccctacccataacctgacagctattaggatctgcctacttgaggctaaaagcaaccaagagaggaacagctacagtgtaccacagagtccctcaacatctttgcccacgccacggtgccccagcttcttaccaagtgtgcctgattcctcttgactacctccaaggaagtggagaaagacaagttcttgcgaagccttcgtcttctctgatatgctattctatgtctatttctttggccaaaaagatggggcaatgatatcaactttgcagggagctggagcatttgctagtgacctttctatgccagaacttgctaagcatgctagctaataatgatgtagcacagggtgcggtggctcacgcctgtaatctcagcactttgggcggccgaggcgggcggatcacctgaggtcaggagttcgagaccagcctggccaacatgatgaaaccccatctctactaaaaatacaaaaattagccaggcgtggtggtgggcacctgcaatcccagctactctggaggctgagacagaatctcttgaacccaggaggtggagattgcagtgagcagagatggcaccactgcattccagcctgggcaacaaagcaagactctgtctcaaataataataataataataactaatgatgcagctttctctctctgagtatataatgcagttctgatgatgtgaggaagggcctcactgttggtgtggcagagtctgagaccatggctggcaatgaaaacactaccctttgatgcctatgggctctccctttatggtttcaaggagggcttctcaatcttggcagaattttggactggatagttctttgttgcacaggtggggggctgtcctgcacatcacaggatgtttcatccctggcctctacctactagatgccagtagaacatacccaccccacagctgcctgttgtgacaatcaaaagcatctccagatactttgcagggggaaaatgatttctccaggcctggcatatacataacagtatttaagcagctgcctagaattaattaaacacagaaggatgtctctcatccagaatgccctggaccacctctttgataggcaatcagatcccacctcctccaccctatttttgaaggccctgtgccaacaccacttcttccatgaatacttccttgattcccccatccctagctctatataaatctcccactcaacactcacacctgttagtttacattcctcttgacacttgtcatttagcatcctaagtatgtaaacatgtctctcttcacgattcacaaagtggctttggaagaactttagtaccttcccatcttctctgccatggaaagtgtacacaactgacattttctttttttttaagacagtatcttgctatgatggccgggctggaatgctgtggctattcacaggcacaatcatagctcactgcagccttgagctcccaggctcaagtgatcctcccgcctcagcctcctgagtagctgagatcacaggcatgcactaccacactcggctcacatttgacatcctctaaagcatatataaaatgtgaagaaaactttcacaatttgcatccctttgtaatatgtaacagaaataaaattctcttttaaaatctatcaacaataggcaaggcacggtggctcacgcctgtcgtctcagcactttgtgaggcccaggcgggcagatcgtttgagcctagaagttcaagaccaccctgggcaacatagcgaaaccccctttctacaaaaaatacaaaaactagctgggtgtggtggtgcacacctgtagtcccagctacttggaaggctgaaatgggaagactgcttgagcccgggagggagaagttgcagtaagccaggaccacaccactgcactccagcctgggcaacagagtgagactctgtctcaaacaaacaaataaatgaggcgggtggatcacgaggtcagtagatcgagaccatcctggctaacacggtgaaacccgtctctactaaaaaaaaaaaaaaatacaaaaaattagccaggcatggtggcgggcgcctgtagtcccagttactcgggaggctgaggcaggagaatggcgtgaaaccgggaggcagagcttgcagtgagccgagatcgcaccactgccctccagcctgggcgacagagcgagactccgtctcaatcaatcaatcaatcaataaaatctattaacaatatttattgtgcacttaacaggaacatgccctgtccaaaaaaaactttacagggcttaactcattttatccttaccacaatcctatgaagtaggaacttttataaaacgcattttataaacaaggcacagagaggttaattaacttgccctctggtcacacagctaggaagtgggcagagtacagatttacacaaggcatccgtctcctggccccacatacccaactgctgtaaacccataccggcggccaagcagcctcaatttgtgcatgcacccacttcccagcaagacagcagctcccaagttcctcctgtttagaattttagaagcggcgggccaccaggctgcagtctcccttgggtcaggggtcctggttgcactccgtgctttgcacaaagcaggctctccatttttgttaaatgcacgaatagtgctaagctgggaagttcttcctgaggtctaacctctagctgctcccccacagaagagtgcctgcggccagtggccaccaggggtcgccgcagcacccagcgctggagggcggagcgggcggcagacccggagcagcatgtggactctcgggcgccgcgcagtagccggcctcctggcgtcacccagcccagcccaggcccagaccctcacccgggtcccgcggccggcagagttggccccactctgcggccgccgtggcctgcgcaccgacatcgatgcgacctgcacgccccgccgcgcagtaagtatccgcgccgggaacagccgcgggccgcacgccgcgggccgcacgccgcacgcctgcgcagggaggcgccgcgcacgccggggtcgctccgggtacgcgcgctggactagctcaccccgctccttctcagggcggcccggcggaagcggccttgcaactcccttctctggttctcccggttgcatttacactggcttctgctttccgaaggaaaaggggacattttgtcctgcggtgcgactgcgggtcaaggcacgggcgaaggcagggcaggctggtggaggggaccggttccgaggggtgtgcggctgtctccatgcttgtcacttctctgcgataacttgtttcagtaatattaatagatggtatctgctagtatatacatacacataatgtgtgtgtctgtgtgtatctgtatatagcgtgtgtgttgtgtgtgtgtgtttgcgcgcacgggcgcgcgcacacctaatattttcaaggctggatttttttgaacgaaatgctttcctggaacgaggtgaaactttcagagctgcagaatagctagagcagcaggggccctggcttttggaaactgacccgacctttattccagattctgccccactccgcagagctgtgtgaccttgggggattcccctaacctctctgagacgtggctttgttttctgtagggagaagataaaggtgacgcccattttgcggacctggtgtgaggattaaatgggaataacatagataaagtcttcagaacttcaaattagttcccctttcttcctttggggggtacaaagaaatatctgacccagttacgccacggcttgaaaggaggaaacccaaagaatggctgtggggatgaggaagattcctcaaggggaggacatggtatttaatgagggtcttgaagatgccaaggaagtggtagagggtgtttcacgaggagggaaccgtctgggcaaaggccaggaaggcggaaggggatcccttcagagtggctggtacgccgcatgtattaggggagatgaaagaggcaggccacgtccaagccatatttgtgttgctctccggagtttgtactttaggcttgaacttcccacacgtgttatttggcccacattgtgtttgaagaaactttgggattggttgccagtgcttaaaagttaggacttagaaaatggatttcctggcaggacgcggtggctcatgcccataatctcagcactttgggaggcctaggaaggtggatcacctgaggtccggagttcaagactaacctggccaacatggtgaaacccagtatctactaaaaaatacaaaaaaaaaaaaaaaagaagaagaagaagaagaaaataaagaaaagttagccgggcgtggtgtcgcgcgcctgtaatcccagctactccagaggctgcggcaggagaatcgcttgagcccgggaggcagaggttgcattaagccaagatcgcccaatgcactccggcctgggcgacagagcaagactccgtctcaaaaaataataataataaataaaaataaaaaataaaatggatttcccagcatctctggaaaaataggcaagtgtggccatgatggtccttagatctcctctaggaaagcagacatttattacttggcttctgtgcactatctgagctgccacgtattgggcttccacccctgcctgtgtggacagcatgggttgtcagcagagttgtgttttgttttgtttttttgagacagagtttccctcttgttgcccaggctggagtgcagtggctcagtctcagctcactgcaacctctgcctcctgggttcaagtgattctcctgcctcagcctcccgagtagctgggattatcggctaattttgtatttttagtagagacagatttctccatgttggtcaggctggtctcgaactcccaacctcaggtgatccgcccacctcgccctcccaaagtgctggaattacaggcgtgagccaccgcgtctggccatcagcagagtttttaatttaggagaatgacaagaggtggtacagttttttagatggtacctggtggctgttaagggctattgactgacaaacacacccaacttggcgctgccgcccaggaggtggacactgggtttctggatagatggttagcaacctctgtcaccagctgggcctctttttttctatactgaattaatcacatttgtttaacctgtctgttccatagttcccttgcacatcttgggtatttgaggagttgggtgggtggcagtggcaactggggccaccatcctgtttaattattttaaagccctgactgtcctggattgaccctaagctccccctggtctccaaaattcatcagaaactgagttcacttgaaggcctcttccccacccttttctccaccccttgcatctacttctaaagcagctgttcaacagaaacagaatgggagccacacacataattctacattttctagttaaaaagaaaaaaaaatcattttcaacaatatatttattcaacctagtacatacaaaatattatcattccaacatgtaatcagtattttaaaaatcagtaatgagaccaggcacggtggctcacgactgtaatcccaggactttgggaggccgaggcgagtggatcatctgagatcaggagttcaagaccagcctggccaacatggtgaaaccccatctctactaaaaactagctcagcatggtggtgggtgcctgtagtcccagctactcgggaggctgaggcatgagaatcacttgagcccaggaggcagaggttgcagtgagccaagattttgggggattctgtgacatacaaaaaaaatcagtaataagatatcttgcatactcttttcgtactcatatacttccagcatatctcaattcacaatttctaagtaaatgctctatctgtatttacttttataaaattcacaattaaaaatgaaggttcacatagtcaagttgttccaaacacacttaaatgtctcctaggctgggtgtggttgctcacacctgtaatcccagcactttgggaggctgagatgggcggatcacctgaggtcaggagtttgagaccagcctggccaacatggtgaaaccccgtctctactaaaaatacaaaaattagctggatgtggtggcactcacctgtaatcccagctactcaggaggctgaggcaggataattgcttgaacccgggaggtggtggaggttgcagtgagccgagatcgcaccactgccttccaacctgggcgacagagcgagactccgtctcaaaaaaaaaaaaaaggctcctaataactttattactttattatcacctcaaataattaaaattaaatgaagttgaaaatccaggtcctcagtcccattagccacatttctagtgctcagtagccacgggggctggtgaccaccacatgggacagcatatttagtacctgatcattggttctcagatctggctactcagcagaaccaagaatccacagaaacggcttttaaaagcacagccccacagcccccagccccagccttacctacctggaggctgggaaggactctgattccacgaggcagcctatgttttttgatggagggatgtgacaggggctgcatctttaacgtttcctcttaaatactggagacagcttcgaggaggagataactggatgtgtcttagtccatttgatggagggatgtgacggggctgcgtctttaacgtttcctcttaaataccggagacagcttcgagaaggagataactggatgtttcttagtccattttctgttgcttgtgacagaatacctgaaactgggcaatttatatggtaaaaaattttcttcttactgctctggaggctgagaagtccaaagtcaagtcccttcttgctggtggggactttgcagagtattgaggcggcaccgggcgtcatatggtaaggggctgagtgtgctacctcaggtgtctttttcttttcttataaagcctaactagtttcactcccatgataacccattaatctatgaatggattaatccattattgagggaagaaccttcatgacccagtcaccgcttaaaggccccacctctcaatactgccacatcgggaattaagtttcaacatgagtttcggaggtgacaaacattcaaaccatagcatgctgtctcttaaatgactcaataagctcctgtggcatccacttctgcatgccttgggcagcttttagacatctgtccattttcctagagggacaagaccaccacctgtgatcctatgaccttttggctttaggcctaacaagcaggttataccctcactcactttcaaatcatttttattgtcttgcagacaatttacacaagtttacacatagaaaaggatatgtaaatatttatacgctgccgggcgcggtggctcacgcctgtaatcccagcactttgggaggccgaggcaggtggatcacgagttcaggagatggagaccatcctggctaatacgatgaaaccccatctctactaaaaatacaaaaaattagccgggcgtggtgacgggtgcctgtagtccccactactcgggacgctgaggcaggagaatggcgtgaacccgggaggcagagcttgcagtgatccgagatcgtgccactgcactccagcctgggtgacagagcgagactgcatctcaaagaaaaaaataaataaataaataaatatttatactgcttataaactaataataaatgctatggtctgcatgtttgtgtcaccccaccattcatatgttaaaacctaatcaccaaagtgatattaggaggtggggcccttgggaggtgatgaggtatgagggtggagcccatatgattgggattagtgcccttctaaaatagcccaacggagcccagtgacaaggcatcatctatgaaccaggaaactggccctcaccagacaccaaagctgttggtgcattgatcttggatttcccaccctccaggactctaagaaacacatttctattgtttataagccacccagtggctggtattttgttataacatcccagactaagacaaataacaaatacttgtatccctgacaccaggttaagagatagaatttgtttgttcctctggaggcccttgtcttcaccccatcactgccctgtcctccctggaggaatctgccagcccgaattctgttcatcgtaccctccttttcttagagtttgacctcctctgtatctcccccaatccatgtattgcttatatacaaggtattctgctgtatctgttctgctatggcttgccccttttgttcaacactgtttttgtgcgtcatctgcattgatgcatgcagttgtcctttatttgttctcactgctggatagtatctggttgggtaaatatatcacactgtaaatcacactatccaggttcctttaggtgacatttggttgattgcagtgttctgttgttacgatggtgctgctgtgactgttcttgtgcatggacagaagttcctttcaggtgaatttctcagaatggaattgctgggcaaaggggcagccaataatcaactcatttgatgccaaaagtggtggtgccagttcatcctcccctgcgaggtatgggtcctgattcactcttcaagtgctgtggtttgacagggccgggggtgacaaggggacacctgggaaggaaagctgggctccctgctggccatccaggccagtccttaccagggggtaggcaatgattgggtcaagtggttcctgaccactgggcctgagacttcaggcccagaaactatctaatatttcctcaaatgcatcccatgagcaggcactgtgtgagtgagcacacacatctgaagcctcaagctaggcaagcctaccatgacttgtggtccaagggctcacgggtgacctggagttagagggagacatggctgccaggtggctttagaaagaacactcatcatggccaggtgcggtggcttacgcctgtaatcccagcactttgggaggccaaggtgggtggatcatgaggtcaggagtgagaccagcctgaccaacatgctgaaacctgtctctcctaaaaacacaaaaattagctgggcatggaggtgcacgcctgtaatcccagctactcaggaggctgaggcaggagaatcacttgaacccgggaggcggaggttgcaataagcctagattgtgccactgcattccagcctgggcaacagagcaagactccgtctcagaaaaaaaaaaaaaaaggaagaacactcatcctatgaccttgacctccaagctttgcctccctcaagcagaacagaatggagcctcccttaggcagaggcggaagtttgcctctcacctagttctccattcttttgttcagagcctgaataccctcaggctctgtacttggggtatttctgttctcttgttttatgctcacggttgtgaggtttgttgtgagtaccacgatcccttccttcagaggagtaaactgaggttccaaaaggtttagcagttgcccgaggaatattaaattggcaaaagcaggtagaatataaagcaaggagtatttggcaacggttcttttttatgattaaaaacagccgaagaaagacttctacttgtgcctttgaaggagtaactgcatttgaccttcccaccagtaacaaccatcaaatctctattaaattaaacacacacacacacaaacaaaaacagctattgtgaaggtatcagcgactaagacaactaaggtttgaggggccaggatcctggagagatggaaacttccctgaggtgagccccacattctcagacacttttccttggatgttttgagcactgctttaattcctgggaaaacaattccttccactgtgcacagactctggggccagacagcttgggttcaatcccagctctgccacttaatgtctgtgtatctgtgtaggcaagttaccctttggtgcgtcagtttcctcatctgtaaaacacaactatagttgatcctcattcgttaagagtctgtacttgttaatttgctcacttgctaaaatttgttaccccaaaatcagtacccctagccttttggggtcgtttcaaagatgtgtgcagagcggcaaaaaaatgtgagctcctccaggctcatgttcccagccaaggtccaacaaagtgctgccctgccttcttatttcagctgtcatagtgtaaactgtgtccttttcacagtctgattagtgccatgtttttcagatttttatgcttttttcttggttatttctctgttaaaattgtctccaagtgtagtgcaaagtttagcacgaggaggctgtgatgttccttacagagaaaatgcatgtgttagagaagctttgtcaggcatgagttaaggtgctgttgtcctgagatcaattaatttgttgttgttgttgtttgagacagggtctccctctgttgcccaggctgctggagtgcaatggtgtaatcatagctcactgcagcctctacctctctggctcaagcaatcctcccacctcggcctcctgagtagctgggactacaggtacaccccaccacacccagataatgtttttgatatttttttaggtggaattttgctcatcacccaggctggagtgcaatggtgcgatcctggctcactgcaacctccacctcccggattcaagcaattcttctgcctcagcctcctgagtagcacagattacaggcacatgtcatcacgccttgctaatttttgtgtttttagtagaggcggggtttcaccatgttggccaggctagtcttgaactcctgacctcaggtgatccacccgcctccgcctcccaaactgcagagattataggcacgaaccacaatgcccggcctcatgttttttatttttcaagttgaaatgaggtctctctatgttgcccaggttggtctcaaactcttgagctcaagtaatcctcccaccttggcctcccaaagtgcggggattacaggtgtgagctaccatgcccagccaagatcagtgttaatgaatcaactatatatattacataaggtgtctttaaacagaaataaggttatatattgatcgattggtaacaatgttgtgaccagcagcttacagggtacctagccttgtatttctcctataaataatttgctcgttgagtgtttgtggcaactttgtagcacataactaccaagaataaggactgtaataagagtacgtccctcacaggattgtaatgaagactgagtccatttacataaaggctgagagcagtgtcaagcagatggagaacactgtagaatgtgcgatagctctaacagtggttatcatggctgccctctcacttcttcagagacatgtgtttctaaggtctgcactctgccccaccctccccatccactgtcccccagcccgtttcctcctccacttacttcccagccctgtgccttctgccttctcttttctgagtttgctaagggcactgctggctcaagagcagtaactaacagtctctcgcctcttctctccatggcaaccagtgacctttggagaatgtaaaccttatcaccaatctcttaaagcccttcggtgccttcccaggatgacgtccagctgaggtccttggcaagacccagggcgccccctcctcgctccatcacctcccctgtcacctcccctgcatctccctactccagctgcaccactcttgtgccccagtggctcttgtctgattatttccttcatctccccagctggtcagcagagctggtggtaatcaactcagaccctgtcacctggatgtccagcagttagggactaaaaaaaatcaacaggtcacattctgtcctgcagatcatgataataagatctgtcagacagcagtcagcagtcagagccaaatcttctggacttcagcaggattctgcctcttgctatttcctgttgcctctcttagtgaccttttaagagcattgtggatgcctcccagcctcctgctaaccaccctgtaacctgaacagcctgcagcagccctgcccagtagaacttcctgatgtgatggaaatgctgtgtctgcaccactagccacatgtggccacaggattctcgaaactggtggtgcagttgaggagctgactttatattttatctcattaaatttaaatgtaaatagctacgtgtggcttgttggctagcctattggaaaacacgggcttagagagacacagggagaatcactgtaatgcactaaaagaaggtaaaaaaaaaaaaatcctaagaaatattcctaaaatactttaatatagggctgggtgcggtggctcacatccagcattttgggaagctgaggagggcagatcacttgaggccaggagttcaagaccagcctggccaacatggtgaaaccccgtctctactaaaaatacaaaaaatcgggtgcggtggcgggtgcctgtaatcccagctacgcgggaggctgaggcacgagaatcactcgaacccgggaggcgggggttgcagtgagccgagatcgtgccactgcactccagcctgggcgacagagcgagacttcatctcaaaaacaaaaaacaaaaaccaaaaaaaaaaacttcagcatgattatttaaccaaaatgcaggttagttgttcaccggatgcagagtccaattaacaagagcaaggcctggtaccaaaaaaagtgaatttactccgaaactagcttgggtgaggggtacaaagcatcctgcctttctttaaaagtgctgcttccccttggaagtagaaagtggacacttttataaggtaaggggggaagtgtgcaagggcaagtgggggggtccctctgctagttccgtgcatactctacaggacagttgacttggcaccttcctggttagtaataagctgtagcagtggccaagtgggcatgctttcagtatgccctcccagtgaatgaaagtcctgaggcaacccccaagggtggaagtgccaggccaccacccactggaggtgaaagttccgtgatgggtttgctttggtctgcgaatctactgtcatgtggagagatctgtgctctggaagagcatacagttagaaaagcttgccctgaagggaatgtatggtgaaggggaggtgaaaggttatatttgcatttctgaagggctaagtaggaaaccgggaaccaggggagaggagaagagaagagaggataattttttttaagaaaagcaacatattccctttttcttagaaaaaatggagcactcggttacaggcactcgaatgtagaagtagcaatatataaattatgcattaatgggttataattcactgaaaaatagtaacgtacttcttaactttggctttcagagttcgaaccaacgtggcctcaaccagatttggaatgtcaaaaagcagagtgtctatttgatgaatttgaggaaatctggaactttgggccacccagggtaagataaaacaccttccacgtcataggtatcttcctctctccttccctgcctctcccattagaacctggttttcttcctgagcagcaacaatcttaggcatctttccatgtgactgagtatccaccacattatttttaatgaaatagtattagattgcatggatgtgacataatccatttaacccatcccctactgttggacattcaggttgtttccagagtttcaatattattttatttaataccctaatagttagagcaggccatgctgctatcacaaatagacccaaatatttaatagctcaaaccaataacgtttgtgtcctcctctctgggcagtacagggttggcatacctcctgaagtgaattaggaactacactcattccagcttccagtttggtctttatctgtcagtgccttactgtcctctgcattgttgagtctcagtcaccttgtccaagttccattggccagaaagggctagaagcacagaagggctggaagtggcatttgttcctcactcacattctggtgggaagaacttagtggtgtggccttagctgactgtaagggaggctgggaaatatagtctagcgagtgccctggaaaaagccggcacggcattccccatggaaagctgtcaggcacggctacagtctaccccctgccaaccagtatctgcatggaccctccttccacactcagatgcatttacccccagccccaagagagccaaccgatgcccatgtggtcaccacagccacctccgagtccaagatttccaggtgacatgcagtctcctctctcccagctttaggaatggcttcttctgatctacacacagacacagacacacacacacagacacacacacacacacacacacacacacacgatggagaggggcaggataactgcaactgtaactccattcagaaaagaggcacagcactagctgcccgcagcactggagccctgctgggcagcactggatcaacctctgccctggcagaggagcatgttcctccacaaatccctgcttcagcctctcgagaggctcctccttgtctgttattttccttggccacaaggcaggcaggcagtgggaagtgtgccctcctccggggcaaggagccttcacagcccacttcctgctaataacagtttggggttccacagggtgttttaagactccagtcagctattttaggccagactcatttctctctctctctctctttttttttcttttatgaaatcacaccctgagacccaggctggagtgcagtggtgcgatctcggctcactgcagcctccgcctcccgggttcaagcaatcctcctgcctcagcctcctgagtagctgggactataggcgtgcagtgccacacctagctaatttttgtatttttagtaaagacggggtttcaccatgttggccaggctggtcttgaactcctgacctcagatgatccgcccgcctcggcctcccaaagtgctgggattactggcatgagccactgcgcccagcccagactcatttttctttgagagtaggcttttcccaaaagtaggcttctgagctattcactttcaggcagtcccatgtgccaggaaccacatccaaatttcctccgtggatgggagtctcaggctgccttatctccttgcatgtccccatgcccagctgtctcagcctaagggcaggtaccttgaagtcaagttaaacaataagattggagaccagcaatgccctcagcctggtttttgcagcaggactgagtcccttgttttggctcaatgggaagtctttgctgttcaaagccttagcttctctggctgagtgcggtggctcacgcctgtcatcctagctctttgggaggccgaggtgagcagatcactgaggccaggagttcaagaccagcctggccaacatggtgaaaccctgtctctactaaaaatacaaaaagttagccaggcgtggtggcaggcacctgtaatcccagctactcgggagcctgaggcaggagaatcgcttaaacccaggagatggaggctgcagtgagctgagatcatgccattgcactccagcctgggtaacgagcgaaattccatctctaaaaaaaagaaaaaaaaaaggccttagattctccctttgactttccacgtttgtgcagccttttatctccaatgctccatttcattccatctcctggcttattcttttcttgtcacatctactaaaagcaacaagaagccaccggtattcaggaacattctacctgtccccagagctatatgctcagtaggcatacagttggccctccaggttatctgagactcagatttccagagggctttgcatggctcacaaggtctgaagaacctctgagcctcccgcctgcggtgtctgttcattgactttgccacagtctcaaagaggcactgcatgctgcatgtttgaggtttttgctttggtggcatccatttccagcctcggcttccggcattcctcccccagcagactctctgctgctttccccttactccttctggcagttctgggaggttgcatagggcccttgcaggatgccccaagtccagctgcctctggcctctgggaagcacacccttgacctgccatgtgtaggaagacagcccgcttctgccagggcccaactctgccggcaggtagcaccttccaacctcttcactttggactttataactgtcaggtataaagtcggttgtgtccttacgtttctcaaattcttcaagacacgtcaaccagcctctcctacgcattctctccagctcagtctcaaaacacaccctttctctccagctcactctcaaaacacaccctatcaggccaaccactctttttaaaggacagctcctcaccaatccagtcaggtagccttccccacattgtatcctggaagtgggtgatggactgggtggggaagagggtcatatggcaaatctgtatgtcttacagtaattgtctagcagcccctggtgtcttactttaggccccctggaaactttcagatagtggagttgtctgatacatatcttataacctacagatattaatatatcctcacaggggcacaaaagctcttacaaggatgtttattataataatatttttattgttataatttacatgccataaaactaaccattttaaaatgtataatgcaagggtttttagtatattcacaagattgtgcagctgtcactactaattccagaacattttcattattccagaaggaaaccctattcatattagcaatcactcccccattccgcctttccctaaaacccagcaatcactaatctactttctgtctctgtggatttaaagtaattttaaatttgaaaaatagtatctataaggaaatgtatctagtcacaagcatacagcttgatgaatttgtaaaaattgaacagtcctatgaacataccctgtaagctcaagacatagaatgttaccagcccctgcaagcaagctgcctgctcacttctagtcattaacccctccctcttttccttctagtcattaacccttcagagtaactattctgattaccaatagcatagattagttctgcctgttgttttactttatataaactgtctcattaagtataaacatgtttgtgtatacttgtgtatttctttctatcacaatgatgtttgtgagattcatccatgctgttcctatagacaattctattttgcagcgtagtattccattgcatgactataccacaatttatctgtgatattacaaaggaatacttgggcagtttccagtttggggctataggatagttgtgatacaaatattttagtatagtacatgtcttttggtgaacctgggtacacatttctgttgtgtataccccttaagagtggagctgatgatcctggctaacaaggtgaaaccccgtctctactaaaaatacaaaaaattagccgggcgtggtagcgggcgcctgtagtcccagctactcgggaggctgaggcaggagaatggcgtgaacccgggaggcggagcttgcttgcagtgagccgagatcgcgccactgcactccagcctgggcgacagagcgagactccgtctcaaaaaaaaaaaaaaaaaaagagtggagctgatgggtcatagcatgtaaatgcattcaactttagtagatactgtccaacagttttccaaagtgattgtccaacttacttgcctatcagcagtatctgaaaagtctagttgcttcttttcttggccaactctttttttttttttgagatggagttttgctcttgttgcccaggctggagcgcaatggcacgtcctctgctcactgcaacctccgcctcctgggttcaagcaattctcctgcctcagcctcccgagtagctgggattacaggcatgcgccactatgcccggctaattttgtatttttagtagagacagggtttctccatgttggtcaagctggtctcgaactcctaacctcaggtgatccgcccgcctcggcctcccgaagtgctgggattacaggcatgagccaccgcgccaggccggccaactcttttttattttattttattttactttaaagacagggtttcactttgtcacccaggatggaatgcaatggcacgatcacagctcactgcagccttgacctccctggctcgggtgatccctcccacctcaggctcctgaggagctagaactacaggcatgggccatgcccagctaattttttaatttttggtagagacggggtctctgttgtctcagattcctgggttcaagtgatccttctcccttggcctcccaaagttctggtattacaggcatgagccactgcacccagcccatggccagctcttgatacgatctgtctctttcttttctttttttttttttaatttgagaagtgttaaataatctttctttgatattatacataaaccacaccaaaatgtctttcagtaagtaaaatgaaccattttagatacagaaaattctaattagattggcatagttaaggccaaaaatataaagttgacattgctaccttatcttcagcccttgcctttaagaggcaaatgaacacaaaatacaggtgaatcttgcttggttctgagacagtgaaggactttcccccagtatttaaatatatttacataaccagttacataaatctaaatattaaaaaaatctccaatagattttagatggcattcaccatctttgtgaaaagttgaacattactaatgaaatctgatcatatctttagaaggataaacagtgatagcatttactgaatcagaataactgttttttggggttttctttgagacggagttttgctcttgttgcccaggctggagtgcagtggtgccacctcagctcactgcaacctccgccccctggattcaagagattatcctgcctcagcctcccgagtagctgggattacaggctcgccccaccatgcccagctaatttttgtatttttagtagaggcgaggtttcaccatgtcagccaggctggtcttgaactcctgacctcaggtgatccacccgcctcagcctcccaaaatgctaggattacaggcgtgagccaccaggcccagcctattttttttttttttctttttttgagacggagtctcactctgtcacccaggctggagtgcagtggcacaatgtcagctcattgcaacctccacctccggggtttcagtgattctcctgtctcagcctcccaagtagctgggaactacaggcgtgcaccacaagcccagctaatttttgtatttttagtagagacagggttttgccatattggcctggctagtttcaaactcctgacctcaggtgagccacctacctcggcctccgaaagtcctgggattacagacgtgagccactgcactgcctggcccagaaaggactattaattgtagttgcctctgggaatgggggctgcctgcttctttctgtaaccccttctgtgctgtttaaatttttttttttttttttttttttgagacagagtctcgctctgtcgcccaggctggagtgcagtggcgcaatctcggctcactgcaagctccgcctcccaggttcacgccattctcctgcctcagcctcctgagtagctgggactacaggcacccgtcaccacgcccggctaattttttgtattttcagtagagacggggtttcaccatgttagccaggatggtctcgatctcctgaccgtgttatctgcctgcctcggcctcccagagtgctgggattacaggcatgagctaccacgcccggcctttaaatttttactttgggccgggcacggtgccttacgcctgtaatcctaacatttcgagaagctgaggcacgtggtggatcacttgatgtcacgagttcagaccagccactgcactccagcctgggtgacagagtgagactctgtctcaaaaaaaaaaaaaaaagaaagaaaaacttttactttttacatgttattttcatcaatttaatgaatttaaataacaaatgtataaatttgatattaataaaatggaagcatttggtaatcatgttttgggttttgtgcttcctctgcagctctctagatgagaccacctatgaaagactagcagaggaaacgctggactctttagcagagttttttgaagaccttgcagacaagccatacacgtttgaggactatgatgtctcctttggggtacctcttgacttcttttatttttctgtttccccctctaagaattttagttcactaaaatgaagaatttccctccagcagagctaagcatcaagtagcatgtagttgtaggtaggattaaaagactagggttccgggaggtgaaggttgcagtgagccaaaatcacgccactgcactccagcctgggtgacagagcgagactctgtcatagatggatggatggatggatggatggatggatggatggatagatagatagatagatagatagatagctggatagatagataagatagataagacaagactaggcttcaagctgcagtccagctctaccaggcttgttgtgactctgggcaagtcactcagcctctctgagcctcattttccagcttcagtggatacccatgaaggcaaatcagagaggggcctgagtgtgtatttgtccagcaggcagatggagggaacaacaaactagacccgtagttcttcagtagggataagataactgcccaaaagttatttagattacaaagacttgagccctgctcctgtgagacagtgatggggtaggtcgggtgcattcctgggaagcatatttttgaaaagctcacctgggattctaatgtgtatccctaggtcttattcctagagattttgattacttggtctggggtgtggcatgacctgggcagggcactgggatttttaagctccacagatgattccaatatgcagctagtatgagaacttgtttttttttgaaggagtctcactctgtcacccaggctggagtgcagtggcgcaatctcggctcactgctccgcttcctgggttcaagcagttctcctgcctcagcctcccgagtagctgggattataggcatctgccaccatgcccagctaatttttgcattttagtaaagacggggtttcaccatgttggttaggctggtctcgatctcctgacctcaaatggtccacccccatcagccttccaaagttttgggataacaggcgtgagccaccaggtccggcctggtgtgagaacttctgagttggatgaaacattagccccagatcctagaagccagggaagtgctggtctttatcgactggccaccaggtggcagatttgggcaagggtctgcctttgggtttagaattattgcttaggccttaaagtagttcttttttgccagtgggagaaaatccctcaaagatggttttctgggttggttggtttgtttgtctgtttgtttgttttttgagacagagtctccctctgttattcagcctggagtgcagtggcatgatctcactgcaacctctgcctctcgggttcaagcagttctcctgcctcaacctcccaagtagctggaattataggcacacgcccccacacccagctaatttttgtatttttagtagagacagtgtttcaccacgttggccaggctggttttgaactcctgaactcaagtaatcctcccacctcagcctcccaaagtgctaggattacaggtgtgagccaccgcgcctggctcctcaaagatgttaatcctcttgatggcaattgactaataccagaaaatgtcacgaagcgtgcattttggattcaatcatggaattgttgaggacaatcagccatcagactaaagcgatagaaatagtattggaaattgcagcgggagcactgaatggagaaggcactccacataatggaggaggcaaccaagtcttagagaaggtatcaagcctgactataaggacagtgagggaattgaaaaaacaaaaaaggagcaatggagcagggaaggattgaatgcctttcaagtagattcagtaattgctgttagcagcaaaaaatgcagtagtgcctgggcagggctttaaagtgcttgcacaggcagccctagagggccgggctgcttgggaactcttacaaactgacctaccaacttgagcatccacagcctgatcagaggtgggggagttaagggccttctctcccctagcctctactagagcctgtaactgcagggaaaccaagttgcaggctaaactctgcccacacatgcagacattgattagcaagctacaaaaacagtcatgaaacctgtttttataggattagtgaagccccagtttgaccagagtactttgcatgaatgttttgttagaagcaaatgtgccaatattctagcagctgcgtttggtttacttcttcttcttctttttttttttttttgagttgaagcctagctctgtcacccaggctggagtgcagttgtgtgatctcagctcactgcaacctctgcctcccaggttcaagcgattctcccgcctcaacctcctgagtagctgggattacagacatgtaccacaatacagggctaagttttgtatttttagtagaaatggggtttcaccatgttggccaggctggtctcaaactcctgatctcaagtgatccacccgcctcagcctcctaaagtgctgggttaacaggcatgagccacggcacctggcaaaagtcatcttttggtttacttctattgaactgaaaaagtcacaaatatatttatatttaattaaatatatttatataaaaatatggtatttagtattattatttttagagacagggcctcgctctgtcacccaggctggagtgcagtggcacaatcatagctcactgcagcctcaagcttctgggctcaagtgatcgttccacctcagcctccctagtagctgggactacaggcacatgccaccatactcggctaattattttattttatttatgggtctcgctatgtttcccaggctggtctcaaactcctggcctcaagcgattctctcacctcggcctcccaaagcaccgggattacaggtgtgtgccagcacacccagccacaaatctataaatttagaaaggaggactatttctaaagagggtcccactacctgtaggcaggaagcagagcctctggccataactgaaaaacaagcacttccaagaaggggcaaagggaacatgaatttatgctgagaggcgtagctaagcatacatattcaacagattatgggaggatctatgaatattcacaaagggaggatctatgaatatgcacacatgtggagtaagctaacgtgtgcagcatgtctcccatgttcaccttaggcagaaacttaacactaacatgtattacagggcaacaaaatgagactgcatatctacataacctagctatttggtaggctgaagcaggagcatcacttaagactgggagttcgaggcagctgtgagccatgatcgcaccactgttctccagccaggatgacagggcaagaccctgtcttagaccactctgtggtcagtggttatcaggaaggaatgctagtcagttgtgctgaaaccactaaaaaggaagggcagaattaggtgatgagttgataccagtggtgaagtgagtcttttttttttttttctttttgagatggagtcttgctctgttgcccaggctggagtgtagtggtgtgatctcagctcatcgcaacctccacctcctgggttcaagtgattctcttgcctcagcctcccgagtagctgggattacaggcgcctgccaccacgcctggctaatttttttatatttttagtagagactgggttttgccatgttgtcaggctagtcttgaactcctgacctcaggtaatccaactgctttggcctcccaaagtgctgggattacaggcagctccaaagtgctgggattacaggcatgagccaccatgcatggcctgaaataatttttttgaaagggctagtttctatttagcccttaggggaaaaaaaactaatggcagttagggagggaatagaacgagtcctgtttgaactcctttcccatcatggccaaaacttaaaattttttttagatatctctgggctccccttggccaaaagatagtttgttgagtcagttgggagcttagaattttgtttttatttctcacatcattgaatcaatttgaaccaggcgacaaaaccttctgctcccagtagtgggtcagagaaccttcctgattcctgccctgagattgtctctctgaagacaacattaggctagtaggctttccagattctgtaacccattctttcaaaggaagagatgcctatatttttctagccaattcatataccttgagtatcactcaagggcaaaattatttctaacaaatcatttactaattagcaaatgcttaagtgtagatttagaaagctaaagctatacagtggctgccatctatagtttggacttgtgattaactacattgaaatgctaactctgtaccctagagtatgaattcctgattagagtccttcaggtgctaactaatttatgtatttcatgtttgataatattattacttgagctttgtgggagagcagtcttttcctcccctgagatatagctagaagttacctcctttgtgaagccttcctagatactccaagcagacacggtccttcctttctcccttgcccagcactctgaggttgactctgtggagcactgatccctctgtgttataattgtctatttacacgtcagctaccacctataacacactgagttcctcaacagcagggacactgtccattctttgatcccagtgtctggaacagtgccaagtacatagtagggacttaataaatattgattcatatgtaaatgagacttttccaaaacatgctttcgttgatgcctctcagcatttatacaccttttaccaactcgctactggccacatagacaaatgaaagcagtaatccagatacacccaagaggacatctgttcttttttctctctgtggagtgggagacttaagtggcttcttaactggtgtgtcgtctgatcaagtggtccaggtaacaggtggatgccaatgtctggcccaggcatcaccccttactggcactggtcattacagaagacactctaccagagctgaaaggacctcttgtcactaggcagctgtggagtccgctctacttgacctagtaaaatctgcctggagactgttagagtcaccccactacctgaagttacctccaggctgacctcttttttttcccaggtggagtcctggcatcttagatattttaataaggatttgcttgttgacatgttctttattcactaaggtgtcagcatattactgtcttagaactgagggttcttcatcttttttggatcaggacctccctctaagaatctgatgactgctctggtccctctcccaataaaaacttccatactcacctgttaaaaaaaaaaaaaactttaaacaaattaacagagttttattcagcaaagaatgattcataaatcgggaaggctgcaaccagaataggttcagagagactccacggtgtgccacgtggttggagaggatttaggatttatgcacagaaaaaggaaagtgacatgcagaaaatgaaagtgagggcctggtgctggtgcggtgcctcacgcctgtaatcccagcactttgggaggccgaggcgggcagatcatgaggtcaggagatcgagaccatcctggctaacacggtgaaaccctgtctctactaaaaatgcaaaaacttagccgggcgtggtggcaggcacctgtagtcccagctacttgggaggctgaggcaggagaatggtgtgaacctgggaggcggagcttgcagtgagccaggatcccgccactgcactccagcctgggcgacagagcgagacttcatcttaaaaaaaaagaaaagaaaaaggaaaatgaaagtgaggtacagaaacagccaggttggttacagcttggtgtttgccttaaacttggtttgaacagttggccgcctttgattagccaaaactcggtgattggtacaagagtagattgcagttcactatgtacagagaagcccttagatccgaactcaaaataggtaaggaggcagttttagctacacttaagttaacatactcaggagtaccattccagcttcaagctggaagtgtctgcagccccctgagaccacttaatcccaagttaaaaacccctgctcagaggcagcatctttttttttttttttttttttttttttgagagagatctcactctgtcacccaggctggagtgcagtggcacgatctcagctcactgcaaccaccacctcctgggctcaagggattctcttgcctcagtctcccgagtaactgggattacaggcgcgtgccactatgtccagctaatttttttttttgtatttttagtagagatggggtttcaccatgttggcctggctggtcttgaactcttgacctcaagtgatccactggcctcagcctcccaaagtgctggcattagaggtgtgagtcactgttcctggcccagtgaggcaccatctcattggatatggagacaaaggatctggcttagcatcctggatttgtattttctttccaagagtccttaagtgatatctaacttttgcgagctgcagtttcctcagctatgagatgagtgacattaacctcctctcttcagatttataagaggatcaattaaaatggcataggtaaaagtgcatcctagcaagttggtatctactttagaaatgaaggaggtcatatgtatgtgaagtctccagacccaacatgccatcttatatgtgtctatttctacaagtgagctagtgacaacagtaattgctatttttgctcctacatgggtagggctgatcttgactaggaggagtcaataagactcaccagccgggcgtggtggctcacgcctgtaatcccagcactttgggaggccaaggcgggcggatcacgaggtcaggagatcgagaccattctggctaacacggtgaaaccccgtctctactaaaaaaatacaaaaaaattagctgggcgtggtggtgggcgcctgtagtcccagctactcgggaagctgaggcaggagaatggcgtgaacccgggaggcagagcttgcagtgaaccaagatcgagccactgcactctagcctgggtgacagagcgagactccatctcaaaaaaaaaaaaaagactcaccagctgtggccactgtctgtgctaattggctagtgcctgcatctcagaaactgctacatattttgactattccccctgcacttaagggcatgcacactcccaaaatagactcagattgtctaaggaataatgatgatgatgaagagaaagccctctttatctggtctatttgtagtcagttccaaaagcattaagaatttctgctgaactaatgcagctagtttctttcctgtcaccactttccttccaaaatagtttcaagatctgtgggggaaaaaatctatttacagtgaacagactggtgggaggaagttgagcattggggttttctgccctgtgtaaccttgccctaagttgggcagatggtatcacactacctggacatcatctgctcattcactatttgaccagttggtcattcattcacaaatgtcctttttgcaggagggatggaggtgctagacctgcagatgctagcatgaaaagacagatctcctgctgctaaggtgcttaaagtagtggaggtcaggggacaagcaagcagtcaggcagctctgaatgcagaggcaggaagcaccacgaggcaatgggacccacagaggggtagcagggtagaggtgagtgggtctcatgtggggagggaggaagttgactgcagagaaggtgccagggggtgaaaatagcttgagagctgtggagctagaagggctctcacatttgcttattaatatgccctttgaaaaagagtggcctgatacctggagtcactcaaaagatttccaattccgataggaaaaagtcaattttggcttcagtggttgcatgtgcaccccctgatttgctgtatgctgaggcattgtggtgatggacgcaagtgcggagaccttgagcacgcatctgcccctagttcttgccctgagtcctcgaaggaggcaggagagacatcaaggcagacaggcgccgctcatcagtgatgagaccagacctggaactcgcgtcttatactcagtcctctgccctttctgctggattgtggccccccagtatagggtgcaacacacaactggagcatttaagggccacaaagagaacaaattaccaatgattgtgtgttgattctttgagctctttttttttattattatactttaagtgttagggtacatgtgcacaatgtgcaggttagttacatatgtatacatgtgccatgctggtgtgctgcacccattaactcgtcatttagcattaggtatagctcctaaagctatccctccccccttccccctccctccaccccacaacagtccccagagtgtgatgttccccttcctgtgaccatgtgttctcattgttcagttcccacctatgagtgagaatatgcagtgtttgattttttgttcttgcgatagtttactgagaatgatgatttccagtttcatccatgtccctacaaaggacatgaactcatcattttttattgctgcatagtattccatggtgtatatgtgccacattttcttaatccagtctatcattgttggatgagctctttatctcatggaaaaataatttataaaactctgtatgagaggagtgggaaatagtattaacgggtgcggggtttctttttgggacaatggaaatagctggaattagatagtggtgatgtttgcacactttgtgaaatactaaaaactcctgaattatacagttttaagaaacttttatttatttgtttttgagagaagttctctgtgtcacccaggctgaagtgtggtggcgtgatcaccggttattgcagcctcaatctctgaggctcaagcgattctcccacctcagcctaccaagtagatgtgactataggtgcgcaccaccacacccagtgaatttgtaattttttgtaaaaacaaggttttaccatgttgcccagtctggtcttgaactcctgggcccaagcgatcctccctccttgggctcccgaagtgccaggatacaagcatgagtcaccacatgcagcctcagttttaagaaacttttaaataaatgaaatatagtcataccaaaacagtaaaaatgggtttcaggaaaaaaaatgtttttttaaacaaacttacgtattgtataatcccagcccttttaaaaaatgctttcaaaaactggcagtcaactcataaaaggacaaatacttatgattccactgatgaagtagtcaaaagtagtcaaaaatcacagaaacaccaccataaatgtataatttttattttcaattaaaaaaacatcttttttttagtcaaaatcatagaaatagaaagtagacaggtggttactaagggctatgggatggggaaattagtgtctaatgggcatagagtttcagtgttacaaggtgaaaagttctagagttatgctgcccagcagtgtgaatatactttattgttctgtacacttaacatggttaatatggtaaatttagcgttatgtgctttttactatagtaaaattaaaaaaaaaaaaaatggggccgagtgcagtagctcacacctgtaacataatcccagcactttgggaggccgaggtaggaggatcacttgaggccagaagtttgaaaccagcctggtcaatatagcgagacctcatctctacaaaagaaaaatgttaaaattagacaggtgtggtgtctgtagtcccagctctctggaggcagggactgagtcagaggatcacttgagcataggggtttgaggctgcagtgagccatgatcctgccactgctgcagcctgagcaacagagcaagaccctgttgtaaaaacaaacaaacaaaaactggcagctgatacctgagagtgaatatcttttatcgctggttaatgggattgagagaatgcttcatcttatagaaagaacagtgtctttggacccacagagacctggatttaagattagctctgccaattactgagtactctttactatgaacctctgttttcctcatctgtgaaactggaataatgaatcctaccgccaacaattgtagtcaagttggaaacaatttacacaaagtgccaaacaccaagcctggcacagtaggaaccgagtaaatagtggttaatatttttatcagtgtctgcattgctgacgtctccatcatttctatacatttgtttttgaatcagaaaaagatgttattttaaaaaaataacccagtagtgccccttgtcccattcctatcagttatattattattgttactaccctctggaatttcaataactctttgttttttgggttttttgttttgttttgctttgcttttgagacaggatctctgtcgcccagtctggtgtgtagtggtgtgatctcagctcactgcagcctcaacctcctgggctcaggtgatcctcccacttcagcctcccaagtagctgggaccacaggcgcatgccaccacacttggctaatttttgcatttttagtagagacagggttttgccatattgcctaggccggtctggaacttctgggctcaagccatctgcctgcctcggcctcccaaagtgctggaatttcaggcatgagccatgcctggcctaaatagctctctgtgtttgcaaaagtgtgttataagaatcattcagagcctctcgattggatggaggctctagaatgcacagaaaaaggctgccaccgtgtatctctgcaagtcatgcacaagatggggaacagcaggcttccccctgcttaccagttcaaatacagagaactagccctgtagctgtttctttcatatctcacccattctaaagagaccacaggccttagaagtaaaggactcttttgttgaaagagtgttttcaaatttaaatgagcatttattggtcaaagatgcaccaactagtcttttgaagaattcaaggctctttagagaaaaataaagccttggaggagtatctgagaagcttgttagatgcgtgggaagagtctggaaataaaaaacttcatctggagtttctgccttctaccaacagagctgaagctaatgctctcctaagacaagcaaagcagatggtttgcatacttccttaccttccttttacttcctctgtaatagacttgtcatgtctgatgtttgagttgacgtggtactctaatagagttagagtctgcattttttttatgtcctctagtatgttctggttgatggttgagggcaacaaaccagcagtcccagatgccagcaccaagacctgagacaggtcacttaactctccgagcttcaccaccattctcaccttgcagacctcacagggaacagggaaagctctatgagatacaacatcattatgattaatcctattctgattctgaaagcaaagctcttcctacacaaactcctatttctaaatactaaaagacatttctttatggtgtattttgtgtacttgtagaaatggaaagtgttgagataaaacatgaagcaatgatgacaaagtgctaactttttcttgttttaatttctttatgctttttttccacctaatcccctagagtggtgtcttaactgtcaaactgggtggagatctaggaacctatgtgatcaacaagcagacgccaaacaagcaaatctggctatcttctccatccaggtatgtaggtatgttcagaagtcaacatatgtaattcttaaagacttccgaaatgtgacattgtggaccatttaagaaatgtcggctgagcacagtggctgacacctgtaatcccaacactttgagaggctgaggtaggaggatcacttgaggacaggagttcagaaccatcctgggcaacatagtgagtccctgtctctgtaaagaaaataaaaataaagtcacagctgggtgcaggcttacacctgtaatcccagcactttgggaggccaaggcctgtggatcacttgagctcaggagtttgagaccagcctgggcaatgtcacaaagccccacctctactaaaaatataaaaattagccaggtgtggtggcacacgcctatagtcccaactacttggaaggctgaggttgagcctcagcctgagcccaggaggtggaggttgcagtgagccaagatcgcgccactgcactccagcctgggcaacagggccagaccctgtcccaaaaaaaaaaaaaaagtcatcgtcttatgttagcatccttgtaagtgagcctttcctgatattttgcagcctgtctcattctcagtagaaaagtttactctagttacataacttctccctgctgacaatttggatactgtaagcaggcatcaggatattaagatctgaagtgagtagcttataacttttccaaatccagcctagacagttttcctctattaaattattgccctgactttaaaagaagctacttttgaccttgtagcgtttgaacaagttgcactttgtcttcaaagcaagttaaagtttgacctctacttgttttgagcctctcaggtaaagggttatttgaattccctttgcaggttggggttgtgtaccctgtggaggtggtagagtgttatatattgctgctccagggcatttaatccctcctgccttttccattgatgtgctttcaatctagaggaataaaagattgtgttggagacacaatgtggcctgcatagcatctgaaagcctgagaacatgcagggagagacatccctcatccctcagcagcctggctgctgttgaagtggttgtaagaaagtaaaagagaaatgcccacaaaacgttctcagatccagtcattcattagcacttccaaagagagcatgttgactgtgaattgggaaagggccagataaaactagcatagaattctttgaaagactaacggtatttgcattttttaaaaattataaccttactctaccccctaacattgacatcatttttaggtaattaatattttcccatttattattctgtgatctctaatgctttgttcagaataaatagtgtgtttcctttccccacactttcatccaagaagtgtgctagagttcaacaaaaacagcactagaaatcactgtcattctaggaaggccctaattcacagattgtattggtttttagacccagttagtgtgctggaggttggaggattttaacctctgtgggccaactagcctctgtggcctcagtcattcttcctgaccctggctgtgcttgagcctgtgtgttcttatccttcatctccgggggaacgaagtggatcagctcggtccagcgatcacttttggggatcagtggctttgtagatatcgggcaggcacttaccccaaaagaactttccccatatctgaagactgaaaacgtccatatcgtatttggacacactgcccagcaatacgctctagctgtgttcagaagcatgggaatttggaaagatctgctgagcatgccgtttactgtcacagatactatcttcctcaaaaaaaaaaaatatatatatatatatgggggacggggcaggttgagactgggtgagactgaagaggtgccttggccagagcaggccacacccagagaccacaggctccccggtccacctcaggcccctccccttcctgcgccgtttccggcagatccagagtggccaccgccggatgggagtcgggggaagggaggcagagaagcgggccctgaggacaagctctcagtgcttctgtgggaagtggcggcaagacggcagctcccagcgggggatggaggccgagtcagtctgctggtcactggaggccaggatgctgcctaacacagccgtcccgctccgggcctcaccaccagggcggctctccccactcccggcctgctgcccacacagactgcggggttccgggggagcaggacccaggccgttctgcgcctgtcttcttggaaggagcaggccggagcgcgggagcgccgtgtagctgtacctgcgaaggcacaggattccgcgggaagatcccgcagtttcgggccgtcgtcattgtttttatacctgtggcaaatggcatgaccagacacacggttatgtctggagaaacccctgtagaggagcaggaggttgtggacatgctgtggcccggacagtggctgccgagcagttggagcctgcacccgcccaacttggctaaagaagtccccatactctctgtggaaaagatttccagaagctgttgtgtcaatatcaaagcctcaaaacaacaacaacaacaacaaaaacatgaaattatcaacaataaagatcatccttgagtctgctttgaaaagtagggtgaaattctgcagaggcattcaactggcaagataccaccctcatagccagatctgcaggtctcagccatcatgccagggaaaatgctccattcaccactcctcagcttctgcttctggtttcagaggtctctgtattggaggggctttaaagcaagaagggtctttacccacttactcttattcacagatgtgaatatgcaggtccagtggggaaagtgacatgtcctaagtcagaatagagtcaacaagaaaacagggcccaaaatgacttagcctctagtgtataatgggcattgatgagctactggaaatacagagatgaagaaaacacagtcccatcttcaaggagctcaatctagcaagggagacagactctttgtaggtgggaccgggcttccctgcagcagaaggaagcttgaaattggtaacgagcctcagaagggacagaggcaggccaccatgctaccctgagaggatcgcatgtggacacggggctatgacctggccctgctttgacccactagctgtgctgtagggccaggtggagcctggagtggcctgtgctaaggggctactatgagctctttccactcccccaaggcattgcataaataatgtcactttctgtttgcacagcaaaatcagggacacaattttctagaacatggggtgcctcccctccccccagcccaacagaagttctacaatgactgatgggcccttgtttttgtttgagacggaacaccccacagggttccgagtggtgatttgtggcccacaggccactggcaagtggaggcagagctgcagagccctcgggagccacagagggcctgctggccgccacgacatgccaactcagctgctgctggccctcctgtgggcggcagtgctagtgatgtgcagaatcttaggactagtgccaaggaacctataaataccctgggtgacccaggcgtgcactgctgtggtggccttcacagtcagaagatgacaagctgagaaggggagaatcggcccaaggtgagatccacagaaaggccagggccaagatgcggccagcacctcaggctggtggtggtcttacgttgaccatgccagaggccagtccttgattgctccaaaccctctgttcgagggttccaaatgaaatgagcaggtcctcgtgtcaggacctaggttagtttctgaaaaagcatgaaaagcaggcctcctgaacttccccgagtgactgatgcaaagtgcgtcctgcatgcttcacagcaccatggagaggatcttcaggggcaaactgcagactatctgaatgacggcactgaccatcagcaaaccgcagagctgcctgaccaagaaattgcgagacagaagcaatgcttgcaggcgaagaagaaggggccagacacagtggctcacgcctgtaatcccagcactttgggaggccaaggcaggcggatcacttgaggtcaggagtttgagaccagcctgggcaacatagtgaaaccctgtctctactaaaaatacaaaaaattcgccaggcatggtggcaggcacctgtaatcccagctgcttgggagactgagacaggagaattgcttgaacccaggaggcgaaggttgtaacgaactgaaatcgtgccacagcactccatcctgggcgacagagtgagactgtctcaaaaaaaggaggagaagaaggaaaggccaaggcaggaatgaaacaggccatgaatgttggagtgaagcaactggcctcctcgtgctaagcggctactgtgagttctttccactcccccaagacattgcataaataatgtcactttctgacactcaccccgctgaatgtcctgcctctgctcaagggtggtatgatggggacttggcagtggaggggaacagggaaaccagacatggtggtctccccgcttcctggctacaagtccctctgaagaaatccaaaggagtaaagagcttggagagtaggcctctgtagggtgcaagggcacagctggagacggagctcctgaggctgcagctgatgctgcccgctctgcctgaactgcaccaaaaacgtgatgaggccatagcgggagtccacggaggaggatgcctactgcccgacctctagcagagactaagcaaggtgcatgaaaacttgaaccacatgtgtcacacccatgaccactacatgaagatggcccaaaacctggcccaggaattgaagaaagactcttccaatttgctgtaagaaaatggcccagggggcaagcacggtagctcacacctgtaatcctagcactttgggaagctgacgcaggcagatggcttgagctcaggagttccagaccagcctgggcaacatggtgaaaccccgtctctaccaaaaatacaaaaattagccgggtgtggtgatgcatgcctgtggtcccagctactcaggaggctgaggtggaaggattgcctgagtctgtggggcagaggttgcagtgagctgagatcacaccactgcactccagcctgggtgacacagtgagaccccatctcaaaaaaaaaaaaaagaaagaaaacggcccaggaaggctggagggccgccgtgtccattgagagagtgctccaggcactccaaaaagaaaatgaccacaatgggaagaaaccagctgaccatgagaccaagttccaaccttttacaagtggcctgtggctcctggcgccccgcccacagctgacaggggctcagaagtgctagggggaccatgggccaccagggccaccaggagggaggcaggtaacgatgcgagggcttggatgcagaacaccagctggtttgattctgttttccctgtacctgggtcctgaatgcccagaggctcagggaaacaccagccagtgctgctgcctttaaagcacttttgactgatctcttgttaatttagcaactgttattggttgatgctgcagttgctcttattgaagtttgattgatagcattaggatggtaaggcactatttttcaaataaaggttgtttaatataaaaaaaattttgtttttttttctctcagcctttcacattggttcaaaatatctttcatctggctgcatttctgatttttgttttgttttttttttcttaattttatttatttttaattaaaaataattttttttgtcaacatggggtctcactttgttgcctaggttggtctgaaactcgtggcttcaagcaatcctcccacatcagcctcccaaagtgctggggttatgggtgtgagccactgcagcagcctgttttttttgtttgtttgttttttttaatttgacaagttttcaggtcctgtgaaatcagcagtcttacctcccaccttgcgcaccctgaggaggttgcagaataaaggagaattctagggacacgtgggcatcagtgcctgtgctcagagcacctcaggcagtgtggaggggtctagaggttactcaggctctgcctggcaacccgatagcagtatcagagtatagggccaaggggacggtccttgggcttggtgtggtttattagtccttttcctgtgaccctgatggtttggttcactcatttttatctccatactgggaacaggttcaagccccagcatttggttgataatgcaggaatccttgatacttttattgcccaagcttcccttcctggtgacctcatcctagcctcagtctttggaaaagccctccttgagtgctcaggcagactcaggtgccctttcttctgggctcccatgcactctgttcttacctccatcagggtgccacatgcactagtgttatctgctgccgtggccaatcatccatgaggccatgaggaagtggaatgtacatctggtataagaagacatggcagaagccagcctccgatctgtccacacgaatacagcattcccaaagcaacgtgcatgtgccattattcactggatgagcttgaggtggatgaactagcccaccaggctctcaatgtcatgaatttaacactgaattaagaaaaatatgttttaaaaataatagtttaggtgattgctggggtgctaggagaggaaggaatggggaataactgtttaatgggtatagttggccttgtgtatctgtgggttccacatctgattcaaccaaccgtggatcaaaatatttgaaaataaaaaacaaaacaaaaatgatacaaataaaaaccaatataacaactattaacagcatttacattgtactaggcattataagtaatctggagatgacttaaagcatacagaaggatgtgcctaggttagatgcatgtatcgtaccatttcatatcagggacttgagtacccacggattttggtatctgcagatcctggaaccccttccctatggataccaaggaacaacagcactgggtctccttttggggtgatgcagatgttttgaagctaggcagaggtagtggttgcacaacattgtaaatgtactaaatgccaccaaattattcatttttaaatggttaatgtgttatgtgaatttcaccttaacaactaataatattataggtaaggcacaagttacatctgtagcacaaaaatggccctaatttttaaaacactgctccagcatagcaggtatcacatgtgaggtagcaaaagctggagatcaaagtgtgatacctggagacttatcagtaagggtcaaatgttttttcaggttttgagaatcattcttggaattgttccagaagatatatcgtataactcttcttagatgctaagataagaaggcagatatacactagctcattttgtgttattttctagagctttactccagtcaatttcttgggggcagcatttgtggaatcagtggttcatctgaagggctgtgctgtggaattactatgcatttgttttgtcttccagtggacctaagcgttatgactggactgggaaaaactgggtgtactcccacgacggcgtgtccctccatgagctgctggccgcagagctcactaaagccttaaaaaccaaactggacttgtcttccttggcctattccggaaaagatgcttgatgcccagccccgttttaaggacattaaaagctatcaggccaagaccccagcttcattatgcagctgaggtctgttttttgttgttgttgttgtttattttttttattcctgcttttgaggacagttgggctatgtgtcacagctctgtagaaagaatgtgttgcctcctaccttgcccccaagttctgatttttaatttctatggaagattttttggattgtcggatttcctccctcacatgataccccttatcttttataatgtcttatgcctatacctgaatataacaacctttaaaaaagcaaaataataagaaggaaaaattccaggagggaaaatgaattgtcttcactcttcattctttgaaggatttactgcaagaagtacatgaagagcagctggtcaacctgctcactgttctatctccaaatgagacacattaaagggtagcctacaaatgttttcaggcttctttcaaagtgtaagcacttctgagctctttagcattgaagtgtcgaaagcaactcacacgggaagatcatttcttatttgtgctctgtgactgccaaggtgtggcctgcactgggttgtccagggagacctagtgctgtttctcccacatattcacatacgtgtctgtgtgtatatatattttttcaatttaaaggttagtatggaatcagctgctacaagaatgcaaaaaatcttccaaagacaagaaaagaggaaaaaaagccgttttcatgagctgagtgatgtagcgtaacaaacaaaatcatggagctgaggaggtgccttgtaaacatgaaggggcagataaaggaaggagatactcatgttgataaagagagccctggtcctagacatagttcagccacaaagtagttgtccctttgtggacaagtttcccaaattccctggacctctgcttccccatctgttaaatgagagaatagagtatggttgattcccagcattcagtggtcctgtcaagcaacctaacaggctagttctaattccctattgggtagatgaggggatgacaaagaacagtttttaagctatataggaaacattgttattggtgttgccctatcgtgatttcagttgaattcatgtgaaaataatagccatccttggcctggcgcggtggctcacacctgtaatcccagcacttttggaggccaaggtgggtggatcacctgaggtcaggagttcaagaccagcctggccaacatgatgaaaccccgtctctactaaaaatacaaaaaattagccgggcatgatggcaggtgcctgtaatcccagctacttgggaggctgaagcggaagaatcgcttgaacccagaggtggaggttgcagtgagccgagatcgtgccattgcactgtaacctgggtgactgagcaaaactctgtctcaaaataataataacaatataataataataatagccatcctttattgtacccttactgggttaatcgtattataccacattacctcattttaatttttactgacctgcactttatacaaagcaacaagcctccaggacattaaaattcatgcaaagttatgctcatgttatattattttcttacttaaagaaggatttattagtggctgggcatggtggcgtgcacctgtaatcccaggtactcaggaggctgagacgggagaattgcttgaccccaggcggaggaggttacagtgagtcgagatcgtacctgagcgacagagcgagactccgtctcaaaaaaaaaaaaaaggagggtttattaatgagaagtttgtattaatatgtagcaaaggcttttccaatgggtgaataaaaacacattccattaagtcaagctgggagcagtggcatatacctatagtcccagctgcacaggaggctgagacaggaggattgcttgaagccaggaattggagatcagcctgggcaacacagcaagatcctatctcttaaaaaaagaaaaaaaaacctattaataataaaacagtataaacaaaagctaaataggtaaaatattttttctgaaataaaattattttttgagtctgatggaaatgtttaagtgcagtaggccagtgccagtgagaaaataaataacatcatacatgtttgtatgtgtttgcatcttgcttctactgaaagtttcagtgcaccccacttacttagaactcggtgacatgatgtactcctttatctgggacacagcacaaaagaggtatgcagtggggctgctctgacatgaaagtggaagttaaggaatctgggctcttatggggtccttgtgggccagcccttcaggcctattttactttcattttacatatagctctaattggtttgattatctcgttcccaaggcagtgggagatccccatttaaggaaagaaaaggggcctggcacagtggctcatgcctgtaatcccagcactttgggaggctgaggcaagtgtatcacctgaggtcaggagttcaagaccagcctggccaacatggcaaaatcccgtctctactaaaaatattaaaaaattggctgggcgtggtggttcgtgcctataatttcagctactcaggaggctgaggcaggagaatcgctgtaacctggggggtggaggttgcagtgagacgagatcatgccacttcactccagcctggccaacagagccatactccgtctcaaataaataaataaataaataaagggacttcaaacacatgaacagcagccaggggaagaatcaaaatcatattctgtcaagcaaactggaaaagtaccactgtgtgtaccaatagcctccccaccacagaccctgggagcatcgcctcatttatggtgtggtccagtcatccatgtgaaggatgagtttccaggaaaaggttattaaatattcactgtaacatactggaggaggtgaggaattgcataatacaatcttagaaaacttttttttcccctttctattttttgagacaggatctcactttggcactcaggctggaggacagtggtacaatcaaagctcatggcagcctcgacctccctgggcttgggcaatcctcccacaggtgtgcacctccatagctggctaatttgtgtattttttgtagagatggggtttcaccatgttgcccaggctggtctctaacacttaggctcaagtgatccacctgcctcgtcctcccaagatgctgggattacaggtgtgtgccacaggtgttcatcagaaagctttttctattatttttaccttcttgagtgggtagaacctcagccacatagaaaataaaatgttctggcatgacttatttagctctctggaattacaaagaaggaatgaggtgtgtaaaagagaacctgggtttttgaatcacaaatttagaatttaatcgaaactctgcctcttacttgtttgtagacactgacagtggcctcatgttttttttttttttaatctataaaatggagatatctaacatgttgagcctgggcccacaggcaaagcacaatcctgatgtgagaagtactcagttcatgacaactgttgttctcacatgcatagcataatttcatattcacattggaggacttctcccaaaatatggatgacgttccctactcaaccttgaacttaatcaaaatactcagtttacttaacttcgtattagattctgattccctggaaccatttatcgtgtgccttaccatgcttatattttacttgatcttttgcataccttctaaaactattttagccaatttaaaatttgacagtttgcattaaattataggtttacaatatgctttatccagctatacctgccccaaattctgacagatgcttttgccacctctaaaggaagacccatgttcatagtgatggagtttgtgtggactaaccatgcaaggttgccaaggaaaaatcgctttacgcttccaaggtacacactaagatgaaagtaattttagtccgtgtccagttggattcttggcacatagttatcttctgctagaacaaactaaaacagctacatgccagcaagggagaaaggggaaggaggggcaaagttttgaaatttcatgtaaatttatgctgttcaaaacgacgagttcatgactttgtgtatagagtaagaaatgccttttcttttttgagacagagtcttgctctgtcacccaggctggagtgcagtggcacgatctgggctcactacaacctccgcctcctgggttcaagcaattctctgcctcagcctcccgagtagctgggattacaggtgcctgccaccacacccggctaatttttgtatttttagtagagacggggtttcaccatcatggccaggctggtcttgaactcctgacctagtaatccacctgcctccgcctcccaaagtgctgggattacaggcgtgagccactgcacccagccagaaatgccttctaatctttggtttatcttaattagccaggacacttggagtgcatcccgaagtacctgatcagtggcccctttggaatgtgtaaaactcagctcacttatatccctgcatccgctacagagacagaatccaagctcatatgttccatcttctctggctgtatagtttaaggaatggaaggcaccagaacagatttattgaaatgtttattagctgaagatttatttagacagttgaggaaaacatcagcacccagcagtaaaattggctctcaaagattttcttctcctgtggaaagtcagacctctgaggccccatccaggtagaagtactagtgcaagaagggcctctgctgtccacttgtgtttctgtgatctgtgggaacattgttaacgccacatcttgacctcaaattgtttagctcctggccagacacggtggctcacacctgtaatcccagcactttgagaggctgaggcaggtggatcacctgaggttaggagttcgaggccagcctggtcaacatggtaaaaccccgcctctactaaaaatacaaaaattagctggccgtagtggcgcacgcctgttatcccagctactcgggaggctgaggcaggagaattgcttgaacctgggtggtggaggttgcagtgagccgagattacaccactgcactccagcctgggtgacaagagggaaactccattaaaaaaatgtaattcccgtgtctgccatcttaagtgtaaaggtggctaaattatatagaaaaataagacaatatcatttcccaattacattcctttcctaccgcactctatgatgctagctgagatttttccaaaagaaaatggcttaaataaaaccctaagagaaagaaaaactttaaatccctccaaagctcaaaagtaatagaaacagatgagtttggagtcaggatttctctgtaagattgcctaggctgtgtactgcacatctccaggtgccactgttgacagagattataactacaatgtgaagtgaatggtgccactgacagttatgcaaaccgtccagagcatagccacctgatcctgctgggattcctcttgccagtccatcagcagttccccttgaaagtttcaccaaacatcccttaaatctgccctctcctgcccgtccccagtggaggtcctcatcatttttcacctgcatttttgcaggagctttcttatatccaccttcctccttttctctcagcccatcatctagctacacagtctccagggtaagctttcagaaaggcaatctcttgtctgtaaaacctaagcaggaccaaggccaagtttcttagcctgaaaaatgtgcttttctgactgaactgttcaggcactgactctacatataattatgcttttctaccccctcacactcaacactttgactccagcaatcccaaatccccagatccctaagtgtgctgtgctattttcacgtggctctcagacttggccagtgctgtttccattttggtctttattccccacatctctgcctggggggtagattctaccctgaaaaatgttcttggcacagccttgcaaactcctcctccactcagcctctgcctggatgcccttgattgttccatgtcctcagcataccatgtttgtctttcccagcactgacctaccatgtgtcacccctgcttggctgtaccttccatgaggctaggactatgtgtctcctttgttgactgctgttgccctagcatcttgcacagttccttgcacacaattagagctctataaatgtcaaataaatgtgttataattatatgtttaagatagttgttcaaataaactctaaataaccccaactccaagagtgttagcaagaaatataaattttacagaagaatggttggaggtggggagggtgtccacggagtgagttacctcacacaggcacggaaaaacttgaacctcctaaggacatttttaagctctctttcccattttctctcctggattcccattgcctggtctcatttctctcttctccaccacaccacttcctcaaaaattcctttagggtttgttcttaagcttagataggtttcccattctgaaatacaaaggcctgataattagccaacttaccttgttggggatgtggaaggcaagactctcagactccatgactcaggtatattgcaacaattaggctgaaagttccttgagagtaagtgtccaaatcttttcatgtttggttcccagggctcactacagttgttggtatatcataggcactctaatatcttcttaaagaatcaatatcattaaaatggccataactgcccatagcaatttacagattcaatgctatttctatcaaactatcaaggtcatttttgttttattttttttctttgagatagaatctcgctattgtcacccaggctggagtgcagtggcgcgatctcgactcactgcaacctccgcctcccgggttcaagtaattctcctgcctcagcctcccgagtagctgggattacacgtgcctgccaccacacctggctaatttttgtatttttagtagagacaaggcttcaacatgttggccaggctggtcttgaactcctgacctcaggtgatccacctgccttggcctcccaaagtgcagggattacagcatgagccactgtgcccggcccatggtaatttttcacagaatcagaagaaactattctaaaattcatatagcggccaggcgaggtggctcacgcctgtaatcccagcactttgggagacagaggcaggaggatcatctgaggtcaggagttcgagaccagcctgtccaacatggtgaaaccctgtctctactaaaaatacaaaaatttgccagtcgtgatggcgggcacctgtagtcccagctactcgagaggctgaggcaggagaattgcttgaacccgggaggtggaggttgcagtgagccgagatcacgccactgcactccagcctgggcaacagagtgagactccatctcaaaaaaataaataaaataaaataaaataaaattcatatagaaccaaaaaagagcccaaatagccaaagtaatcctgagcaaaaagaacaaagctggaagcatcacattacccaacttcaaactctactacaaggctatagcaactaaaacagcatggcactgctacaaaaacagacaggtagactaacggaacagaatagacaactcagaaataaagccacacacctacagccatctgaacttggacaaactcaacaatattaagtaatggggaaaggactccctattcaaaaagtagtgctgggataactggctatccatatacagaagaatgaaactagactgctacctatccccatatacaaaaattaaatcaagatggattaaagacttaaatgtaagatctcaaactaaaaaatcctagaagagccaggcgcggtggctcatgcctgtaatcccagcactctgggaggctgaggcggatggatcacctgaggataggagttcgaggccaggctggccaacatggtgaaaccctgtctctactaaaaatacaaaaattagctgggcatggtagtgtgtgcctgtaatctcagctactcgggaggctgagacaggagaatcgcttgagcctgggaggcagagtgagcccagatcgcaccattacactccagcctgggtgacaggagcaagattccatctcaaaaaaagaaaaagaaaaaaaaaatcctagaagaaaacctagtaaatgcccttcttatatcagccttgacaaagaagttatgactaaatcctagaaagcaattgcaacaaaaacaaaaatttacaagtgggatctaattaaactaaagagattctgcacagcaagagaagctatcaagggagtaaacagacagcctacagaatgggagaaaatattcacaaattatgcatctgacaaaggtctaatatccagaatctataaggaacttaaatcaacaagcaaaaaccaaataaccccattaaaaagtaggcaaaggacacgaacagacatgtctcaaaagaagaaatacaagtgaccaacgaacatgaaaaaatcctcatcatcactaatcatgagagaaatgcaaatcaaaagcacagtgagatatcatttcataccagcaagaatgactattaaaaaagtcaaaaaataacagatgttgcaagactgcagagaaaagagaacgtttatacactgttggtaggaatgtaaatacattcaaccactgtggagaacagtttggagatttctcaaagaactgaattgaactaccagtcgacccagcaatgccattattgagtatatgcccaaaggaaaataaattgttctatcaaaaagacaaatacacccatgtgttcatcacagcactattcacaatggcaaagacatgaaaccaaaccaggtgctcatcaatggtggattagattgtgtacatatataccaccatatggtacatatacactgtggaatactatgctgccataaaaaagaatgtaatcatgtattttgcagcaatatggatgtagctagaggccattattctaaacaaactaacacagaaacagaaaccaaataatgcatgttctgacttaaaagtgggagctaaacactgaatacacatgggcataaagatgggaacaatagacagtgggggctattagagaggcaagggctgaaaaactacctattcggtgccctgctcactatctgggtgacagagtcattagcactccaaagctcagcatcacacagtatacctttgtaacaaacctgcacatgtaccccctgattctaaaataaaagtcgaaggaaaacaacaaaaacaaaaagaaataactcctgagttggggtctccatctcttagttcagcctattggcagtcccctttttcaagttctaaggagcctgtactagactactcttcatttagtcccataataatccctctttcaattattttgccttcaaacctatagggaagggattggaaatgaagtttcagtcattccctaagtaaaatgtatatacatattttaattgaaacaggatttcactctgttgcccaggctggagtgcagtggtgtggtcatggctcactgcagcctcaacctcctgggctcaagcaatgcttccatctcatcctcccaagtagctgggactacaggctcgtaaattttttagagaacaaaaacacagtctttagatttaaacatgtgaaagcagaaattttaaaaatacaatgaaagagttggaagacagagttgaaattgttcagaaattacagtaaaaatactaagagataggaaatagtcaacttccaaatgagaagaatcacgaaagagagaacagaaaagatagaaaaaaaattatcaaagaaataattcaagaacatttccttaaagtgaagggcatgagattccaggtatattccacatatagaaaaatatcccatacaaaatcacattgttatgaattttcataacatgagggacaaaaaaagataatataagtaaccagagagggaaaaaataaataaacaaaacaagacaaataggtcatatacaaagtaatattcatcacaatagcttcatagttctcaataataacaaaaagcctttaaaattctggttgaagcagttcagacaatgccatcacccaaaaatatgccattttggcatactgattattattagctgaaagcacttgagaaacagcagactgtacaggaagggctttccaacctcctcttttctacctaaaaacaggctagaaaatttcccatgataaaggtgccctccctctactagaaagagaaaaacatccttatcaccagagatagggaatcaatgccaaaatggatctgaacaaacttattggaataacccttgtcttccactacttatccccaatatagctcttagtaatttccccaagcccctttgtcttgtcatttcttcacaaatttatcatttctttgtctaaaacatatataaacttgtctgctatggtgacttcttcgggtctacatttgcttgtgaggactcccaggtacatgtaaaattgtaataagacttgcgtgcttttctactgttaatctttcctgtgtcagtttaattcttaggcctagctggaaacttaagagggtagaacagaaatttttcctttcctacatggtgaagggacattctgtaataaaactagcctcaacattaaaaaaatgtgatgtaataaaaaacaaaggaaaaagaaaacaaaacagaaaagcaattaataacactaggaaacacgaggcattgtacaggataggaaacgtcctgttatgttacacaatgcaacagtgggtattgttttcatcattattataatgaaaatgctaaatagtgatttgaccaacaatccagtttaaaacatttggaggaatgtgaatgtttatggccagaaaatggggagaaaaatggttaaggaaacaaaatctcatcatctagagtgggaaggagactgataattcctaatatgaaccaaaaactcaaacttttttttttttttttgagatggggtctcgctctgtcgcccaggctggagtacagtggcacgatctcagctcactgcaacctctgcctcccaggttcaagagattctcctgcctcagcctcttcagtatttgggactacagttgcacactatgatgtctggctaatttttgtatttttagtagagatggggtttcgccatgttggccaggctggtctcgaactcctgacctcagatgatcagtccgccttggccccccaaagtgctgggattacagacatgagccattgcacctggcctgaaaactcattttatttagatatgttaagggaaatctcaaaataatcagctagaaaaattgaaaatggttgcccatgaggaggggagaactgttattatttatgtcaaataaaatttgtaggaagccattgatttggactgtgctcctgcactaggccccaatagaccaaaccacatggagtcactcttgctaaagttccacgtcaccaaaccaaagctaagtagtttatcttaccttctgggaaattaggggagagaaataatagacaaatccccaaacaggccagttttagctggcatataaggaagtcctctctgttttaaccgtattaggagagtaactttgaaaagaccgtccactttttggtccctgtttctgttttcttctgccttttctgcctataaagctaacttcctctgcccagctcactggagtaccttctctgaatttttagaagacaggctgccctgatccatgaattgcaaatgaaagccaattagatcatttaactaaattcattgtaattttgtcttttgacatttgtaaacaagccttgtagtacttgctaaacaatgggctgggcgcagtagctcacacctgtaatcctagcactttgggaggctgaggtgggtggatcacctgaggtcaggagttcgagaccagcctggtcaacatggtgaaactccgtctctactaaaaattcaaaagttagatgggcatggtagcatgtgcctgtagtcccagctactcaggaagctgaggcaggagaattgcttgaatctgggaggcagaggttgcagtgagctgagatagtgccactgtactccagcctgggcagcagagcaacactctgtctcaaaaaaaaaaacaaaaacaaaaacaaaaaaacaacttgctaaacaacatatgtttattatttggtaaattataaacaataaattcaaaactttaaaaagaaaacattttattgatagctcactgaatacaaatttataaaatattatttatgcattaagtttcagttacacattttcacccatcattacagatgtcatatggagttgctagagtatgagaagagcttcttcatcccaacagctttcaaagtgaagaggcgactcatgcctgtaatcccagcactttgggaggctgaggcgggtggttcacttgaggtcaggagtttgagaccagcctggccaacatggtgaaacctcgtctctactaaaaatacaaaaattagctgggcgtggtggcgcacacctgtaatcccagctactcaggaggctgaggcaggagaatcacttgagcccgtgaggtggaggttgaagtgagccaagatcatgccactgcactccagcctgggtaacaaagcaagattctgtctcaaaaaaaaaaaaaaaaaaaaagtgaacatctgggtcccccagatctcttcagagatatgtaatgttctcctttttccaactacataactctttaagctgggttttcttcatatactccaatgaaaacaacatattgcaacagatggaatgaagaggcaagtagaagaatccagctgttttctattaagccaaacattacaattgtcagctgaagaattctgagattcataaatttggaaagaaaagcttcatttctcataaaagattgcagcctgcagggtggccattctgacaggctaagaaatgtagtctctggccagaagccaaaaacagacactgagggtcagaagaataagatgggcatttatgctgaataggatggccaaatatacatattcaataaactacagtcatgaatattcatgaaaggagaaacatgcacatgctcaattgagcttcatgcctctccatgggacgcgtgtgcaaaaaatggcagcattagcatgatcagagggtggagttttctgtcctctgatatcaaaaggtgaaacagaggacacagaaaccctcactgcacatcctctgtaaactggccagaaccactccattgtgggcagtctgttatcaggaaggaatgctggttagttgtgcagaaactgcaaaaggaaggggcagtgtcagaccattggttgatatcagcggtgcagctcgtctttccaaagggctggtttctgtttaacctgtaggaaggaaatcctaatggcgtttagcaatggagagggtataacaacacatcatggcaagaactcagttttcaaggtttctctggggtccccttggccaagaggtggtgcatccgtttagtcagctgggggacttaggatttcatttttatttctcagagttttataaaactctaaaataattatttgacagccaggtgggagggggtccctggagaaactccaaccagcctgcctactagggtggagccttgggagtttgcagcagggaggagcctggcgcctcctcttcctatgtgaacctgggattctagcagcctggtgggaagcactgtagcaggagactctggccttgcagaggatccctgttcccctcatccctttatttccccttttcacttaataaaaccctgctttactcaccctttaaaccatctgcaagcctaaatttttgtggctgtgggatagacaagaaccttctctttagctgaactaaggaaaagtcctgcaatgatcccattcttcacaccaaatatgttttgtttcaaaagtatagttatttatcataaatatgtcattaatattgttaaatcaaatttagcctaaagctgcctccttatatagtttaagcttgacctaaaggtttctctgtacttagtgaattgtagcctacccagatgtgtaaacaagactgtgaactactcttgtgacaaacattggattttggccaatcaaaggaggtcaactcttgacactgctttcaaataaggcaaatattgagctgtaaacaatctggctgtttctatacctcacttctgttttctgtacgccacttttctgtctctgtccataaatgttcttccaccacgtggctgtgctggagtctctgaacctactctggctgaggaggctgcccaattctcaaactgttcaattaaactcggttaaatttaatttgtctaaggttttcttttaaccatataaacaagtgagtttatgattgttatgtcttttttcttttcttttttgagacaaggtcccactctgtcccccaggctggaatacagtggcatgatcacggctcactgtagtctcgcactcccaggctcaagcgatcctccatctcagcctcctgagtagttgggagtacaagtgcatgcaaccatgcctggctaattttttttttttttgtattttttgtagagatagggttttgctacattgcccaggttgatctcgaactcctgagctcaagtgatcctcttgcctcagccttccaaagtgctgggaccacaggcatgagtcaccacacccagctattatttctaaattaatgaacagatgaacattttcaaaatttctcagttttaattttaaatatgattaaaaggatagatataacacacaaacaaaagctctatggagtcctctataactcaagaatataaagggtcctgagatttttctttaaagagaaccactgcactctcctggcctactagctctccgcaatccatcctgcttctccccttggcaggagagacctgttctagaccctcaaggacccctcataacatcacctagctattatctaaggaatctttctccatttggacttcccatttttttcttccccctttaaggtccccttattcttttcatctaattttgtgtgccacctgcagagtccttcttcttcttcttctccttctccttctccttcttcttctcagagtcttgttctgttgcccaggctggattgcagtggcacgatctcggctcacttcagcctctgccttctgggttccagtgattctcctgcctcaggctcctgggtagctgggactacaggtacccaccatcatgactggctaatttttttgtatttttagtagagacggggtttcacaatgttagccaggatggtctctatctcctgacctcgtgatccggccgcctcggccttccaaagtgctgggattacaggcatgagccaccgcacccggcgactaatttttttttttttttttttttttgagacggagtctcactctgtcgcccaggccggactgcggactgcagtggcacaatctcggctcactgcaagctccgcttcccgggttcacgccattctcctgcctcagcctcccgagtagctgggactacaggcacccgccaccgcgcctggctaattttttgtatttttagtagagacggggtttcaccttgttagccaggatggtctcgatctcctgacctcatgatccacccgcctcggcctcccaaagtgctgggattacaggcgtgagccaccgcgcccggccggcgactaatttttatatttttagtagagacggggtttcgccatgttggctgggctggtcttgaactcctgacctcaggtgatccgcccgccttggcctcccaaagtgttgggattacaggcatgagccaacgcacccggcctgagtcctgcttcttccagatctggtgcccagtcctgacgccagaaagggggtcttgttccagaccccaagagtgttcttggatcttgcctgggaaagaattcagggtaagtcgcagagtataatgaagttaagatagttaattagaggctactcaattacagagtagggcatcctcagaaaacaagaggaggaaggcgctaccttaaatgtagtgcttgcttatgtaggttgtataagaattgtgtactttattacaaaggcttgtgatcagcttgtgacaggctattggtactgttattttcctgttactattgatttcagcaagaatttatgagtacactattatatttaaggcaaaacctattccttaagaatgctttttgttcttaaaatactgggacatttccataagttctgagtctttagttagcaacattaactcattccctcaatcataaacatctcatgaccaagagtgcccagttcctggggaatgtaacccagcaggtttggctttattcggcctttattcaagatggagtcactctggttaggacacctctgacagtccctggaaatccaaaggaacccttctgtgtggcacagggaatggaagaaagaaagagatgaggcaggaaaatagggtctggaggcagaaaacataagccgattcacacttcagctatgacaggaaatatcctctccatagggcgtatgcctgtaactttacttcatcctcttcatttacataggacgtatcctaagtaaccaatggaatcgtctagagggtatttaaactcccaaaaattctgtaacagggcctttgagcccctatgctcgggcccgctcccacactgtggagtgtactttcattttcaataaatcccttcattccttccttgctttctttgtgctttgtgcattttatctaattctttgttcaagacgccaggaacctggacgccctcccctggtaatagagagatgagcctttcaaatgacctgactcctttatcccagccaggtgtgtgcccgaccctgaaaggaggaatagggagggggacgttcaacccggcctcccgctctgtgttagcagcgtctggatgggtcagggtggaggtgggggtgttctaccctgctatttgctcctagagaagcttctctgcttcactagtctcacagttctaaaggcaagaacagccctagtgggatcttccaaggattttagaaaagaatgaataagggaaaaattaaaatattgcagggtgccataaaaacatcccagtaaaacaaacacctttctagatgctcattggaacgtaaatggagctcagcccccatcccttcacaccagatccagtcttcatctttgtggttcactgccccctcaccactcaggaggaaaaccccagcttctgttctggctccccttctctcacttagaatttttcaccagagtttcagaaagatttgtcaggaccactccatgcccaaggtaaaaagtgtaagtggtacaaaaaggtagaaactcatcagacccccaaagagtgtcatttaaccatacaaagccctgataaactccagggcagaagaaaaagctgcatccttgactccactggggcattcttatgtaaactaagatccaagaactgcatcaggagagaaatcaagagccctggggatgttaggatgagccctagaggtgctaagacaggttatttgaaaaaccaaaaagtagactgagattcccttccttttcagggaagaattgagacctttcctttcttactgttcagagtgggggctgataagggtaattatttcctggagccactggctactgccctgggaaggaaatccgctgggttgggggagggaggaaggcagaaccaggcattaactctccctccactacatccctttcccgtacccctcccctcctctccttccccccactccctgcccccgccctccgaaaatgacacttggcctgagaaaggaggaaggtagaataggtggacacttcccttgtcctgctccaggggtgtctcagtgacaaggagatgtgaaaaaagaaggaatcccaaggctccccttggaaagaagggagatctccaggggctttgggaagtcaggttagtactgggaaggctgaagactcccagtagatagcgttcagggctgcatttggctgcaatcctataaaatacattcttctctaaggttggatacaagcatttagaagactggccattaaaaaaataaacagtattaataatattaataatcatgagtgtcagtagtgttgaattttttctggaatcctttcccaagttgcctaatgcccagagaaggaaaataacagtgtttagtagacataaattataggattagtgcaagtagctattgagatgatgagccaaggcttgtaaattggttttgttttggttttcctaattagatgtttgcgcctatctgtgtatgtgtgtgtgtgtttgtgcgtgtgcatgctcgcatgtggttaatttcatgacttttgcctctggctcttcctgattaaaaaaaatacttaaaatggtaggaagtggcacacacccttgatggacctgtgtttatattaaagaattggcttagtaaatttaactgggacaaggaaactgtgaaggactgtatttttgccattatttaataattcatatattcaaccgttactgattgcctattttgaaccaggccacgtgctaggatacaatggttaacaaacacattccctcccctcaaggaattcatggtctagtgaaatacagagatagaaaagaaatagaaaagtatatcaataaaatgcattgtggaaagagttatggtcatagtgtgtactatatgcttatagaggctgcctttgtataaacatacataagactgctttttaaattataaaaggcagtacataggccaggcgtggtggctcacacctgtaatcccagcactttgggaggccgaggcgggtggatcatctgaggccacgagttcgagaccagcctggccaacatggtgaaaccccatttctactaaaaatacaaaaaaaaaaaaaaaattagccaggtgtggtggtgggcgcctcatcccagctatcaggaggctgaggcgggagaatcacttaaacccagacggaggttacagtgagctgaggtggagccattgcactccagcctaggcaacaagagcaaaactccatctcaaaaaaaaaaaaaaaaaaaaaaaggcagtacatagtacaaactgcttgggttttgttgttgttgttttactgtaccatataggttggagatcattccacctagtagctgaacattttaagcagatcatctggctacaggcagtgagtaggatgaactgggagagtgatgagtgagttagagagttagggagggagggtgctgtcggagtgttaccggaaaggggtcccgatccacaccctaagagagggttcttggatctcgcacaagaaagaattcagggcgagtccatacagtaaagtgaaagcaagtttattaagaaagtagagaaataaaagaatggctactccatagacagagcagccccgagggctgctgttgcccatttttatggttattccttgatgatatgctaaacaaggggtggattattcatgcctccctttttagaccatatagggtaacttcctgacgttgccatggcatttgtaaactgtcatggcgctggtgggggcgtagtagtgaggatgaccagaggtcactctcgtggccatcttagtgttggtaggttttggccggctccaacaccggcttgttgttttatcagcaaggtctttatgacccatattctatgcccacctcctgtctcatcctgtgacttagaatgccttaactgtctgggaatgcagcccagtaggtttcagccttattttacccagctcctatttaagataaagttgctctggttcacacgcctctgacaagaacatcttcatgcctgtgcctggttgagagagggaggcctctgcgctgctgctggatctagtgaagattcactcagtctctcaaattcctctacagtttctctaatggaagagaaaagtggtgttattgctgctagggagcaacctagaagttattttatttatgccatagatatggtgggctaagcactgtgccaacgttcaataagtcactgcagattctccataaattattgtgacaagtacaattgtttgtaaggcttagatctaggtgtgtaagtccaaagaagggtgtgaagcatctgtatttctgttatgtagttattaggaaaaaggatgttggggccttaaaatggccatttttaacatttccaaacttgtgttgaattctaagattttataattgtatgtttccagttgagaagagctttgatattggtagctctaaataaataaataccgttgacctggaagagaaggtaaagtttagggagaggcctttttttagctttatatttaaacattttttataaatgtgattcatgggccaggcctggtggctcacacctgtaatcccagcacttttggaggccaatgcaggtggatcacttgaggctaggagttcgagagcagcctggccaacatggtaaaaccccatctctactaaaaattagccaggtgtggtagcacacacctgtaatcccagctactcaggaggctgaggcaggggaatcacttgaacccaggaggcgaaggttgcagtgagccgagattgtgccactgcactccagcctgggtgacagagtcagactccgtctcaaaagcaaaacaaaacaaaatgttattcataatgctcgggttgtaactatagtacttatctagcaaaagcttgcttttttttttttggctttgactaattgaaactgcaagagcttactggcagagtggtgtactggtcaatatttaaccaattctccaaaggggaaaaaccctgatttgtatgtaggatttgtcagtttccatggtataaatagtcttcccacagctggtagggtgaccaacttgttctggtttgccaggggctttcccatttttaggcctgaaagtcctgaatcccagaaaattcctcattccccaggaaatagcttgattggtcaccctaatggctggttgcaagctcccgatatgacagaactggacgagaagttgggcagagatgtgcacatggtaccagcctatgccaggagcagcggcctccagcaccccactgtcagggagtccttggcccagtagaggatggttagcagggcccggctgttgttcatattagctctcaaatttaccaccaaccctgtattagtttcctggagctgctgtaacaaagttccacaaacgggggtcttaaacacagaaatctattatctcacagttctggagggcagaaatagaaaattaaggtatgagcaggactctgctcttttgatggctctagataatccgttgtatgtcttttcctcagcttctggtttcacaggtaatctttggcgatccttgacttgcatctgtgtaactccagtctctacctccatcatcctgtggcattcttctttatttttctttctttttttcttttcgagacagagtttcgctctgttacccaggctggagtgcagtggcgtgatctcggctcactgcaacctctgcctcccaggttcaagcgattctcttgcctctggctcccgagtagctgagattacaggtgtgcgccaccacacccagctaatttttgcatttttagtagaggcggggtttcaccatgctggccaggctggtctcgggctcccgacctcaggtcatctccctgccttggccttctaaagtgctgggattacaagcgtgagccactgcactcggcccatggcattcttcttttggtgcctttgtcttcactgacttcttgtaaggaaatcagtcgtattggattagaggcctaccttattccagtatgatctcattgtcttaatttaactaaaacatctgcaacaaccttatttctaaatgaggtcacattctgaggtattagggtttagtacttcaacatatcttttttttttttttgagacagggtctcattctgtcactcaggctggagtgcagtggtgcaatcacacagctcactgtaactttgaactcctgggctcgagcagtcctcctatctcagcctcccagataggtaagattacaggtacatatcaccatgcctagctaatttttcaaattttttataggggctgggcccagtggctcacaccttgtaatccctgtaatcccaacactttggtaggctgaggcgggcggatcacttgaggtcaagagtttgagaccagcctggccaacatggtaaaatcccatctctactaaaaaaaatacaaaaattagccggatgtggtggtgggtacctatcataccagctactcacaaggctgaggccggaaaatccctggaacccgaggggcggagatcgcagtgaaccgagatcacgccatgcactccagcctgggtgacagagcaagacataaccttaaaaaagaaaaaaaaaaatgtagagatgaagtcttgctgtgttgcccaggctagtctcaaatgcctgggctcaagcaatccttctgcctcagtatcccaaagtgctaggattacaggcatgaggcactgcaccaggcctacatcctcttttttttttttttttttttttttttttgagatagagtcttgctctgtctcccaggctggagtgcagtggcacgacctcggctcactgcaacttccacctcctgggttcaagtgattcttctgcctcagcctccagagtagctaagactacaggcataatatctctcttagatatgacaaataatatcacagagtgtacacccactgtgatgttaggagtaatacctccctatgatattacaagtaatactgcctttagatactacaaataatatcacagggtgtacatctactgtgatattaggagtaatacctcccttagatattacaaataatatcacagggtatacacccacggtgatattaggagtaatatctctcttaagcgatcctcccatctcagcctcacagaattaaaggaattacaggaagagctgctatacctggctggatctatgttttaaaaatataacccagataaccctgtggtcagtgtctaagatgaattggattagaccaagggagaaaaactaaagatgggaatactagtttgggactttgcttgcttgcttgctctcatttagaaaacatttagtagttctacaatgctcaggcactgttctgggagtcacaaatataggattgaataaagtaaataaagcacttgctctcctggagctcacttttcactgggggaatgcagatagtagacacatacatctatagtatcagtaagtgctaatagaaaaatgaagcaggtgagatggatcatgctgagtagaatgtatcttcttttccttccttccttccttccctccctccttccttctttccttccttctttctttccttcctttcttcttttctctttcttcctttctctctctttctttgctttttattgtcttaaaatgtacataacataaaatttaccctcttaaccatttttaagaatacaattcaaggccgggcatggtggctcacacctataatcccagcattttgggaggctgaggcaggcggatcatgaggtcaggagtttgaggccagtctggccaatatgatgaaaccccatctctactaaaaaatacaaaaattagccaggcttggtggcacatgcctgtagtcccagctacccgggaggctgaggcaggagaatagctggaacctgggaggcagaggttgcagtgagctgagatcgcaccactgcactcctgcctggacaagagagcaagactctgtctcaaaaataaataaataaataaataataataataataataatacaattcagtagccttaagtacatttgcattgttatgcagccatcaccaccatccatctccagaatttttttgagtggagctctttttaatagagtagttgaaggcctctgtgacacagtagcatctgagcagaagcttgaatgaagtgagaaaagaatccttttgcatagtttaggggaagtatgttccattcctggtcctggaaatagttaagactatcacaatagtgcaggagaaagatgatacaatacagtttgtgtagctgaaaccccgtcttcagaatgtaaaggagaacagatgggaagtcatgttcctcccagaagtaattcatgtagcagagaagccaatgcagatccacgagacagacaattcagtgctctgcacaagaactgtgctttaagcatggagaggatttttgtatctgtcctgggatcctacatcaaacagcatgtggtgattgtgaacacaaacgtacaagactgtgaaccctaccaagtttccttcttccattagatatgaataaggagtcatgagtttcctttggaatgtcctttagcctgttggtacatgttttgcctgtgacgaatgcagttactcataaatcattgagcacattgggtacagagggcaaaagataaattcctgtatttcctctattcggtcaacagaaatacctctaggccataatccattcatccaatctaataattttgccatccataaaaccttcaggtgttctgaattcaacatctttttttttttttttttttttttttgagacagagtcttgctctgtcacccaggctggagtgcaatggcaggatctcggcttactgcaacctccgcctcccagattcaagcgattctcctgcctcagcctcccgagtagctgggattacaggtgcccgccaccacgcccagctaattttttgtattttcagtagagacggggtgtcaccatgttggccaggctggtctcgaactcttgacctcaggcaatccacccgcctcagcctcccaaagtgctgggattacaggcgtgagccaccatgcctggctgaattcgacatcttgcacctaattcctgttcagttaaagacccaaatcatgatctctgacttacctggatatttgaaagattaacttgctgtggtgataccatactagagtcacaaaatcaagccctaccctgccacagccacctaaaggaaattaggtgatatacaaaagaaattgaccatattgttgtccttttagtgactctcctaattttcttcccctgaaaacttacagagaaatttgagtatgtttgccttaggtggatgcttgtttttttattgatatgaaaagcagtaagaggaaatggagttttttggcctgttaaggaagggcagccactgtaaacacagttgagtgcaaattcacagtgttagaatgttgaagtgtatataatgattttgcaaaattttctacaaggctgatacagtatccaatcaggactaggattagatatattgtcatgtatgtttgcgcaggaaatgcagagactctaaggtgctacaactgcaatttgacatgtgggatagttcactggtaactgttgatctccctgaggtttaagtttacagttccacagctctttatctgaaactcttgggctatgtgttatggaatttagaattttttccgaaatacgttgcatatattgtatattatgacatgatacctccaagaaagacttggagtcacatcctataaacaaacacatgaatatatcccagtgaaatgtatgactatttttactaaaacaaatgagaatcataaatagacttacattacttcaggtcagattttgctgccgaattagtttgggcatcgaacttttggtttcagagacaaaactgtgaaattttagattatattatggggttgtggacccatgtaaccctcctctccgtaattcctaaaagcaagcaattgcatcaaccagtctcatgagtagctgcgattctagaaatcaagaatccggatctgaaattagccgggcatggtggcaggcacttgtaatcccagctactggggaggctgaggcaggagaatcgcttgaacccaggaggaaactgcagtgagctgagatcgtgctgctgcactccagcctgggcaacagagtgagactctgtctcaaaaaaaaaaaaaaaaaaaaaaaaagaatccagatctgggcaggaccgaattgctgacatgcccccggtatagcagagacgttttgcctacatgttacacacctgagtaatagttgtcagcagctgatgaagaagatgaatgtgctcttaatgtccatctttgatttccagtcattttgcttctgggtcttggcttcctgaggaaagaagtctccagtaggtgaatgcagtgatatggagaatactttcttctggctgcatgcagtaactcacacctgtaatcccagcacattgggaggctgaggtgggcagtgcacttgaggttgggagttcgagaccagcctggccaacatggcaaaaccccgtctctactgaaaatacaaaaattagctgggcgtggtgacagacacctgtcatcccagctactcggtaggctgaggcatgagaatcacttgaacttgggaggtagaggttgcagtgagccgagatcgtgcctctgcactccagctgggcaacacagcgagactctgtctcaaaaaaaaaaaagtgtgtgagagagagtactttcttcctgtttcctcataggccagttctctctggcatgtgagtttaacatcagtcacctccttcacacacagcgggtgcattcgtaataggaggtccttagctgggagtttttatggcacatcagtggggcgtgaaaacaccacataggagctaatatatctttgctggctgctttctccggctccgcagcagacagaaaccctatgaatcatatccaggggtcaggtgcaggcaacagacaactaatatctcccaagtgagttgaaaaggatcttgttacccagcatcctaaggaggttgtagccttgggaaccacaggcaagaataattaactcagctcctcggttagtgcctcttcagttcgagatggaatttatttgcaggcatggctccttaatatgccaaacccatgctcaagacatactccttctcctggaaggttaacgtggctcctgtggctgttccatccctgaggaaaagtgaggaccatgctctccaaacaggccatgtgctggactacctctgtttctgtctcctgggattccaatcagcaagtgagcaacgaagcaacccagacagtgtggttcataggatggctgggtaagtggctgtttgttttttccttactgtggatatgtatcagtgaaggaatctgtagaacattcttgatgggaacatttagtcatatcaagtcaataaattaatgtttaggctgggcgcagtggctcacgcctgtaatcccaacaccttgggaggccaaggcgggcagatcatctgaggtcaggagttcaagaccagcctggccaacatggtaaaatcccgtctctactaaaaatacaaaaattagctgggtgtggtggtgcatacttgtagtcccagctactctggaggctgaggcaagagaattgcctgaacctgggagatggaggttgcagtgagctaagagtgcaccattgcactctagcctgggcaacagagtgagactctgtcaaaaaaaaattaaaaaaaaagaaaaatcattattttatttttgacttattattaatataaataattatatcttggccgggcatagtgtctcatgcctataatcccagcactttgggaggccagggcaggcagatcacttgagccaagaagtttaagaccagcctgggcaacacggtgaaaccctgtctctacaaaaaatataaaaaattagctgggagtggtcagcttgcctgcagccctagctacctgggaggctgaggtgggaggatcacctcggcccaggaggtagaggctgcagtgagccatgattgtaccactgcactccagcctgggtgatagagtgatgagaccctgtctcaaaaaaaaaaaaaaaaaaaaaaagaaagaaagaaagaaaaaagaaaggaaaagaaatcatatattggtgaggagacaattcaacacatattttttattgaacacatactatgtgtcagggtaccagatataagctctatctacaaggattttaggagctggagtatgtgtatggggggatgtatgagtgtgtataacaaagacgactcctggggaagaagaggaagacaagccccagaggtatactgcataggcataatacacaacaggctagcaaagaagcaaaccatgggtatggtagagagaatcagaggatacattggggaccatgtctagtgagtgaggtcaggagagacttcaataatctgagtgaatttagacatgggccttgaaaagtggacaaggtttgttgttgttgttgttgttgttgttgttgttgttgttgttgttgtttttgagatggagtctcattctgtcgcccaggctggagtgcagtggtgcgatctcggctcactgcaagctccgcctcccaggttcataacattctcctgcctcagcttcccgagtagctgggactacaggcgcccgccaccacgcccagctacttttttatatttttagtagagacggggtttcaccgtgttagtctggatggtctcgatctcctgaccttgtgatccacccaccttggcctcccaaagtgctgggattacaggcgtgaaccactgcggccggcctaaatttgttttaaaagtacgcataggaaggctgggggctgtggcttatgcctgtaatcacagcactttgggaggccaagacaggcagatcacgaggtcaggagatcgagaccatcctggctaacacagtgaaaccccgtctctccaaaaaaacaaaaaattatccaggcctagtggcacacgcctgtagtcccagctacttgggaggctgaggcaggagaatcgcttgaatctgggaggtggagggtgcagtgagccactgcactccagcctgggtgacagagcaaactaggtctcaaaaaaaaaaaaaaaaaaaagtacatgtgggggacaggtgcagtgtctcagcctgtaatcaatcccagcactttgggaggctgaggtgggtggatcacttgaggtcaggagttcaagaccagcctggccaacatggagaaaccccatctctactaaaaatacaaaaattcgctgggcgtggtggcgcacgtctgtagtcccagctactgggaagactaaagtgagagaactgcttgagcccagaggtcgaggctgtggtgagcggtgatttcaccacttcagtctagcctgggtgacagagagagaccctgtctcatataaacaaataaataaaag

SEQ ID NO: 757 - DNA, 94898 bp, Homo sapiens
ccaagatcatgccactgcactccagtgcagtgcactccagtttgggtgacacagcaagactctgtaataataacaaaaataataataataataatttccatttatctgctgagattcactactgctaacttatttgaccataaaaatatcattaccaaatttttctttaagttctttaactactttatagtggctgcttgaatatccttatctgccaactgcagtatctggaacttctcaggttttgcctgtttctattgactgtattaaaaaaatacatacccacatatacaaatatatatgtatatgtatatatatttatcctattatcttatactgttttgtgacttttttaaacaatgtacaggacattttgtatatcaatgacattctgatttgttatattcttctgattgattcctgttgatttttattatcaatattatgagttaaattatcgataaattaatcttggggaggattcattttatactctttcaggttggtcaatctcattttcgtccttagagtaaatccattgttatagaacagagaaaagttatggtccttctagggttttgaaggaatgtcagagaggtttatgaagaccccctcacttattggaattcaaacttcaaactctgtgtctcctgcagtgagtggcagctgaaatatttgctcaactttttaagtctctcaatttttgctttcatctgggcttcttgaagtcttttctccttttccacacaaaagcaaacaaaatttaaaggaagtttacatacagatgtgaagtcttatacttctatctgtgattttcctgctcaagtgagcagctctggtagccccaaagtttcctcttaaacctcaagccaataagattgctgccttctgctgattctaaccatcctgcatttttgggatggaaggacttcctggatgttggactttctgtgctaaaaactgggaagtttccacaggggaaaagccacaaaatcttagatctcatccaattcaattcaatttatttatttatttatttatttatttatttatttatttagacagagttttgctattgtcgcccaggctggagtgcaatagcatgatctcagctcactgcaatctccccttcccaggttcaagcgttgctcttgcctcagcctcccaagtagctgggacgacaggcacgcaccactacgcccagctaattttttgtatttttacgagagatggggtttcaccatgttggccaggctggtgttgaacctcagggtattcgcccacctcggcctctcaaagcgctgggattacaggcgtgagccacctcacccagcctcaatttcgtctcttattggccatatcgtcacactttctgcctcctttcagtagcatcctactacttcacatatttgcttatttaatattttgtccaatagtaataattattacctacaaaatggtcaactttgtcactaccagaagtagaatataaatgatatattttacttttccaagtaatgagagatttgatatcaacaaccaaacttgtccaacttataacctcataattcacttctgggtgtagtaactatcacaaaaatagtagtaataatacaatgtcaaattataagcaaaaaaaaaaaaaactttattcatagagaattgacttgtaaaacaattttccaacatattggcaaggcctgtttggatgagtggatttgggtggtagttttcttcttttactttccaatgtttttcaaatgttagtataattaaataaatacacacacatatacacatatatgcagcaacttggcatactgaggattttaaactgaaggaaattgagaagaccacagaagcaagaagatctttctgaccttcttctgcaccccttctctcctgaatcaggccatggaaactatagagaatttccttcgctccttttcccctgcagtgggccataaaacctagttgaccttccactgaaaataggtcataaggccctcaaccaagggatgtcctccctgtgcctggagaaaaacaatgtctttatctctgaagacacagagacatggagaagaatctgaactagcaggcctctctgagttcccccatttatgccctttagatcatatctgtttttgtccagtaatgtttctgcacaactatccacttctttatttgatttagcataaaatatacaattttccctgtttcttttgagctttcatttctaaaggctcccatgtcacatagaatttgtatgaaataaatatttatgcctttctattgttaatctgtcatttgttatagggatctcagacataaaatttgtatcggataggaaaatatattatatatttcctctataatatatacatatatactatgtgcaatgagaaggtagcatcatgtttatcaaataaaggttactttattgattataagtataatcttaaaaaggggcaagagtttacctcaaagttgataacaaaagtaattactagatctcttataaacaccaatgaatataacacatgttgtaaaatcttaggaaatatattaaaatacttttttttcagacagcagtcagcaaataagaaagatccacagaggcatactgacacctactagctatgaatggcacaattaaatttgtactcagatactataaatagtaaaattacctctatggtttctcttaatatgctggacaaaattccatcattcaatagcttctaatttataggggccattataagactgataagggattagtatatgaatcagtactttgtgaatgtgacagcattcattttcacagcttcgttatgcttgacaataaataaactcacttgagaaacttaacacaaaaaaattggaaatgtcatgtatggtagatattttatatagtgtgcaaaaattgcaaccttgtggcctggatgcctacttggtttggcctcctttgcattttaaaaattagaacattttattctgcaattcttatttccatttcttctggcaattctgactggaactgaacagtggcagctccatttggatggagtattggcacttcagtgtgcatggtttccaccactttactgattcataaactgccaatgtcttccatttatctcacttgcttgggttttgtaggcacttaagtaaatacacacatacacacacacacacacacacacacacacacatcttagcctacaaaagtgtgattgaataatttcactaagaaaatatatagagctataaacaaactaggctctttggaataaaaattgtgaacataagaaggggcatgacattagacagtcatagtgatgtagtcctatagtcccagctacttaggaggttgaagtaggaggattgcttcagcccacgagttcgaggctgcagtgagctatgattgtcccactgtactccaggctgggtcacagagcaagaccttgtcactaaattaaataaataaacaaataagtaaaaatcaaagaaggggaaaataccttcacggtgcagcaaagaacaagagcattatataaaaaggggattatgtttgctctgcctccattttagtcacaatggaaagaagtcaaaactgcatttgaatgtggttttcattggatttttgtctaaatgccttaagaataactctgcctaaggcagaattatgaagccatgcaggattccaggtgggtctgtcaggacttttttgcttcattgtcaggatgcatctcctcagcccatgtgatgggcagcagccactggtaattctttctgctttccttggatatactttagtgttagtgatggagtgtggacctgattttctcatgttctattcctatgtctcctagactccttacccaagttccattcctggaagacttttttcttgcaaaaaaggcacttattttgaaacaactccttgtcactttccacaaagagctaagattgttcctcatcactactactgcttcctgcatactttcaatgtggtatcttgactttaaagaaccatgaaacactcccccactttatttttcatgattaatgaaagggatttcctctgtggtggatgaactggtttggcataaagggggtatcttctacatattagtatctatagtaacattctaggcaagaaagaagcatactaataccactcatccaaactaaaaactttcgggattattaccaagaacaaaaaatcaaccccccacatgacaaacagaaatccctttgcattgttaaatgacctcctgattatacccctctgcccacccttccttcaaaaaacagccctcctattttgtgatgtgtaatctttattcaagcagctatccccacgcaattacatttgtcaaacttcaagcagttttgtgtctgtgcattttcactggggttggagaactgacaagggaggaatgaatcttgagtagcatagaatttctccatgtcctttaattctatcaatgttttcttctctcattcaaattgaattcaccaaatctgtctgcctacaggatgacttactgagacactcacacctcccccactgtctgctcccccagctctaacaatgcaaccatgatttctaagactgtacgagtttaaaataaggattcttggcagatctgacgaccacaaaccttctgtcattgatgatgtagcttctgggcttgctaaagcatctcttgtccccatgaatgccagtccttgcatgctggtgtgtgcagtaaagggttaaaaagctttggaaagacaccacgcatgtgttaattcgtgctgcagcagcgtgcatcacttccactttgacctcatagttaatctgcgtgatagttaatcacgcagagtctctagtgatttttttcctatttattttaaatacacacacccacagggctctgccccctgtaaaagaaaaaaaatcaaaacaaacaaataaataaccccaaagagatggacccaggggagaacgcgtaagtgtgaggggcatgagtatacacgagtgtgcgtgtctttccctctcccttatttgtctccgtatgagtctctccttgtaccctccccctgcctcgatgatattactcccccagacttggaagccgctgccagagtgacgctttgatggtatctgcaagcgtttttgctgatcttatctctgccccctgaatattaattccctaatctggtagcaatccatctccccagtgaaggacctactagaggcaggtggggggagccaccatcagatcataagcataagaataatacaaaggggagggattcttctgcaaccaagaggcaagaggcgagagaaggaaaaaaaaaaaagcgatgagttcgccaaatatatggagcacaggaagctcagtctactcgactcctgtattttcacagaaaatgacggtgtggattctgctcctgctgtcgctctaccctgggtaagatgtgccctttttggcgtcgttttgttctgaagaggtggggggaaggtgtggggaggggtaactcgggagaccacccagatttaaaacactctcctaggatgtgcggctttacaatttaggagagagcgaatatatggggcggggactggagggaggaaagtggaaggtcactttcgttaatgtattcatttattggattttattttattttttgtttggttttagagtggaaaaggtaacctcataaagactaaatatttagggagtagcattttgacattattgcaatctgatatcggagtgggctgtgctgatacacgccggcatttgaggccgtgttgcaagcattttgggtgggggtctgatggagaaatttacaaatgggtcctggcgcacaccggagagatatgtgtgagggagctggggggaggggcggcgggcggccctgttcctgtgtactaaggcatcgcatgcttctgcacctggcattcttaaggtcagtcagccaggttttgcatccagtcccattgacccaacagccaactacccgtgtgcaaacatggttcagcaccagggacagcagtcctggtgagggccaaagggatagaggcttgtctaacctgatagaacgtctctaaatatactcagggcatccacagagtcagagagaaggccaatgaagccacggggcactaatgaaatatacagatcctgatctgtttacctctactccctccttgatatgggaaggggactattgggcatagggtggagaacgtagttaaatgattgcataggggaatatacgtctggaaaagagttggccttgctgcagtgttggaaaatatgctgaaccaggtgaatgtgatgccataatcgtgaagtacacattaatgttttaaaaccttgctgcactgaatagaaaaaaaaaggtaaggctggagactggactcctgaaaaccctgagaatgtgtatgccctgaagtgcccggcatttaaatttacttgaactttcctgagctaagagtattagaggagcaaccatccatgcagcctagctgactattcgtctacctacctaagcaccttccccgctctccaagctttctaactaggaccaaagccatgttagaggtccactatttacattacttgcattcttctatactttcattttgaaataaagttctataaatatacctctcatatcctaccaatataaagaaagacacaaacaaaaactagctatagaaaatatcaagacagtgccctaacatttttttgtgggtcgacaatcttacatggtagttgtaacaaaagcagctgaaaaggatggaggttaaactagtttttaaaaaaattattgaaactaggcaacttctctggccccctcttctgtaagatgggtaataagacagatagatttatgataaagagacccaggcaaaacaaagagtgaaagcctcactttggagtttctaaacagagagagggtctgcttaactcttccagcactttttgtaccttactaatttactataaaaatagaatgtattttcactaggattataacatttcagtagctttctcagaatatgagagggccttttactggaaacagtcttatatgtaatacaatttggtgaaatcctgaaaaaagtaattttttgattcaaaatttgaattcatttttatacttaaggttgtggatagctattaatttgtttcggaaattagaaaacagttacttactaaaagaaaatatctttcccctatttctaccattaatgaaacctgtggattaaaatctagacaagacacaagggaatgtctttctttttgactcatctccatcttagtaaacagttgtctaacttaatagataaaatattatgtattttctctccagtaaccctattttaacctaaacatgtttaactttactatagtttataagaaaatagtatttaagatgtcttcttgttgccacagccccaccttttccatttcaatgtcttatacaaagtaaatttgatgatacattttaattttcaatttgtaccagactatcttagatgagttttttaaaagagctctataaatatgagctatctgtaatggaaactcccaaaagtggtaatttttacattctctcatagtgacagagaatggagtcattgctgtttggtgcagagaatgtgatcagagtttcagtctgctgcaatcccataaaaaaagtcatttgaattgttgagtaggactggaggtaaatagaagctttgatttataaagttgatcctgaggaaggacaataaataactgggaaatatttgagacatgaggagtccataggaagtggtacttatgaaataatacttttgtggtagacagtagtagcagaaccacctagaaagttaaagataaataaaaaaaaaattggttttttatttatgtaactcaaaagattgttttcgccctcattaagtgacaaaatttattagtctatgtctttacaaaagtgaaacaaagagaaaaataaagcatcgtagtgagaatattaataactaatatctcttcttataagtgaaatagttaatttctgaaacccaaaatttttgaaacattcacatagcttgtgctgtcataaaaaataacctggggaacttactaaaatggagattcctacactatacactgaatgcttttgaatcattatgtctggggagaaaaggaatattcaacaggagtattttcaacaagtaccctagacctcactttgaagaaaagtggtctatacttttctgatttccaaaagtttatcatcatatttaatatttaaaggtgttttgattattcatactttattattcagttgggcagaatgaatcaatttaacttcaatcttttatttgtatgtaaatcattgagaatattatacatataacaaagcataaggaatagtataaagaatacaccaacattagttataagaagatattggctccaaaaaaataaaacatatatacatatataaatgtgtatgtgattatattgaaaaactatatatataccacatatatatgcatagagattttaaaacaaatcttataactttataaactttttcagtgtaattttattccatctcagagtaaaaataccctaaagggaaaaaaatatatagaaaaacataaaaaataatttagagtaaataagaataactgaaacataaaatgtttttattttattagaataaaacaagattttgtaatatacttagagtgacaaataattatttttcaaggataaattgagcagaaataaaatggactgaatttttgatgatctgtctaaactttacttttaagtgctcattctgaatttttaaaaagaaaatacagttaatggtttatacatattttctatttttatctgctacctaaacaaagatgcttttgatgatgtttcttatgagctgctaaagtgtttttattccataattttattttacatgtttctttaactggctaggactatgcatgtagaaaaaaatattttgattcttcaatatacccttatttgtttacagaattaatctctacagacaagcttgtcatttcctgtctttctaaatgccccatctggtatccaccagaaaaatctttatttcctcagcgtactaaattgctttagttgtagacaaaacccttcaaatagtctatcctgaggtagactgggtagactatttgaatggtagggactctacctttcaaattcaaaaggttaccctgaggccattaacctgaaaaaaaaaataaagaaaaacagaacgtaaatactcatcacccagtatttcccagaacccagtcacccactactacctaaacaaaacacctgaattgtaggcagaagttgaaaattggcttgtaatttaaataatgagttatataaatgtctctttcacgtcctagattcatttagatcaggtaatttcctcaaaataattgatttaaagcatatatattttaatgatagaggtctctgttctatacttcaaaaaattgtttcattccaaggatttccgttcagattggaaggaagttaagactaattttagatactgtatctctttgctataaatattatgttactagggtcctggctacctccctactacaatttcccagccattccaagacaggcttttcagtttaggtacaagtaggctttactggaattatacatacttatcgttctccaaacacttctgccaaattggctgattaagaagattgaattataatgaaaagttataatcagagtagtttggagattgtttgaccactgtgggtgtcggcacaattcaaatgcttaaagattcatgatttcaattgagatgaatattccagatgtgatactttattcaggtagacatgcagaagacaatgcgtctttctgctgccaggggatcagacacctatgtgacctcttcaaagccagaaaccaaatagccataagataatatcaattttatgcgctgcttgtgtcatgttatacatacacactgaatcaaataatacacacaaacacaaacacacatacacagacacaatcctgtgactccgcaaagtatttatcatcaaccacatttgagagactaggaaaccaagattatagatagattaaatgacttacttaaacataatagattagaagcaacatactataataagtatgaatgtggatataagtaaacatgtatacatatataatgatgtttatatatgtgtatacatatgaatcataataacttgggtttttagatctgtcaatattatcttatgtgtttttttaatcagtttggggtctcaatccatcaatagtgttcctagaagtgtaacaggtagactggatgatctataagttatttactagttttaatattcatgattctctcattctgtcttcagttaatagaatctacaacagatactttacatccattcagcccactgaataaatcaaaatgtcgaatctatagaaggacatggtttaagatactcagtctccaccaataacatcactattacattatgtttttttgttttgattgaaaggtctagacagaaatgcttagcagcagtctgaaattaggttttttttttaatataagagcatattaaatggaattatttagagctgaacaaatattatgtttagaatatatatttcctcattgtttgtgtctatgtaagtaaagcatagtttaatctgcacttaattattcatccagaaacttaactatagcatgtcattccatttttaaagaggagatcttgctttttattgagcaaatctataggaaacttgctcaatgttgtcctccagttttcttacaaaaattcttagaaaagtggaagacaaaagtgaagcaacgatactcaatattaaagtagaaataatattacaacttcatatttggatatgtatagttttaatatatagatattcaaagatgacatatttttaatcaccccaatcatactagcaactggttaattaatgttactatgtggtaacaacagaaaagctcttatgttttaatttctagagtaataagaagctataatttctagaaagtaatagggattttacagttttacagaaacgtttgcattcacagttttattctctcagtagactcatgaattagatgaaaaagataatattttcttctgacaactgtagaaaatgagatattgagagattaagggacttcttcaaggatcctttactattggctgtagaacagagttaagaccccctccttgaattcatagcgcaatacatcacattgcacaagtatagtcaccccccggctttttttatctaaatgtaagaaaatactttggttgtttagagatgtaaaagtcctctctaacttgcattactggggagggttatttcccattcatttgtcccccatactagagaataaatttcctttaaaaaaggaaataaaaagctcctttcaagttacacattagtggtttagggtaaaaataaaacttaactctaaatcatattaatccctacagtattatgatataagagcacaaactatggcaataattctatattattataaaaatcattgtataactctgcatagataaaataccatgtaaatgctaaataagtagcactgatacaacactctccacccattcataaagaaaaccatgtaagtaccaaacaacataatcgtggagaaaacaagggttgttttaaagcaaagatcctttgttataattgaaaccctgccatgaacccaagtgttgctgtaaagccaaagtctacctagtaagacaaatatacagtgtgtatttgcttaaatacatctaaagaaattgcagaacttactgtatatttatataaataaaatggcaaaaacaagctgaatataatatgtcattataatcttgataggaaaaaatgattgatgctttcacgtgttctttttttgctggttatcagttcttttttataaattgcttttgaaaacacacttgagatacataattgaggaaagcaactctaaacataaaagtagaaattaatgtataatttcttaattaatttatgaaacgaatatcatttgagccaattctgggatttttgcattatagagaatacaggccaaatttccccaggaattttctaaccactcttgtttagagaatgctaagaggttgtaaaagtttttgtatttgtagtagagataagaattggcctcttagtctttttatggtggacatttaagagtgaattacctgatttccgtaggcagaagtggagctacctcccactatggtaggagataagtaattgaacagttccttctattgctaaacaaataaccctcttccacaagtactcctctgtcatttaatccttaaacttctatcacctagctgcgaggagggggaaggaaagaaaaggcactgagggttgttttactaatattttatagaaagttctattccttcttagcagtgtaccacatctatattaaatgagaatatgatgtttgtcatcttcttttctcagtatcgggaaattagtcatgataacatagggaaaattttgtataacattgtgttccctgtgcaatgtgtttcacatatccactgattaactcacctttttgaagtttttgctcagagctcaccttctcaataaagcctgcacctaccactcagtgtaatattgcaaactccactccaccttgtactcctaagtcctctaatcctctctgctttactttgccctagtacttacttatagcctttagtaattaatcagaaaaaaaaatgttatttattggtttattctttttactttttgattttctatctctctcagctagaagccaggacccacaacagaagagatgccattgatacaactcacctttcatagcatgcctagcctctaacggatgttcaataattatatgcttaattaagtaataaaaattgcactcattttcccccaaattttattcttttcctaaaaaggaaatattttcaactttttttacagtatctcactgtaagtcagcatatatggctgtcaggaaaaaaaaataaaagaaaatgaacaaacaaaccgtttccacagcatagtatacttgttaatagcataagctcttcagacacacttgatcagggttcagtttgatgaccctcagtcaaccagtttcactctgtcttttcatattaaaaaaggaagatttgggaagctgaggcaggaggatcgcttgtgcccaggcattccaaactggcctgggcaacatggtgtgaccctatttcaagaaaaaaaaaaaaattaactgggtatggtagtgcacgcctgtggtcctagcttcttgggaggctaattcaggaggatcacttcagcccaggagttcaaggctgcagtgagccatgtttgcaccactgtactcaagcctgggtgacagagtgagaccccgtctcaaataaaaaggaagataataatttttcttaagtttattttgagtaggaattgatataatacatattaaggggcacatagttagtgacctttacatggtgttatttttgttactcttattgttattgtttaatacaggacattatttatcccctgatatatcaccagaggcacaagtacgctccccatccctgctaaactctgaactttgtgggagtgtagaagagggatttttttaaatacaacttttctaattcttcagtttcttgctttgacttgtatgagataagcaaattgggtagaggtccctgaattttgagaatgcctgtgtaaacattgaacttagtaatatctctaacaatgtgaaatagcttctatttaaatgagaaaatacatcctgtcatacaagactccttcctgaagataattttgtcactgtatgtaaagaaggatattttcccaaagacattgtaaaacattatccctgagttgctaggcaaatttattcaactcattattcagagcaaactcaggttgctactcttgatggtcaggtctatattggacagcatgaagtggaagcagtggttgtggaatctggagagtaatgaggaaggaaacaatctaagctggtattttgctattcagggtcatgactaacttttcatttttctttgtgcctcatacatctgatcatataacaaaattcaacatcatctgtcacctgggtcactacaacactgcccaaaatacctttctgaatatgtttttgctaccttccaattcactcaccacataatagacttttcccctgcaactatttttaaataaagacataatatagattcaataaattattcagaatttaatatacagttagatgaagtgttttccaaatgtatgcagtattataacaactacccctgtgtgtgtgtgtgtgtgtgtgtgtgtgtgtgtgtgtgatgtttctatcacatcagtatgttttattgtgcttctttaataatcatcattcttcttctctccaatccctgcttgcccctggtagcctcttttccaatttctttcaccatagatttatatttttctgttgcacaacttcataataatgaaattaacaatgtgctttacctttttaacccagcttcttttgctcaacataatatttctgagatataatacttatgcatatgagttcttttttattattatgaattccatggtatgaattacagtgcatttacccagtatccccttgatgcttctagtttgaggctaattgaaaacaaactgtcatgaatgttattgtacaagtgttgctgtaggcatctgttattattcttgatgaaatgtctaggatgtagcatagatgtattttattataagaaacttagcaaaacactatttcaatgtatgacagtttaagttactttaagtcattgcaaccttagatatcatctgtctttgcattagttatctatgtctacattaccagttatccaaaagttagcagtttaaaataagaaacacgtcttattttgcagtgtctgaggagcaggaatccaataatgggtagcttggtaattgcagtttaggatctctcgtaagattgcagtcaagttgtttagcagggtcctggccatcttaaggtgctagaaaatcaactttcatgctcactccaatgtggctattaaaaggaagttcccgtttcttgtcttttgagctctacatggggttggagagttggagagaggagacagagaggattgggggaggaaaggaggagggaggaagggagtgggagagagggctttcaagatgaaagccatagtctttacaagaaagtgtcaaaaattatacaccatcgcttctgtcatatgctgttggtgatacagacctatcctgatgtataatgggagggatctacatgaagctgattcctacttagtaggaagtagcttctgctactaaaacaaaacaccatagaatacatggcttataaacaacagaaatgtgtttctcacagttctagaggctggaagtctgagatcagaatgccaccatggctgggttctggtgagggccttctggtttgcaaattgctcttctcattgtatcctcacaaatagtgttatgccacattaaaattaatcagatccctttaaacactgggtttattttcctgtcacctttacaggcattactttcagagcatcttactatatatatatatatatatatatatatatttttttttttttttttttttttttttgagacggagtcttgctctatcgcctgggctggagtgcagtggcttgatctccgctcactgcaagctgcgcctcccaggttcatgcattctcccacttcagcctcctgagtatctgggactacaggtgcctgccaccatgcccggataattttttacatttttagtagagacgaggtttcaccatgttagccaggatggtctcaatctcctgacctcctgatccacccgccttggcctcccaaaatgctgggattacaggtatgagccaccgtgcccggccaccccgacctattattttttaagcatgtcatcttcaatacagaattttcatcagtgtgatggctcaggatttgagatataattttgttatagatattttccatttaaagtttaaaaagtgaggtcatacatggaacgatatttaactaagtgaattattgtattttaaagcctgaaataataaaagtaactttgtctagataaacaaaagtctacaacctttcagtcacattgcatgtcacttcataaaaaaatcttttatatattaataattaaatttatttaatttgtttaaattaaatagattaatattatataattaataatttaaaaatgaaataaaatgaactcagtgtcataaaaacaaaaatatgtgagtactcacatactcctcaaaatatctattacagttgattgtaattttccaggtactcttgtggtcaacaggccatttacagtttccatggtccatgatggaagtcctcttgggagactgacttccctttgcacgtgcagctcaatttctctgatgaccaagcatcacagtaaattctagaaactcaaatgaggatggaaagatttcttgattcaattttagtctcctttacttcaggttgtaagtgatatataccaagcagattcttaacagttgtttaagtttcaataaaatatatcagagaagtgcacatgcacgtaaagcacaaaattagagattgtagtttatactctgattcaggtgacctacactatattatactctcctgaattcctatttattttgttaatcacgttttattaattcctacccactatgttgctagcaccctgccagctgctgaagatatagtgctgaacaaggcaaacataatccttgctcttgtaaagcctatattctaggagaagggcataatttaaaaaaataatatatataatatgataatatataacactgcttttataaatttacttgtagacaatgtcatacctatgtatttatttacttcccttattgattctgatacaaggtaattgtgtacccagatatatatcttatactcaaacattatttatttttattttatttacttatttttattgagacagggtctcactctgtcgcccaggctggagtgcagtggtgcgatagctcactgcagcctctgtctcctgggttcaagcaattctcccacctcagcctcctgagtagctgagattacaggggtgcaccaccatgctcagctaatttttgcatttttaaacccataaacgcacatgattctgttcatttttcccctgaaataagctaacataagataccatttggcccttgttgagctctgaagtactgtgttaaatgtagaatgaatataaatgcaaggtggacaaattccttcccgcctacttcctgtcttcctgtcttcaataaatgtttattgagtttctaatacttgcatgccactgtactaggaaatagatcttgatgtctgggggaaagcagacagtaaacaaacaaactaaataagcttcaaattgtgatagtgttgaggaaataacttacaagtgtggtgtgttgaaaataatcaaataaattttactttgcatatactggccagggaaggcaattatgaataatggataagaagttgagactatgagagaaggaaaggagcccagcatgaaaatgttgaagggaagaccattatcatcataggtaacagcaggtacaaggatccccaaagaaataagcacttggtgtaatttaagaatgaaaggaaggtccaggtgactggaagattgattgagaatgaaaaagtctaggggaagaacttgggaggcagaaagctatttcctaatgtacggtctcaaaaccattgtaagtaatttgaattgcattctaggtaaggagtttggataaggggtaagacttcatatactaataccatcagtttcattcttagggaaaagtgtacctatatgatctggggaatggtgagggttgcgttttacctgccagttttcagttgcttggcaattaactcaagtgctgacttttagcttcatcagagttatataacgtgttgttctacatcctactgcaaaatcttagcgagaccaagaaccagttattgattttactattatgtcaatgatttaaaacatacttattttatggcattgtaatgaaataattgcattatatttaactaatgtgtgtaaatagatttgtttttacagagctaaatactttgcatctaataaatggcaaagactattgctaaattccaacttaattattatgatttgtgcattaattgaatgtttaaaattttaagggattctcatagagaccattgacaaaagtatacttatttcctaccgataaaatttgttattgaacttaatctgtgtataaatccaggcaaatagtaaaaaagagattaaaaattgtatacaaaattaataggaaaccagagtactagttcattaatgaaattttatttctcccaaaaaattttttaaaattttaagcccaattatctcatactttattattaggaaatttccacaaatatctaatggcagagaatattttttaaagtttaatgattaggttacagaataatagttgtatttttaagttatcatacagcataattgacctcttcgtgtatacttacatacattttaacacatatatttgttctcttgagtaccataagcacagcccaaatcagtattcttggtttgagtggtacttatggtactcacaagaacaaaacaaaagcaaacaacaacaacaactacaaaatcctttactccttaaaactgatctgttactcatcattgaagatttttctttcaagaatataattagagacacatacagttcatttagcataatacttttgagattcatctaagttgttgatgtgtcaaataagcacaggaaaagaggttcaacatcattagccattacccattaggcaaatgcaaattaaaatcataatatgatatcaccacacatctattagaatgggcaaaataaaaaccactctagcaagtccaagtgtggtgaggatgtgaagcaactcgaactacatagctagtatgaatgaaaatggtatagctactcaggaaaacagtttaggattttcttataaggttaaacatacacctaacatattacacagtaattccatgcctaaatatttacatgggataattaaaaacttatcttacagaataacagattttaaaacacagtgactatccagctaagttttttcccagaaatgcttacgtaaaaaatgatcacattcagttttctagacaaaatgaagtttttttccccttgagagtacatacttgattgaattaattatgaacttttcagtgcttatgtgttctgccttgatactactggtgattatgtacccaatggatattagaaagactagagaaagtaataatagggaagatgggggaagaagcatggattctataagagcctaattttacaatatgcacattagtgttgcagccgtttgtaagagatgataatatactgccagaaaagacagtactttatcttgttatttcattaaggcactctcattttgtaatatgaattcatattaatttaaggcttttagccttattgtgtgttgaaagatctaaacttgtaaatctgtaaattacacaaacagccctcttctattatataaacctttttgacgtaacacatgcttaaaattggtgtgaagttagaatgttttcaaatttcattggggattttttatattgttccagaattccaggaacaaatgtaattttggactttccaaaatgggttcatgaagaactaatttgttcactctcaatatggaacttttttaaaaaagtaataattctaagtgctaagaatagtgcttagctcataagagatgtctgtgaataaacacaaatgagtgaatgaacacaaatttctataatctggagtattcataattcctagttatgtaaattcatattatatagagataaaaataagctatttatataacgagagtaggaggaaggaggaacaagaacagtactaacaacaagaagaaaaaataagaaaagacttgattaacttttaaagcgaacaataaaaccttgattttgagaaaatattttatctataaagagtcgatgaaaacttagtagtagtcttctagaattggccatgaccacgagggcagatttggcatttgtttaccttgaatctaaagatgaatttttagcacaattttagaaaagaaagaaacaaacaaacagaaaagtataaaaaaagatgaacaagaaaaatttccagaattatggtcattcagatgtatgtacacatgttgttaaaactagtagtgtatgaaaatgaaaatttaatcaactatctgaaaaattttgctccaccatttcaaatatctaaacatgaaaataaaattggaatatttcatttcctgtcaccatagagcaatatgaattttcaaatacattcgatacatttgaatatctgcctaaatatggaaccagccttcattttcatacacttgttctcagtgacctttaaatgattctaaatctgagacagtttaatcttttgttcatgtgtcatgtcaaagtgcacagaaaatctcctatccatctgtggactccttgcaaatatttaaaaaattatgtatgtttgtatatatgaacgtttttgctacagaaaaaatcaaaagttttatcggttcctcaaaatattttgtattctagaagaaaactttcttcttacccacataaattgagatttgaaaatgaatgaagaaaaacattgatagaaataacctcaatatcaagttggagatcctgacagagctaagtcatgttctacattgtgagaacgtttttggtattgtcttgcattgttatttaagcgttgtttttttcctagctgttcaggtatttgtctccttaaatagatgaggagtgttttgatatcagcattatactttgtacttctttccatctgcactgttttcaaaaaagagtctcaaatataagctgtttaatgaaggatcaagaaatctgaatctgtaagtcactgtttcccaagttcaacgttttttgccacatctaagtaatacgtggtcatttatgactgaacttttttcataaaacaaagtattttttcagtaaaattattttatttaatgcatttaataaaaacaatacaaactggaaatcagtgtcacttttcatattagaagacaactgcaaataaattcaatggtaccagaacaatgtaatcaaattttaattacgtattttgtctcccagatatgccaagcttgctcttgttctcttcagaaggcagattagcaaattgaaaagagtggctaaagacaaattagaaataaactgagactttgccctcagtataattagatatgctgaaggaaaattaaaaagggaaaaactttctaattatatgtttcaatgtcttttaatactgtacctatgtgacacttaattaaaattgtctgtgtactagagcagatgtcccaagccttaggaaatgctaatacggggctatcttaatatcacaaaaatattgaagatgatgctattttgaattttcagtttaccatgaaacactatagcaagtgacgtctgacttacctaaaagcagttaccaaagtaattatttactctaagaaaagaaagtccaggtggttctatcatactctcttgcagtagctcttaattacggctgcaccttagaattagctgaataccaaagtcttggtctcatagagaccaattaaatcagtataaggtaggatttcagactggcatttctttaaagccctccacttaatattaacatacagccagggataagagtgactagcctatgtcttattttgaaaactcagtatatgccgcaccttgcatatttgtaatatgttagtcatcatataaatgaagaaatacaaagtatttcctacttgatacatttcttgatggtaaataattacgtccttctcttttatggtttgcatatcttctctggttaaaattggtcttggattttcatagaacatggcaagaaatgcagtcaatgtgtgtttctggagtgaaggagaggaagccttctttattacactgactttgtcaccatgttatcattatagtccaataacaagtatagtgtataagttctaccatttgataaaaaaaaaatgctgcatgagactaacgtaattatgaacccacttcaggttactgcctttaaaacttccatgttagtgtgtagtgtgcaagacaagctgtcccagttttcccaaggtcatgcaggttatgaggccgtcaatattgtatgtagtgatatttcacaaatttgcattgttgtacgatatttcattatatgcatatgccatattttatttacccattttactgttgatttgagttttatttatttctgtatgtgacaaataatgcaactgtgagcttccttgtacatatattaagtggaacgaggtcatcatagcttttattctgtagcaaggtatacacaaatgagaaagtgaaaatactatttttaacatgttgtaaataattctactgaagtgctttataaagagataaatgagaaatattccagtttaataatcatttgttaacatttctttctaaccacaatttaacatgcatatttttctttctatcctacccagcatccatggacagttgacatgactttaggatttgttcttgtgttaaccttggcttgctttgtttctttttttttagtacttttttttcttctttttttttttactttttttttttacatttattttgagttcagtgatacaaatgcaggtttcttatataggtaaacttgtgttatgggggtttgttgtacagattatttcatcacacaggtattaagcttggtgcccatcagttatttttcctgatcctctccctcctcctacccttcactctctgaaaggccccagtgtgtgttgctcctctctatttgtccatgtgtcctcattgtttagctcccacttataagtaagaatatgcggtatttggttttctgttcctgtgttagtttgataaggatagtggtctccagctccattcatgtccctgcaaaggacatgatctcattgtttttttatggctgcatactattccatggtgtatacgtaccacatttttttttttatccagtctatcactgatgggcatttaggttgattccatgtctttgccattgtgaatagtgctacaataaacatactcgtgcatgctttgtttcattatggtctaaaaaatattttaaatacatgtcatttgagttttcccatgcagagaatcatcagcacttgaagagagcaatggcaaccatacaatagcatgttacataggcagctccttttagtattaactgtaattgttacatgggcacatatagaaagagagtgagccacttactaagttaatttccacaaatattgaatcttcttttaaaaaattcatactcatattttgaaaactattcatcgggtgtcttgccaaatgcccaacacttacaaagttttagaaaacaacacctttgaagacagaagcagttcttgtccttagatgcttaatgctctgcttttaacctccatagctaaacttgattagtttgttttcttatgaagtattaatgttataaaaagcatataagattaaaatataactcaatgcattatcaaaaattgaaataaaaacccatgtaattgcaaaatgtgtctgaaaataaaatattgccaatgtcccagaaaacgtcttctttctttcctagtttctgtcctctttctcttacctcaaataactgctgtcctaactttgagcactacagataatttttcttgtcattaaattttatgtaacagaagtgttacatatttgcccatgtatataatgtctagacatcttttgctcagatttttatttttcaaatttattttgctgcatgtagcaatatttcacaaatttgaactgttgtacaatatttcattatgtgcataagccatattttatttatcaattttactgttgacttgagttctattttttcctgtatgtgacaaataatgcaaccgtgtactttcttgtacatgtctttaagtagacgtgtgaatgcattttcttttggaaataatcaatagattaaatttctgggttatagagtacagaaaatgttcattattagcagataatgccaaaatattttccctccagcagtatagagtcctagtttctctacttcttttcccttttatttaagaagggttgaagcaaagaataaaaacaataaactatgatagggaggtgtaatccatagaaaatggactctaatgataatttcagaacataacctgacattgattatttttttctgttctgttccccacaatgagcatcgtcactgcctctccacgttttccctcctcaccttctgaactaacataattttaatttggtatctgtgaagctcatgcgcttttggggaagctgttttcatattttatgctagtggtaggtttatataatgaaggttaaatatttatcattttctcattctctagccactgatatcagtttcatgtggctgatctcatttaggctagtgatattagaaaacaggaggcttttggggggcttttagaaaagtggctattttcctcttttagagagagcttttggaaaagtttatctttctgtttttgtggatacatacaaagaagcatagaagggaaaagttgttgccagaatcttgtgaccacatagatacttctttgggttgaagtcaatgccatggaggatagaagagagagatagaaaaaattctaagattttgaatacgtagttaaggaactgagtcgaaactcccagaagctcatcttaccttaggatttacaattatatctgtcagtgtctcccaatttagtttgaatgttgtgatacttacaattgaattcatcttagctaataaaatcccacagacatttatttgatatgcatcatttgtggctgttaataaagtaaacaatttgcattttatatattgcaaactaagtgtctgttaattgattcagccaaacacaccaacagctgttagcctaatatcaaaaaaaattaaacaggatgtgaggtgagaaagtaattttaagtaggacaatttgttagcagaatggtttactttcctgctctaattctaccctgtttgcatgtatacactcacatgtgcacactcatgcatagagcaccctctgaacaggttctgcatagagaatttgcatgtccttactgggaggaataaaatcccacaggccattgaaggacctatatgaaggagcaactagcgccccaatggccccatccattgaacaccactatgtctctaaagagtagccagtcctcctggatagtactgagtggagtcccccttcccatgatcatatactgagttccctttgccttctgaggatgtacactcacctactctgcctgttcctacactgtttaccaaagcccaccttttgcagtggctgaaggacatcctttaaattgaactagcttatatgtgtgccttgtctctgttatatacattgctgtccaaacagagggaagagtttaaatgaggcagatgatcacatccattacgttaaattgcaagctttccttttattcttcagtgtggggagatcaaatcatttgtatctgcagtggcaagtttatgaaacctgaatgttattaaccttgtgctaaaggcatcatgtcttttattggactcaggcataaattaatttattgtcctaagggaaaatgagctggaacaatcatttattttggatgatcttattgtttaatgcatgtatagctgtagattctttggtcctaatttctttctcaaagccgtgaagaataatggttaaatgtttagttttggccaactaaagtgactattatgattgtaacagtgcttctttatctgtaaaacaggaataattatgggaatatcagtgttttgaggattaagtgagagaatgtatgtgaaatctttaaagttatacctagaacatagcgaatatttttaatattatgacttctccgaggaaaactggtgagcaaaaaattattcccacaaatcttcattgagcacatactcatgaaatttatagtttagtaatgaagacagacaatagagaagtcaacaaatgcatattgtgataaattctatgaaacaatctcttggtagaacatgtgatgggtgagtgggcaacaaatgtagataagatagtcagaaatggtctctacgatgggatgtttgtattgaaacatgctaattagtagattgaggagtggagcagaggaaaggttgaaggcagaaaggacagttacatgcaaaggttctggagtttggcctgatttccagaacttaattaattctcgggtaacatgatgatgtacggaacaagaaattcctgtattaatgatacttttggggcatgggattcccagtggaccctacagccttgtgagaatctagagtagcagtgagtccctgtgcatgtggtaaaggaaggaatatttatgagatgtaagtagtgtatattcacaatttagaggtgacaatggagcagaaaatccaatgcatgggaatttttattagaaaaggtcaaagatatcattttcccgcatgtatgtcttgatagatttattttgacgtataaaatactttgcatatgaactcattgcacttataaaaaagtaaaccaaaaattgtaccaagaaaatattagtgacaccaatgttatgaaaggaaacattaaaaatataaaaatagtttaaaaacacaaataattaatttttaaaatccaactacttacctgtgttagagaaggataaatatatattcagtctttattatgtcaaacatcaatagatttaaggacacctgaacaaacagacaaatgcctttatttctcatccaaatatttgctgttctactatcctgggcaatgactagattttcctcctctacccctaaacttagagctttattaaatatatcgaaatctgaaatacctaggtggaaatttaaaattccagaaactgcatgactaatcttcacaatggcaaatatccagaatatgtaccaaaattaaaatgtctacaatcttgttaaaattgtgagcaacctctcattgaacagtctctatgcagtatttgttgtgttttataagccacttttatccttctaaataagattgatttttacttctaattacaagtgtgaattcctgtttgtaatcatgcctaaattcaaattatgcataaaactgtaatgatgagaataaaagtgaataatctaatatacaacatggagattcagatttagatctaaagcaggaacgtgagaatttttatttaaaaaaaacccatcccaacacatacacatacacgtacacgtacacgtacacttacacgtacatatacacatagacatacacatacacatacacataccatacacatacacatacacatacacatacatacaggaccaggaatatgtgccactggtctaaccactctataactgagatcctcaaatattaatatgtatatgaatcatttgtgaaacttgttaaaatagcaattctgattccggggtctgggtgggtcccagagctctgcatttctggcaagctcccatgcaatgttgctgctgtggccccaggctctcactaaggtgattttctaaccatgaatatttacaaagacgaaaacttcacattcttttctgacactatcactcagaaactatcactcagatgacaaaaatgtttttattatggttagttaattgaaggataagtttaatttcagttattttcctctgtaagaaagtatttttaattatatggtaccaggaggagtaataacttctaaaggccattccatgtagataggtacctttagccagaagttcaaatatgtttgctctctatccactcaactgttgagtgaattcttcaaatcattatcaatctgtttctgcccagacattcttatggagtctacagttccatagaatgtttcatctaatggtaagacttcattattcctagatagcctatctgtgaatgcagaggtttttatgtccaaagcactctagagaaagaaacagcgtagctttaataaaagaagttcctttttttaaagacaaatctggaaacagtcccaggttatgcatcagctcctttaatttagacctcagctagaaaagcttaggagaagaaaaagttcatttatttataatgtagatggccattatttttcttcctgaaaaacatttgtttttagttctcctcagcccatattgcattaaaagtcttgaagcagcatacatagatgtaggtttttgttacatgtttgaagctggtgttataaatctatcagtggtcactttataaaatgattaatataatatttataataatatttgttccattattaaggaattttgctattgattaattaataatataataattgtcatggacttattttcagtactgcgtgttaggcactgtgctaagcacttaagcattgtcttaaccttacacgggaatgtaatatgagaactaatattaagcctattataagatgaaaactttgagacttatcagggttaaataacttccccaaagttgttaacagtaagttccaggcaagccacaaatccagaaagcagaactagcatttcctgattcccaaacaggtactcttaagtactctattttacctctggatggctaagtagactcctgaagtgtgaaaaaaaaactaggtgatgactctgagggaattgttggagcaattctggaaattagtcttacttctaaaaaagtatcccttatcttttcactttatgtattttccctcctggtctgccagataatagtaataacggtaatacagcaccattatacttgactcatttatttgttggcataaggaggtgccataaacaaacaaactaagcaatttagtacatattcccttttcttgaagaaaatttaatagggtgcatgtgtcttgagagagaaagagaaagagagagagagagattttttgaaaaggcacttttgcaagaacaatttaaaccgtaatatattctattatggcatctgacgaacctaccatatccttttctcatgagttattggagggatttgaaaattactttaccagagagcttttttattttctttccctaaaccagtaagatttgggtcagaggattaaagctctattaggcagagtttagcagtgctctggagaaatgatgaattgaagcccaagagggattttttttctggcagcacactggcctctgcttgcgtggaggcttttctctctgagagctgacagaaccattgcccagcccattatacccactatgggcactctgtgaaattaatgctcctttaaacttcctatgctcactaaagtgcaagatgtaagacactgggtatgttaggccttttgcagatgtatttttgtgatgtttcctagtcatacagctttaaaggaatgaaaaaagaggttactgtaatcattaagttgacccatgacaataattactcttaagacttcatcctctatccttattctcaaaccagattaattacataatcatcttctgcaatatttagtcatcaagatctatatatatgatgtacataaaacatatgtgcattcatgtgtacacacatacatacacacacaggtatgtatatttaactacattgtacatgtatatatacttgatgaccgagtatgaatgaagaaaggtgataaatctggcttgagaatatatgaatatatacatttatttattcaaggtaagtgtggcaattatgtcatagctgacaaaattcattctatactatatgtttagaaaaataaggtaaagatgggggcaggggtgggaaatgttatattttaagtttgcatttttaaaaaattttactctaaactacaaaagtaaccaatattcattcagtgttgataaaaatggaaatggcagcttttgcacgggtgtgtgtgttgcccctggatctggaaaatatcatcatcttggcggggttgccttgggacttgggttagggggagaggtaagctataggaattccagtccccttccagagtcattctcaggtggcttccagcccaattgctgaaagggtttctgataggtttgggcatagtgaatataatgaaagaatattatgtggctttttgatcagttataacaagtcatttcatttctatgattatagcacattaactattgcatttgccatgataaagggtggtttaaagtctgtaacatttttcttcatagtaccaggttcttaacaaccaaagataaatgatccacctttgccttcagtgcaagtgaggggaaaaaatacacataaacacaccctgggggaagcaaaagcaaagagattgagctctctccttagtgttcaagttagcggggagaggcatgtctggcagtttgtgggagggaatctaattatcagtctcttactttcattaataagttggggcaagtgaactcctcaaagaaggaaagagcagacattatacctgaattcttagactacatatgatcctttaacctccattttcacacaaatagttttcttataattccttcaggagactgggaagtaggcagaaagaacatcaaatatgggaaaagtaaaaataactggcaaaacatggtttatttgtccatgggagggcaaagaattctgaaaacctgaagcgtacacttgaatacagttagtctccatctatgcagtttaattagcacaaccctcaagggagaattttcagtttaaacatttcttttatcctgttttatttcttcttttccactggtggtctgtggataaaagtcaacttgtgtgtaatctatgtgttttttgaccaatatgttttttcttagcttcactagccagaaatctgatgatgactatgaagattatgcttctaacaaaacatgggtcttgactccaaaagttcctgagggtgatgtcactgtcatcttaaacaacctgctggaaggatatgacaataaacttcggcctgatataggaggtttgttaaagtcttttgcgttgtgctatagataggagcacataaacatgtctactttaatagataaaacatcagtgtagttcaagagcaaggaagatttaaattatacttttttatatgttgtaaaagtagtgtttaaatagcattcaggcctatgagtgggagaggtgtcaatacattcaaaatgaagaaatattattttcaagtgaagcttgagagctagagttagaaattcacatattgctagatatctcagatagaagctgtaggaaaaaaaaaacaatgacccctttatgaagcaacataaacaaatcaaacaagacaataacagtaaagagaggatatattgtttgcctgtttttgtgtaacaaacaaccagaaaatctcaatgacatatgacagtaaacatgtatataatactcccctcagagatatactaatctatgctaaagcaagctggagctgcttatttagggcaactgtactttacgtgttcctcgttctactcttgggaccagcaggtagctaggacaacccttctcacagtggtagaaaacagccagagagtaagtagaagctcatgaggctgaatgcttaggcctagcactggcacactcgcttttgtatatatattattagccgaagccaatcagatgatccagcccaaagtcgagaggcagaggaatagccttatccaggagaaggcaaggatgtgaatgccggttatagagaattcagtccaccacagtgagttaggacatgacactttcaaggaaaaaaataaagaaaagactaatgctcttgttgttcattaagagttaaataaagatggagaccatgcatttggtcatggatattatactacagatttttaatatcagtcttctctgaaaaataggtacataatgggtttccatatggttttctcatattatctgtggtatcacagggtacaataaatcatcagggaagattaattttgtgttggtgagaggagtgtgaggataatgtggtcattaaaggaatcaacagggaactgtgatccaaaaccaatttatattaccagtttgctgtttatgtccacttcatgttctgaatgcatatttttttctgagttattaagcaattatttttctatatgggtccagtcagggacatgctcaagtcaatttcagagcttgaaggaaacatggtaaaattcaagatatctgagagaaagatggagaaaagctaagagcagcattttctaatttattcatttttatgttagttttaaaaggataattggtttcaaaactctactatgcgtgcttggtgcatgtgcatacttaagaaagatatttctttgaaaacaaaatagttattcaaatgtggtgaattagtaactggtaccaaattagttgtgaataaattacttctaatgtagctaaataaatctattctagaaaacaaagattaaaacattaaaatcttgcacctctctatgtgcacacatttctatgtttctctttacagtgaagccaacgttaattcacacagacatgtatgtgaatagcattggtccagtgaacgctatcaatatggtgagtttccaaataaaattctttgtctgttttattagcatgtttgagagaaaatgtgatgtcatggaaatagcaaaagacatgccagcaaaaaatttaagtttaaaactttagaagtgaaagatagtcttccagatcctttttttcttgtaatatgaagataattaaatgttaagtatttttatgagaattaaatgggaccatatatataattaatttgtgtaaatatgctatgctgttgaaattcaacaatcggtgtttacttgccaagtgctacttactacaaaataggatatagtactcaactacttattagaacattgatagtttggttcaaatcagaaatgtttctcagataaaatagtgtgtcagatgtaataataaatgtaattctgttcttatgtaacactttctacccaaatgtgaaatacaaaactagactggagtccaaaatatgatataatagagaatgtaaaatagagtagagcagaatggagtacaacataacataaggtaatatagtattctatattatacaatattatatatgatatagtaaaactataagtttaaaatcatgtttaccaagctagcaataaagatgctctgctaagtgagagattgatgtgccaatcgaggtgatatatcatcacctgcatactccaagctaataagtttgcttgtttagtcattaaacaaattctaacttctttataaccataattctcagaatatttagagttctgaaataaattctaaatatctaagaagtagaggctatatagatagtttatttaaatgcagaactttcttgttttaggaataacagtccccagaactgttctaggatcaaagtttgtgaaataatagttttaagaatcaaagttttttattcatggcttttcttgccaaaatgtagaatataaattaattaatttttatttctactggcacatcactaattggttgacaaaggatttcgtaaaacaggttcttttctcattacttgtagactgtaaaaatgaaactaaatgatgaacaagggtggaatgacttacagggtagaaatgtagctaatcacagtgacacccagtgggaggtggtgcaaggaaagaaaacagaacaatgtgattgaggcaaaagactcaggcctaatggtctgaatttcacaccatatctgcttttttttttttactgaagtcaaccgctctccagtttagtgatatgtatacttgatggaaataattacagtaatttgtcactatagcatttaagaatgcattttatgatagagattaacagagtattataaattatttttaattgttaatttcatcttgtttagagaaaagaacaagtaaatagtgtaagtaaatagtgaaaaaaaccctcttcttgggggtttgttctctgccaggcatgatgcaaagcaccttttgttgattgcccttttctatcctaacacggcctacccagttagattcttcatgatccctattttaatataggccaactgactttccagatctcctgcttatgacttttttgcatattctgtactttgtttcactctacagtggtggttctgaatctgaacttctttttccctctcaggggatgtttgactgtgtctggaggcaattttagttgtcattacttggcaggattgagtatgggtttggggtttgctactgtcatctaatgagtagaggccagggatggttctaaacatcccacaatgcccgggacagccctcatggcaagaaactagctggctcaaaacaacacaatgctctgctctatagacatggaaagtaaaggattgtatcaaggctatcctcttttgccagaactcacttagacagatctactttttcataaaagtatcaaacatagctacaaaagatgggtgagacagtaacctcctcagcaaaactctagctttcttttgaactattcaaagccaagatagctttgcttcatattggcaaagaaaacaggaatgaaatataccaatatttaaaaagataatcttactgtgtacaaattttctgtttatcattttattaaaacaggaatacactattgatatattttttgcgcaaacgtggtatgacagacgtttgaaatttaacagcaccattaaagtcctccgattgaacagcaacatggtggggaaaatctggattccagacactttcttcagaaattccaaaaaagctgatgcacactggatcaccacccccaacaggatgctgagaatttggaatgatggtcgagtgctctacaccctaaggtattcttttgcaaaaggaaaggagtaattgttaggaagaaaacaaacaaacacaaaaatcaaccttaagtctctaaaagaaaaaaaaaaaaggaaataaatttcaagactgcatcagggttggcatgctatcaattagtatatgacatcaaaacattagttttttctttttgttatcaatgagctttttcaaagcactaattataggcaaagcttattttccacaactgctgtgaaaactattttttgtcacaactgacctgaaatttcctttgtcttgcaagatcatctgacctttgcacctacgctttgcactcttatgcttggcaatatcttcatttccaaggaaatagttgctaaaagagaatttttgaggtgtatgtctccatacatccttctctttttagcttcacaatagcaggcacctagaatctattatctttcatctcctggcaccccacttcccattatgttaataggctatttaaattaatttgttgtctatcttgggaatagacatgggagaaagttgaaggagctatggttcagcctctgaaattaaattctgaaattaaattgtgaaattagagtaaaatgctaccttaataaaataattattttatgccattaccttagcacttcatactttgcatttaaaacatttttacattgaattttctcattggtgggaatacattattagacagaataatagataagtacatagtcttacgaatcagacatccgactttggttcttagctctctctcttactatctgtaggaactagggcaacgctccagcatttctatataaagggacttaggggcagctatctggtagcaggacttttagtgttagaagctttgtttgcatagtaagcatgatgtttttacatggttatgtttttatttagaaaaattaagtgagaactgatggaaattattgggaaagaaagcacaaccatgctgtcccaccctgtactgcctctcccccgaccttgacatcacaactgagcaaactcttttacctttcatttctttaatttctataaaacagatatagttcttctgaccttacggagttgctataaggacaaaatagggtgataagtaaagtgattaacatagagcctgatatatagtaaatatagaaaatattaaaattatttatacattttcaatcaaaataagaataatgcaattctaaatcttcatatcaaatgattcatgttaaatgtgcttgctcaacatacaaaatataatacttgaataggctccaaaatctttattaattatatcagttattagaaaaagccacaattccaaaataaattcattccaggcattttatatttatcatggcttttgtaaacttagagatatagtaatgactgagtttatttttatttatttatttatttattttgagacagggtctcactgtgtcacccgctggagtgcagtggcatgatctgggctcactgcaatctctacctcccagaggttcaagtgatgttcccacctcagcctcccaagtagctgggaccacaggcacgtgccactacaccctgctaagaatttttttgtatttttttgtagagatagtcttactatgttgcccatgtggtcttgaactcctaggttcaagcggtcctcaactcagcctcccaaagtctggggattataggcgacagccatggcatctggccaatgcctgaatgtagaatctagtgggtacaaaattcgcctgatacatcagagctcagtccagcttttgaaatatgaagccaatcatactatctcaagtgtctttattgttcttataacattgtagtcattttgggacttaatttatggaatcattacattagttagttatgaaagccacctcaaaagtgtcactaatggagattcaatcaaagcttgaatggttaccagtctacatagagagatgattttgttctggctatctaaaatgagctatgagtgtgtttgtgtgtttttgtgcatgcccaaagacatttagatctgtatctatgtttgtatctgcaattatattattttcaattttaataattccagtttaatttggagtaataatactaataaaatatcaagtttaattgtagcttcctttatgaataaaactattcttccctttgaagagcatataaatatatagtaacaatgattaaaacctccagctttgaaggtagataatcttgggtccaaatttcaactgtgcctcttgttatgtgactttggacaagttcaggtacaataaatgcataataatacttattaaatgaggaagcaattcactctacccagtgcttcatagttaattaaggtctcaataattattagatatattttaacatcagtaattgctccgttatatcatagaatgatagattcttaattctgttcaattaaaaattatactaattagaaaatctcttaaaaataaattttcctaaaataatactttccttacatcaataatatctgtacaatgtaagagatatagctaaaaatatgaaattttaaaaatcatcaacccattaccattacaatttgagattatattcatatttacccaaaggtggtcaagacatttgactttcaaatcttctccctcctggagttccagcccaggacttgagactgagaaaatctgtatactttaataagaactaactaataaggcataaactaattaagatttactggcaaacatttttcaaatatgtctgtgtatgtgcttttaacatttcttgttttccattagatattcttctactctataatatcctatttaatgacatcttctggaagatcctagtgacagtgtagtgtagaattaatgccacaccattgtgcaacacaggtatttgtacactcacctttagcaattaaagctaacagctaacaagttcttacaaacagaaggtcctgctttaattagcagttaagatcttagaattatcaacattcatttacaagcaaacagtaaacgagcttaagttcttaaaacagttggctctgttaaatatattcactgagcggtttcacttgagcaattaatttgcaaagagaaaaaccaaaaccaaaaacttaagtgatcataaattttcaataaatatagttgaggtaagtgaggtgctattatttggtctgtgaaaatgaacagactacattaagtcttatgtaattttttcctggacttggtggatttcttcattggggatcactctgtgttttcaatcagaatgtgagatattctctagaaaaacaatcatttaaaattgtgcaaatttacaatttaaaattatgtctaaaatccatcttatgtttaatatctttctacttaggttgacaattgatgctgagtgccaattacaattgcacaactttccaatggatgaacactcctgccccttggagttctccagttgtaagtaatattccttctccatttgtatcctccctcacctacagtctttctgattgccatgttaattaattgaaagaagcataacaaatttcaaagttgtattaagttatgttactgacttcgatgattttgaccatctctttcatcttaatcccagcttgctccgattagggtgattcctgcaaaagaagggctgattttattaagaattacaataggtttccttgagttgcaaacttttaatatattggttgcatagagccttttttttttttgtaagggattgtaaagccaaccctggactcaatagaaaaggtgcaatctttaattatatatcctcttcctttctctcctatgggcctaggaagggactatagcagcacattgctagttaaggcctgccccacaggacaattatttcattgataaaatatatgtgaactactacttgacacacataagatcaaatataaaaccattatttttacatttattatttttatcagatagataatagaatgtagcaagaggatccatgatgatctaacacagattatgctttagtaacctttacaaatatttcctgcctgaatcaaagccaagcaaacctaaatttcccaaaacattttccttactatttgttcagcatccatgaaaggtcaattgcttcttttacattttttgtctgccagttgtacatattggacagaataaaaatctgattatagattttaaaagtatgtttgtagaaatgtaatttctcaaccagggagtccaccaagtcatagtaatcacagtttgaaaaacgttgatgatcagagaagtaatcacctgtttatcacttcatcaataccagaggaaaccagaggaaaaatatcactggacatcatatttacctagaaaaattctcattataaaacttatttcatgttttcctgaatccaagaatgaaatatatttaattataaagttaaagcttccctgtgctttagagagataagccttcctttcttttaatactccaattgggactacttctttcttgcgtcagctaaaattcaagaactgttgatttctctgccatcaggtggccagttgaaaatgatcctctgaacccaaacacaatttaatattactcattgctatcagaataattcagtcaccagcacattctctgcctcatatcatcatttttgttgttgttgttgttgttttgttttgttttgttttggacagggtctcgttctattgcccaggctggaatgtgcagtggtgtgatctcggctcactacagccttcgcttctggggctcaactgatcctcccaccttggcctccagagtagctgggatttcaggcacgcaccaccatacccagctaatttctgtattttttgtagagatggggcgtcgccatgttgcccaagctggatattatcactgttttcctcaattttcatcacatactatcatatctctctccatcccctccatcccttctagggactctctcttttttttcctccctctttaattaatataaacatataatagataaagctgcatcaaaaggaacagaaagggggaactatgtgggattttattccaagtactcaatcagtgttcataatcaaactaatctttacatggcattattatttattatcacataataattagtattattagtagacaaactgttaaaatgatttctgatttttatttattttcttgaaaaagttaattctgcagttgacttcataataatgtttatccattcaacaaatatacattgaccatcaattctgtgagataagtactattatcctccctataagaggacaaacaatttaggaggaaaaatatacacttgtccagggtagaatggctgggaaatggtactcataaccactactttatctcacctccccagtgtgatgtcttcaatgaatactctctgttctattagtacaagctcattgatatcttcctcttagcatttctacttactactgctttgaattgtgtatttctgtgtatattaaaatggagtcccaacaaattgagaaagaaagataataaataatttaggttacgttttccaactatcttccacttcaaatgcattctttggagaagttttgagtctgtactgtcttattattttctgtttctatgtgactcaaaatcttgctctgttaactgcctttcactgtgatacaagactttgtatttctactatttattatagactggtcacttggtatgcactattccagatgatgtaaagtatgcatatggcatatataaaatcacatgtagtataccttctatgtcatttaaattattttcaagagtaaatttgacctttggatttttgaatctaacttcccattaggatgcaaagtcattgcaatttatgttctcattgcaatgccctttggtccaagatcctcatttagcttgtaactatctttctcagtctttacctcagtgtcatgttcatagaagatggttgctacatatgctaatttataatcatttttaatgtgagctttcctatctcacggcagatggctatccacgtgaagaaattgtttatcaatggaagcgaagttctgttgaagtgggcgacacaagatcctggaggctttatcaattctcatttgttggtctaagaaataccaccgaagtagtgaagacaacttccggtaagatgcactggcaaagaatttcaagtgacccttccagagttgaaattttggtatatatgaattagaagatttttcaatacctctcaatgaatgataatcagaaaattaaatgaagtgttttaactttctagagaaaattataattgaaattcaagtagaatagataaatataaatatattctaccaatatgggaaaattggattcaaattggattagtaaattattccctaatttatttaaggaaaaatgaatataattatgaaaaaataaaatatttattagatgtacctgttttagaaagtatgtttcataatgtagtgaaatcgccacatttcacacaggaagagtgaattttttacaaatgcagaaaagtaagcatagtggatatggacccattctccattcagtagtttaatattttaatcttatccatcagtggataatagaacaagccttgagtatcagacaggattgggttcaaattccaattgcatcagttataagctatagacattgggcaaatgtattgaatctctgagatcagcttttccagatacctaatgtgcattaaaaaaaattgcatcacaggaagacagtgtgtatgcaaaatataaatgaaatgaaatgcttagaatgatagctggcacatagtgagcacttggtcattagtagctcttactaatattaattatgattatcagatgtgcatgataatatggtcaggaattgagatttaagacaagctaaaagtaaatatttttatattaaatctcatgatttgtaatagttatcaattgttgatttaaaaccctctgtcgggcaagttagatatgtttccagaccagatatgtttctgtctcatgggtggccagtttgaactctcagcaatgttgcttatatcctctatgtagattaatccaactactctttttaaaattatgttaatttacatatgttcgaatttcaaatacaaacattgtgttctcagcttaccatctattaagatgtcatttgaagcatatttccaagagttgaggtgtttgctgttgatttagtcacaaacacctgattattttctagaattcataggaaatattttttgcgtatggaataatttggaatcaggccttcatctactttacagagagaagcaaataaaggacctacacaaagatggaaatttatgattcgattctactttcaaaagtaccatccttcaaatcaaagaattatctggctgtaacattgttttgagcatttgcaactgtctcctaaaggttcttttatttggaaaaaagaatctgaaagaaggtcatagtaatgcttgagtatattattttaaaatggccttctgttccattatttgcaagaaacctgaccatcaagtattagtagaacaatctttttttttttttttgagaaggagtctcgctctgtctcccaggctggagtgcagtggcgagatctctgctcactgcaagctctgcctcccgagttcatgccattctcctgcctcagcctccccagtagctgggactacaggcgcccaccaccacgcctggctaattttttgtattttttagtagagacgtggtttcaccttgttagccaggatggtctcgatctcctgaccttgtgatccgcctgcctcagcctctcaaactgctgggattacaggcaagagccaccgcgcccggcctagaacaatctttcatctggttcaaaaaggaaaagttcaggattgccttagaactgaagtcttccattggcgaaagaaaacacatacacacacacacacacacacacacacacaccacgtaaaattaatctccagttcttcatgcttccagaatgagaaattgggcattaagttctgttgtatattcatatttctataattattccagcactctaaaacagaacccacaaactcgtgactagaagatttcttgtttagttgttttgagcccaagagtggtatgaagaactaatggtggagacagaagggttgattttacatcacagagcccaacattaccacctccccaatgtctcgtgtggaggatgatctagggaatttactatctattaggagacacttgtgggagaaaattatctacttactttaagcatagcaaaaataattaacaaggtctcacaaggctattaatcttcctaaggaaatcacagcaaaacagtattgaaaagatactacatttcacactgagtaccatcatgtaactgatctcatcaactcctttgtgcatcctaatattgtgaatagccttcacagttggccttctctcccactcctcaccctgctggtttgtattttgtgtgtagtactatttcaacgggctcggtgacgagaaagggctgaattgaacattagtgttgataacgaaaggcaggctgatttctgtgacagctgatttttttaatgattggaagtttttgctcgatatttgcttgatttttgatgctattcttatcttcaaagcatagctgtgtaactaatgaatgtctacaaggaagttatgtttacaagtttcttgggaaattatcaggagatcaatcttagccaattataatgtgactttcttttagacttgtggtaaatgtatctccctttaagatgcctcttttgtaactgggggagaatattgccaaattgccacatagcttagtgaaggattttccaacctttattcattcaagctttgttatatccaagtagtgactgtacttctgattcctaatttttttctttaaattgattcatgtgggtttttttcttgaatgcgtaatgaattttattattttgttttaacttttaagttagggggtacatgtacaggtttgttatacaggcaaacttgtgtcttgggtggggggttgttgtatggattattttgtcacccaggtattgagccaagtacctcttagttatttttcctgatcctctccttcctcccaacctctgccttcccaaagacctcagtgtctgttgttcccttctatatgtccatgtattatcatcatttagcccccacttacaagtgagaacatgcagtatttggttttcttgtcctgtatcagcttgataggggtagtggcttccaactccatccatgttcttgcaaagaacatgttctcattttgtgtggctgcatagtattccttgatacatggttttttaatgaagttaattttttaaaggaaagttaatataaggaccataattggaaaaccaggacatttaacaaaaatacaagtgatataaaaatatgattaaaaaacaagtgaatactcttacactttaagtgcatatatttgtgttccctagactttgaatatgttgaaaaagagagagagagaaaaggatattagagcttgagtaaagagcaattagtaccaaatccagacattctctttgatataaacagaagaatagaagcatttcatatgagagaatttgctcaccaggaaatttaatgctatgtgagagtccttgcatccaccacctgaatcatctcctttattactactttatttgtactacagctgagaaaaatatttcccctgtggtgggtcgataagatttgaagaatatttttaattcattgtcaatatgctagaacagattctggatccatgatttcttcttcaaactataattccttcctgattgttctatatctggtagaagaacaaccattgccccagtgagccaggcgtgaacactcagagtcatgtctctgcctcccacatctaatgaatcatgaaggcacttatgcttctgaaatatcttgtgtaactgtcctcttttcagttgccattgccactgtcctagttcatgattttgtctgttctcatctggaatgtgtcagtagcttattaagttatgtgcctgctgtcaatttctctctcatctccagtctatgcctttcaccttaattataaaagctagcacttactaagcactaactacatgcaccatagcaagcactatgtgtaaatgatctgctttctcataaccatagttaacatttactattaacacagatggtatcactgcagatgagaaaattgagactttgaggggttcattttcctgcagaaatcaagggcaagcactgggacagaaactcaagtggtctgctctgacattcatactcttaatcacaacactatttgactcccatcatggcccagtgagctgatatatcccttcatcatgtctcaataattcagtaggttcaattgagcacaagctattgtttctagtatataagaatctggtctcaggaactttccagtcttgttttctacaatttcccagcttgtgaaagaaccgaactattaatatgtttctgtgtttaactaaccagtcttacactcacattgaatctcaatctctttctgttttgaatgacttcttaatgcatcactaccatctcatctctatgactttaaggcttaaatcagtggcatctcttcaacagtgcctttgctgatcttaataccaaaacaacttgaagcgatttttaagaatgttcaccacgggagtcagacagctcaggttttaacaccagctttgccatttactagtggtgtgactttatataaatcatttaatatatccgagcccaatatcaccagtatcaacagggttgctccaaggattaagaaacatactacattaaaaatctgcctgacaagtgggaaggacttggcaaatggaaggcaacaatattactgttattatcactatcattattattccattaactcctccaagagcattttcacccaccttaagaaaacatgatttctatgtgccacattttcttaatccagtctatcattgttggacatttgggttggttccaagtctttgctattgtgagtagtgccacaataaacatacatgtgcatgtgtctttatagcagcatgatttatatttctttgggtatatacccagtaatgggatggctgggcacatatacaccatggaatactatgcagccataaaaaatgatgagtttatgtcctttgtagggacatggatgaagctggaaaccatcattctcagcaaactatctcaaagacaaaaaatcaaacaccgcatgttctccctcataggtgggaattgaacaatgagaacacttggacacaggaaggggaacatcacacactggggcctgttgtggggtgggggtaggggagagggatagcattaggaaatatacctaatgtaaatgacgagttaatgggtgcagcacaccaacatgacacttgtatacatatgtaacaaacctgcacgttgtgcacatgtaccctagaacttaaagtataatatatatatatatatatatatatatatatatatttatttatataaaatgaaaacatgatttctgccttgtgttgcctgggcacttgctttactcctcagtccctgaccccttactccactacataagcttcacaacagaaaccttcttttaatcatctctaagccagtcaccagactaatagtcataatggactattaacctggtggctgacttaaaggtgattatagataatggtggtattaatcacttgtgacaattacattgatacaacagtatatcattcatcaatgaaatacataatgtggaatgctattatatatattttccattgctcattgtgttctctaagctagaagagattattctttttgtcatgttgccacggccagctcatcaaattctatccataatttttgactcttttttcttctctgttgtcatcctgagatgtgggctagaaaagtggacaaatgggtttcttacgggaaacttacattggtgggatcctcctgccatcataacgaatcacaaggaaatataccacatttctcccaaatcagaataccattaaatctgtcatattgtctttagcaatgcatccaaaacaccaaggtttcatgaaacatcttcataattatttctggcataaccatgtaaattattttctgtttttgttgtttttaatcccagttttttcttagattccatgttctagttatattttcctgatttgtatcacaaggaatatataactaggaaaatgaaaaatctgtgtaccactaaatttatcttcctttccaccagtgacatgcagatcacaatttcaaaacatcagctccatggatgaagttcatgcttgttgcctgatttctaaagtatacatatactgtatctttacgtgttgggcatcattctcccatcatactgttcccttccctgagattttcttactatgttacacctatcccaaagtctctgctcctatttattttattatttaataccaagttcaagtccaaccttctctgtctacatcaatgtttacatatgaataaaatgcttcctgaaatagagaacaatagcttccaccttttaggctgttttaatttaaatgtccttggtaaggagacatgcgtaaaacttgactcacgatttagatgatatattttggcagaaaaaaaggaaagttaaaaagctacaagttaatggtactttttaaattgaagaggttggaagggaaacaacaacaacaacaacaacaacaacaaaaactaaatgaaaataaaacctaaatgaaaaaagagaaataaacaactacagcaccaatcctacagtctcttgttactcctgagtctcagtgagttgtgagcctatttttagtcaatactaaatttttcaaactacttgaagcagcgtaatatcttaaaataaaccagtggatgattgcacagtaatagattttaattttatttttaagcttcaatttagaaagttagctttggtctcaggagagaaaagtgtatgaattatgtaaatagagctgggcctagagcagccatggggaagtcactttccctccttgggatgaaagttccttatctataaaaggagtacatttgattagatgcttctctaaagtcctcgtcctcagtatttattcataatccctgatataaccaaggttacactgtcaatatcctaatctaagagccactttctttataaatgaatatttttctagaatgtttttccttgatcaagttttcaataaaatttcaaaacaaatacaaaaacatactgcttggggtttaggtttttaatttagaggaagcagttttcccccctatctattttgttcttagtgatatgttattatacacattaaacaaaaatgttaaccaaaaatgataacctattttctttccattgtgattctggaacatttgtatgctgtgttaaaaatcacacatttggattttaaattccaaggttgtgttcacactatctagcagggagatagtttttaaggggcggagggagatggcatagagaagttctgtgaaatcaaaggaaaattgtctggtttcaaggtgacacatgtcatttctgcttatgttccattggcgagaactagttgcatattcccatagagatgaactgaggttgggaaatgtagctcaattttgggttaggaaaggacaatggattttatgactttctagcatctatgcaatatacacaatggtattttatttctcacaagaagcttctgagaaagatattctttttccatttgatagatgaggaaactaaggtttagatgggctaagttatttgttcaaggatattcaatgggtagagttatttattcagatccacaatttttactccataaagaaatgaattaaaataaaaactattcctaagcttgattatagctatttttacagagacatgcaacaatgaagtattagcacttaatatggtagccatatatatgaatcaacaatatgttaacctgtaggaataccaattatctttagatacagcaaaagtataaagtgagaaacttaatttagcaattatatcgtttcatttttcataaaagttatttactgcttatgagatagtattatttactagttaagtggtcattactactcacaagttaagtggatctgcacaagaccattcaaatctgactgtaattcaaaaattgttgaatccagtgtatttgtgaaaacttgttctttgaaaaaaatcaatttgagagaatatataatgaaaggtttgcatgactactatttacgataaattttaagattaatatttttgacagtctatcaaaaccaaccagatcaaaaaagcatttttttttttaatccaagttgttggtattttctaacccagctgaaaatcctattttgctacatttaagagacatttacatcagtgtgactgatataactaatagatctctaataaacagctactgccccaaaataaatttgaaagacattttttttttgaaaatgcaaaaatgtgagagaatgaagactgagccttcagagatgatactctacacataaactaattgaagattacttttaccctatttgatgtaagtgaatgattccttcatcttattcttgcagtttcagaaaataatgctattcagcattgcagatacgcacttttaagcatatcacagactggaaatgggcagcaaatagcaataaggaaaatgtattctttttaaaatattttaccttcttttctttaaaaggagatttttatgaaggccacaacattgtgttgcacaacattctagaaaagaatttgctgggcatacagattaggggctgactagagtttatttaccattttcacctgccattcatgtaatacatttcatttaagagatcaagaacatctaattttagtagtacatccagcaaaacagaaacagatagtaaaaccccaaggaaaaaggattgaccaatatgttaaacatggtttacaatgtcacttttttgtttgcttttattttttattttattttattattattattattttgagacagagtctcgctctgttacccaggccggagtgcagtggtgagatctcgactcatgcaacctccacctcccagttcgtgcctcagcctcccaagtagctgggattgcacacgcacgccactatgcctggctaatttttgtatttttaatagagacggggtttcaccatgttggccagtttggtctcaagctcccgacctcaggtgatacatctgcctaggcctcccaaagttctggggttacaagcatgagccaccatgcccagcctggtttgtttttgtataagggtatctctgctgttcaagaaattcacagtgctttacagttaacatagaaaaacacatcatagatgtctaatttttcacatttctctgttttccaatttatccactccaaaattaactactcttttcagtgcaccatgttccacaatgatgacaagaagatatactaaaaagttctattctcttaaaattagttcttcttccatgcccactacaaacctaattgttttgcccataagcacttcactagcagctttataagatgatatctttctttagaaacactggagtacaataaataagttacattgccaacaagactcaaagatgaaagcttcagtttagacaagtgagtttactggattagtttccaaacataatttgtaatctgcctatactcacatgactaatagcaccatgtaccaatgatatactttcatcattacatctattgttcattgctaagtggtgaagagttatgtagtatcaaagacaatgtgtaattcacaaactgtgtaacggttccttgttaaagaggtaatgcaatcatggacaccaattgtaatcgcctactgatcacatttccttatgggtggtttcttgttaccagtattagtgactaagagtgaagtagaattggtataaaaataaaattttagggctaaatcttaaagaccaagcccagttgtaatttcacttacagggaaattactccaaagaggtaaagtcagagcttctgaattttgacagcccattatttgactcctgcctatagcagggtctttaggatggacagagttaaatttcattttatttctcaactaataataaacaactgataattttcatgggaaatttaaaagattcttatatcctaaacatctgagaaagccctcattcccatgtaaaaataattatgtagagctgaattatcacctgtctcaacatgtgggtaatacaatctccagtttaccaaagtctctactactccctgtcctatttcctatttttggagttatgttttcttcttgagttactgttttcatattttggaaagcaatgtgtaggtgtatcgctataaaaatggggaaaattagagataattaatatgagatagcatatgtatctgtagagatgaaaaatattattttatcttttaaaataaaagataatgggaggctgaggcaggagaatcgcttgaacccaggaggcagaggttgtggtgagccgagatagcaccatttgcaccccagcctaggcaacaagagcgaaattctgtctcaaaaataaataaataaataagataaataaagggcaaagaggatttttctatcacaaaatgacactctaaaaaatgaatgctaaaactatgacttaaccaaagtttgcctgaaaataaagattaggtgaattgcaaagaagtgccagaattttgtcaatctagatctcaccttttgacattctgcaactgggcttatgtatcataaatatctaacataagcaatgttaagttcattcagtttatctctactgtccactttcatggaagatggattttgaataaaaataaaattgcaaagttctatatatggacatctgtgcctgtagtcttcaccgtcttttagtttcttttccaactcacatgtaagcagctaaaagctttgttgccgtttttggtttgttgccgttttgctttgttgtcgttttgctttgttgccattgtcttgcacattagcagtcttgcattgtcaatcaaactgatactttgtccctttgtagttttctgaagatctacatagttaatgttctgcaataaaatcctattctttacttactttgataaaatgaggcagctgtgtatagagctctgcataccctatgattcccatttaaaggtttccattttggttgtggtatcatgtagctgaatgaccttaaggaagtcattttctctttgaacctgcaatttcttcatctcaaaacaaataaaaatcagactagactgattttgaaggtttacttcactcctgaaacactgtgtcatatttcctggtatttaacatctctgttacgaagcaaacatatggtgggtatttgcgttctctatgtcccctagaattcctaacaaaacttttatcatgttttcttattatgtcacattcagaaattaacagatttactttgtctgtcccgtgtggagatcttaggtgagggaaggggaccagggtgttgccatagagatggttgataagttagctaaggtctgataaaatgaattcagcatggaaacatagacctgccatgagtgggaggagcaagggtggatgctaactgaaattactgtgaatgagaaattggggatggggtgaaggtaggacagtggctgtgacatggctttcagagaggaaggaaaagatactcaggtcttcaaacaggaagaagatttgccatcaagagtgcataaaaggaccttaatttattagcctattattttgtttttaatatcttaattgtataaattggctgaacttgtatagtcctgtgagtcggcagtcaaaataataatgacaccactacctctaaaataataatgataatgataataatgacaatatgtgctaacattgtgaagcactttctatacatcagctcattcatttttcacagccattccataatatgatgctcattttccagatgaaatttccaggtacaaccaaccttgtagaaaagttgacagagagggtaagaaccttgtgcaatatcatggtgtaagttactgaatagacactcatctttcctgactgacagtctgattccaattatgaattaaacaccaaggggtgtgcgtgcatgtgtgtgtgtgtgtgtgtgtgtgtgtgtgtgtgtgtttccagaaaggattactcttggccctatttctttatctagtgtgtaatttatgttcctgttattgttttggcatctatccatctaccaatctatctatctatctaatctatcctttatctatttatcttaagctgattgcatataagtatggtagagtcagtctgtattggtcagcttaatctagacaatgctatggtaacaaataaccctcaaaatctcagtggattaaagtaagaacaatctcaattgttctacctccagtgtttctttattctgtggtatatcattctcatagccaaaaggggaaataatagaagagtaaaattgtccttaaaacctctgctttgtgggtcttaagtaattttgactcacattctactgaccaaagcaaatcccaagaacaagcctgatgtccatggaataagatgcacaatgctttcacacaaaggggcaccagggaaggcctctatagggatggactttgtaggcaggggaagcaaatatctggattacaaaactgtcaccaacaattaacaatagtataatcctttatactatacatgactcacctacctggccatgtcggaggggcccagtcaccagatctcatggagtcttctctagaagtagtggggcaggcaatactctgtgacatttaattctgcaatatgggaccataactttgacaaagaccttagggaggttgaaaggaattcctaatcacgtgaatggggaatagagtcccaggcttgtgatttgccagttttggtttctgttggttttcagatcccaagatcatgtgccaggataagttacttttaaaaagagaaaggaataccatactctcagagaaaatactgcccaagaatgaaaatgtctgtctgagaattatcctctcaaaaagagattgttttgggtcaagactgtctcactctgtcagtgacctatagcatgatttctaatttatgtaaaattggtttcagaagagcaggtgagaacacatgatattaacatgaaaatgattgtagggtgatgggaacagtcatattttataaacataagcaaaattttctttgttgtactgctgggacagctttattaattacaagtccaaaatattggtcctgtactaaattcaattttacagttattattcggtgttaacttctaagaagcgataaaccagaatcatctccttgtcagtaggaggaagtaattgaaaatgatttaataaagaatggctacaaaataatgtaaaggtcacattgtcttgattgttattattcttttcatggaaaaaaaaaatccttaatgtctctaacagtcctgtgtaagaggaagatattgtcaaaaagagtagtttcaagcaacttttaaaatcttttcctgtatttaatcttaacaattgagctacgatttaaccttttctttaatgaagcattcttaattttgttcctctgttttatagataaagtacatgaagcatagtgctaacaataatttaaaatattgccatatggctagttatgagtagaactaaagctaattaacaagtgtaggggaccccaagcaactgttctctcctctacccaagactgaattagtacaaaacagaattgccatttcattggttgacattgaataattgagtactaatagatattttggtcctaaaaatctgccactgttaatatatgcacagataagtagtgttggtaatgatatggtgatgataatgatgatgatgatgacgcagatgctaaagccaacttttgttgagcatttcacatatgaaagacaccgtgttacgcgcttcactagaactgtaaacttgcgacaaatttttgcaggtttttgaattatggattcaaatcctgagccagtatttgattttagactcagccccagaatttttgttgagtcttatttgtaggtagtggtgatttggtatagcagttttgtttattttttctcctcaactctttttctgccatccatggtagttttatcaaggaaaaaaaaacccaaactattgctgttcatagaggttctgatggtgtgtgtgtgtgtgtgtgtgtgtgtgtgtgtgtctgtaataaacataataaaaacacgtattttcaaggtactcatgccaattatatactgtaacagcctgataggttttattgtttgcagttaatggcaagagttttgataattaactctaacctaatatgtctagttttctttttatagaaacaagagtgaggtggtaacaggtgtatcttgatcaaggacatttaaaatccttcccataactggacatattatctctgtctcaaaggaaaactctgggtataattacataggtgctgtaatagcaaaactaggctagaagtaaaaagatctggctttaagtcccaggtaaacttataaacatgtgaatatatttgagcaaaactctctctatatatctatatctatatctatatctgtgccagtaagcaaattgacacatgaaataaatgaatcatttctcccaactccacaaggaacaaggctgagattgtgactcaagttcctacttctcactcctgggttcctgtgatcagattttgtcatcgggacttaagaaggatgacaagctgataacaatctagggtattattaaagcgacacaaaaggcaaaattctgacttttctgcaactttggtggaaaattgctattaaaagatgaaggctaaatgtggaaaggaaaggataaagaatgctatactcagaggaagacagaggaaggtcgtattgggatggcccctaggattaatgcactttaacgtaaagtgaaaaagggacttgtagcattggactgttttgaagtccccaggggcatttgagaatgctggacccagttaaatgcagtcctttaagtcatttgagaattgaaaattaaactttcagataaggaatataggatgaaagacaatttgaaattagactccacacagagatatagagaaatatttaagagaattatcctttcatattaaaacattcagtgcgttctcttgtctatatgtagggatgcaaggagaattacaaaactctgcattacctctagtctctattctgtctggggctgagagaaacaaatgcttatttcctcctgaaaactgataacctattttcaactttccaaatttctctccagataatttctgtttacttcaagagttcatagttacccaatgttgtaataattattaacatattttatttgttgaaaactactgtgtgcagcaaactacccatagcaattcatttatagtatatcataattctcttaagaactttgaagtagatatatgatcactaccctccttttagagataagtttcttgattatttattctgggcctcccatgttcccaaatagggttcaagaaggtaaattttccttgagcagcccacagtccaatgaaatgacaatgatcgagatgtaactgaactttagataatttttatatgaatctctatgtgctgagactgatgaagcacctaccttacaccgaagtctatgctttttactacaacggagcacatcaatgcctacatgcttcaatagcatgtcattcccatttttatttttttctgaatgaagaaatcattgtcctaaatataccttaatttctcaaaataccttaggatatgtttggaatataatttgaaggtattggtatagtcataatgctgtttaagagctattgtagttcttaattgtgacggtttcaggggcttactttagcaagctgcctacttccacccactcctcttcctggcatttggaatgatcgcccccatgcttgccatgcctagtgcctctcagacagaggctggtgggagaaatgtatctgcagcgtccatctgccagctccatactgaaataactggggtttacttgagcagcctttgctgaaacctcagacagtggtaaaggtggtgtttccatagttgtgccaacttaacattaaatcaggtgctatatgttttatacttgcctttccctgtcttttacattcaatttttggcccatggaagtaccaggcacaacctttgcacccatacatctgtcatctgtctgtaattctagatatgatagtcatttgatgttgtgtccaacaattccatcttccctcattctctcaggggttctttctgaggcctaggagaatataatataatagatcacactcaaagggaatattaagctctttttgagattattactctagcattgaagtttcatgtctaaacctgaggttatgcctacttgaattctctgtacagtggagatattagagagttgcagttaggactcaagaactatagctttttcttgactattcatctttcaacataagatgtagacttgggaggattctggatgcagcatcagataatagagacggcatgtgagctctcatgccacctctgcaagctgcatgaactcaggcagtttctaatctaccttagccacagtttacatgcctataaatagaaaataagtgttcaatttctctgaccatataggatccttgcaattattaaatgagattaaagtatatgaaaatggctctgcaattgcaaagcactatataactttacaggaccatttaaactgaattatacaagaagagaactagccagtttagattaagaattcccattaaaacctggtagtaaaagccagcattgctttctttaaccaagatattattcaattagatactttgttcattatttgtttagtatttgctgagcacatattgtatataaaagactgtatcaagggatatcaggttcaaagttaaacaaggcaaggattccagtgttaataagtttaaattcttacttattcatgcgaatcattataaactgtagaagctctacgctttttactgaaacctccctctgtcaaaagtatggaccaatgtctgtggcaatttgaagagtagatgctcgtgagtcattccattgcatgtccacatacttctgctgagtttaatattcatctagagtcagttgtgtttctgtccaaacctgttaatgaatgttgaactattatttcaatgatacaatttaaatattacataaggctatataattaggtgtgagctaattatttgtaaatgcttataaaacagtgcatattagaaagaatgtttacacttgatctttttaaaattgatgaatttgagtgtgatttgtatatgaatgatgacacttggataaccagttggcagactctagttcaaagcaaaggagctttggatctattttttttaaatggtggacaaagtgtgcattttgtagatttttagttaaaatgcattttgaaacattgtataaattatattcattaataacttataaaagactccttttcaccaactgacctagtacaagctctttttgtatttgataagaaggtttctcctttataagactgactgtagatataatgccatgaacatccaattttatgtttatctccttagcaactagcttagtgcctggcacatagtaggtgctttttaaagacatgctggagttgaaggaggtaactagaagaaagatcatgaagtggaagcatttgaaatgaatcttgcaaatagggagaaattgggtttgatagtgttgtggacagaacagaaagagcatcaatgtgtcctcttaagatcacgggattatcatttaatgtaattgaaggcatttgaatttctatatctataaaatgtagaatagctagcagtcaaagggtcatatagaaactatgcatgcataaataaatcagtgctgtcattaactttccaatatcttagtgtcactgaaggcaaaagtcaggtttaaaaacattcttaactttaaattacataagaagcataagaaaatttgtgaaattggaagagttccagacatatatttcttaattcctctagaatacacacaaacacataaaaataaatgcttactttaaaatttgacaagatatatatttatgtaacttgaactaattttaaattatttagaaccaaaataaaagttgcattggctaaacagcgaggaagttgaatacttaaacgcaattcatagaacctatatcctaataactatgagttaggcctctgctgcggtgttgcacctattaaaagcaaatcaaaacaagccaaaaataaacaaattggacaaatgaaaacacacatatacaaattttaaaacagacaaaaataactgaatacatttaaaaaattaaatgattatagaatttacttccactgagtatattaaaagaatagataatctatataaaccgttcgttacacatattattgaagggttccatcactagtattgagacattcaggaatagtctgttttatacttcagattatttaatgttttttatcttcatgacagaccacccattatatttcaattgtcttgaaatataattttaaaaagagagaaaagatgaaagatcaaataaagcaaaaaagaaagactttcacaaagatatctctagataaatggcttcatcagtaaatatatttaaacattaaagaaaaatagtattcttatacaaactacttgagaatggaaaagatagagcatgaattttgagcccattaaaacctaacataatagtcaaagactttgtaaagcaaataagaaaataaaaaaagaaggaaggaaaggaaagaaaagaaaacattaaaattaccttattttgttgattcttgtttatgtttatttttcattttaatatctctaaaatttagacatttaagaataaatgctataatatcttgcactatatatctgggagtagcttctggcacagtcaagaaagtaccaatatgaaaacagcttagaatatattcaacatgaaaatcattgtatatttgaaaacaaagtgtttaatgataattaaaagatgactaaatgttttaatattctataaagagttaactaatcatatctgagaaaaaagaagggatagatattatttgttttctatcaataaaatctgtaaatcatcctcctgatatttttttttctaatttctatttcttcacacttcaaacattaaaagtcaaagatgcatttgtttggaattagtcatggataagatataatcatctttattggactctaataatgttctaggcatatgaaacctttatttatctaattatctaattatttttgcatgatgatggtattgtcataccacacatctatatttaaacaaattttcatatggaacttgataagcattaaccaataaaaaataattatgcattctcaaaacaaataaaaaaatttagttgagctcaacctgtcttgggagttacagcaaaaagaaaaaagtaacatacttgtgtaagtgtgtgtctgtttacatataatcacatgtatatttttaaagactgacagtagcttcttttcattgggtatttactatgtgtcaggatctgagctaagtgttttatggcattactctattaatcattgtagtagctatgaggacttgtgttattattattctataggagagaagcagatttagagaagttaagaaatgtaccagtgggtcacatagtgtgtagcaaagccaagacttgtaaatgggcctgtctacctccaaagaatgtgtccataaccactgtgttaatgtttttgtttgtgtgtgaaacatttaaaataattataactatagaagcaacatcttcaaacgactggtcatcaggaaatctggaagaaaagtgattctcttttatccatataagcaaaatgcagcaatgaatgatgaatcaaggtgaggaataactagggttaaagcaatgctcagtagagggcctgagaggcatgaggaaataaagaagcttccccagagagaaagtgtttgagctgggtcttatcatgagatttcaaatagctaaagagaaaaaaggggcatttaggccaggatagtagtataaataaaggctatatggcggaatgaccaagtgttttcaagtgattgtgaatgtttttgtttaagagtccaattggcaacaccatcttcttgcctcccatgttctaaaacaatagaaaaatacaacaaataaagtgagtagaaagtgaccaaagcatcatcttttttactgatattcctgatattgaaacattttgcatatacctatgagagaaattgctttataatattaaactccagaactagaattacctatctagcagaatcagaattactcacccctagaaaaacagcatagaataggtatgccctttagagaggccctcccgagaaaaaggaataggaaggaatgcggcaatgcacattcagttttgttttgttttgttttttgattttgtttgtttgtttgtttgttttcctccagggtggagttaaaggacagagagaggctggtagtgttattctaatgaagttccttcacagggaaggaaacatgaggagtgaagaaaaagcatccctccacctaggccagacttgaaaatctgcatttagaatctcaaaaaagcactatttcttaatgcgccgcatgacacacagtgctagagatccagtcctttatacctagctctttctaaatattcctaatagctaataaatagaagaattgaaatacgcttctgcaaaatgatgcaaggaatctcataagtcaccaagaaagggcattacctacacataagagcagtctcaaaataaataagatgcagtttttgctgttctttctggtataaagagatgtgtgtgtgtgtgtgtgtgtgtgtgtgtgtgtgtgtatttgcaactaagcatatcaaaaacagaatagaatgaaaggtttctcagcttagatgatgtctctttgaccatacctcaactgtcttcaatagttcttataattatgtcggaaaaaataaaaccctgggacaaatatgctatattctgagaaaacagaaactttcactttctggtagagaaacaactagataaatctattgcctatttttttctcttaatttccaacatttatatatatatttatttccagttgaatcattgagcaaactctgtttggtgcgagtgttctttttaatcttctggatattcatttttaccctgttgcttgctcatctatcctttctgtagtgtctgattttaatatacgttttaaaattttatcatgaaatataatcaaagagtgtctggattctagtggctaagtcatttcccaccaagattttggattatataatcattgaggtctcaacgcaaatgtagatagcagcttcactttaaggcatgatgcataaggtttgaggtcttgtgccatttttgatagttaggattcccagtttttaaacactacttgttaattgctgaaaagttattaaggcaagaagacacgtcagttgtccaaagaacagcaagaagttcaggttggttgagagtaggcatcaagcagaagaaaattttggtttaatcaaagtggtggtttgtcagatgaacgtaataaaagacaggagaattgagggagtggttgtaatgaccaaccaaaaaacttacacagagtaaggaaggagagaccactgaggggatgagggaaggttataaggtcatagaatcaatagacaaaggtctccataaagtaaaaagatttggaatgctagagtataagagtataagaggggcttaactggaaacaaataagagatgttgttccatagtaagattcatgaaatagatattatggaaaggttacagttattaatttaaaaatagtaatgtcttgagtatgccattgaagagggtgaatgaaatagtatggaggtcaacctcatacaccatccatctagagaaatttaagaaacttagaagacagagatttgtgggtcatatttttgaaacctcaagaattaatacgaaagatgtggagtatgtgatagtgagccagtagttaaaatcttcaagaaatgagggggtaatgacatttcatattaagattagacatggtagattcaagtcagctagtgttggtgcagctattgagagtatgactgaagaagtcgtacttgtgatttcatcttcacccctacagatgaggaaaggcattctagaggattggatgtttatcacagtgtgcaatccagtgttccacccaccagtgggtccctgataaatggaaaagcctatggaaatcattgtcctagagtagtgtgtgaactcacttttgacctctattgtggggggatggaattatattaagtgtgagactccacttgacatctttagatagagttaaaactttgggaaaggcagatgttatcccagcatgaggtttccctctgcacaccaaaggtggtagatggcctaggaaatgcttcacatcgtccccaggagtaattccaaataccttagcatgacatacatgacacttcacactcaattctccgagcccatctttctccaccttccccttcacctaattctggcagtcaacattatagccacatgaactgtttgtagtttttcaaataactcaggctgccacatgcccgagggacttttcacttgtttcctctccctgaaacgttcttcacttgaaaactcctgtatgtccttgaagtctctcattgtacatgcaaggcactttgcaatctggaactctcttatttatcctgtatctacatttcctaccactgggagtggcttatagcagatgatcaacaaactctggttgttataagttcatttaatttcccatagtaattaatcatcctgaacatttttaaatttacaattagaaaattccagaggtaatttccaggcaccattacctctgcaaacctaccatcattagaattcaaccgtggcactcttaaggatgaaaagaaagataataaaagtcttaagtacagacacgtaagtaatggagattaagatagcaggattgccggaagctcataactcttgttaagaatttttaaagcaaagttatcaaatctctgcacagtggaaaacctatgtgttttgaatataaatgtagtttttttcatgaaaatcatcttttcactagtgcctgtactttagatatttgtggctaatggcatttccccaaaattaaaagtatgctagaaaaaaactaagatcattctaggtttatattgggttgttctagtttgttttcttcatctaatcacctatatggtatgctctagtatatgactaaatctaagatttatgtaagattataaaatttggggtatctatatttgtatcatagttcaaccatcactggaagctcatatctccatatgtgagcaacactgagatagggtatttagggcagattagagattctgttttgtcaatgaatgaatgaatgacaatgaatttgagggctctggatatgatcctatcctcctatgcaccatgataccaaaaccccattattaaatatgttgtctcctgaattcaccgtattttgtcttcaggaatcccctccacaatgcaaatgcccaagaaaggtaatcattagacaactagtatattatgctttctatcagatcaatcaaaggaagggaatgcaacacaaaaagatttgagcatagacgtgaggaaactgacgatcgaaggatttcagtaacttaaagtcatacacttagtaagaaccagagtcagggtgtgaatccagatttgttctgaaaaccacatggacgtagtgagagcacagagtgctgctcagggtaaatggtctgtcaggtgccctgtgtgaagttatgcaggaggtggaaagcaaggctttggtcacatgggacagagagtatcaagagaccatttcccagagaaatggaaagcatgtgatatataaattcagtatttatcatgcttttatttcaaattattcagaagaagggaaactcctcttttcttttacctgctggcccaattttctgaataccctccctttcctggagatcacagaaggtggctgcacgccaagccaaacatctcttctgcttaagttttccccagtcctcttttctggctgagatacagtgaggaggtgtattgatttcagctcagattctcatctgggtcattcaacccgcattcagcaagtggcattctttcactgctggaggcagagagacactgtcagtctctccctggaggacagttgactaagtgtggtaagactgtttgctggcatcccttcccttgtctgggtttgttttacataacagcatgccacagctcttcaaggaacaatgctggaaatgcccctggcttcccttctcctgacatgtaggagggaaacatgagcatttgcaaaatgctgttgctccaaactcagctttcagcaggcagataataaatattcctccatgctgagctccttcctctcctctcctctccctcttctatcatatggttatctatgacagtgaagctctgatactgtacttcgactttttgaggaggcaggatgaaaagcaaggggcttcagtttcatcatttctaggatggaagaattgaagaagttggtatctaaatgtgcataattctgtggtcatggttatcctgttattatttcagtatcatggaccaaaatctctgtgcatgtcttttaatggaatgccattgtgagaaatttttaaattaagaatcaagcaactaaaattctacatctagatctggtactaattatgtgaccctgggtatataatttcaactctctgagtcgcagttacagctggattaggtgatccttgatattctttctaactgcaaatagtctattatatactttcttttttccagttggcatatcttttatttactttaaagtgatagtattttagagaaataattttagaactgaaaacacaggaagccttttcgaattttattagttgttgattggtgtattttcttaataagaacaatagccaaactggcataggaaagcaagaaagtttgtgatcaatgtttatgtcaccagaattttctttgcctttctacagaagataagctacatgaaatcttggtgaatttgacattgggtaaggttacagattttccacaaaagttgatacatggcaaacaagaaaagggagagtttgtttttctccttgttcagaacacaagtcttaaaacatcactaagggtatctttcttaacgtgaaaaagattaaaatgcaaacccaaacaaagaactgtaatacacaactagattctcaagattataagaccctatgagttacgtgaaaacatttaaaaagtgaaaaaaaaaatgatagtaacattcaataacatttgttaagcacccggtctgagtccttgtgctaaaacaccataggaatcatttatttaatccattcaacaaatctatgagatacagatgataattttttccattttcatctgcgaaaaaaacagaccggacaagtaaagtaacatttcttgctcaacattataaagcaaataaaggtcaaactaagaaataacaggttttttctaaatttttcatcaaatgttgtattccttaaatttcaaaaataaattttagagcttccactgttaaaatttgatacatatattacatatgtcaatttaaataacaacactatgaatttttaaatattaaaattatatttaatgtttacatagggttttcagagatctattatttaattgaatttgttataatttatagggaagagaaagagaattagagaagagatcggattcacccaagatcacacaaagtcacatataggcaggaattggaagctaggtctgctgactttgaatctagtactttgcccaccaacacagaaagtttcctttttcagagaagttgagctttttcgaaccaactctatatagtatggtaaagtgtacagaggttttaaaatatatattggcaatgatttttaacagatatcttaaaaatatccttgaatttcacaaaatgaaaaacttcctgggtgaaagaattccatgggggcaggggtgtgatagttgaaaatcgagtgcttgagaataaagagcaagtaaggtcaagtttttaaacctataattttgcagaatattcccaggagtgatttgacatcttggggaacattttgtgatttgaccttttgcaaccactgcctgcagttgcctgaatttgaacaattattttttttctagctgctttcaaagccattttagaaggcttggtattctgataacattaggtttctctacctctgtggagccttttctttaagaaaatgtcagtgcctgggttagattaatcaggtccggcttcaaatgcaaagttacccaggctcatcaaaagggtgaaaatgacaagaaaaataaagcgcttctactaatacgcttatttctccaaaataggtttctgggtttggcgttatatttattaatgacatttctctctttatctcttgattttgacccatttgtgagatagaattgtaaattgaagagatagtattcaaatatcatcttgattgcaggtaaccttggtttgtaggattcgtttttatttacagctgggattcttactttttctcctccaaggctaatatttggtatttaccagctcaagagagatgtggatgtggtagagcatacacttgcttggaatagctggctgacacccactgagtccccatagaaggcatggagagagaccatgaggtcatcatctaaacagtaatccatgccttgattcaagagagcttatcaaatgaaggacaagagcaaggaattatgagatccattcaataagaaaacacctaagtgatgaagtgtcttaatttcaccaaatagataaccaaaatgagtaaagtgagaggagaagcagtggaatcttttctttccaatacttctaaaagggtgtatatttctgttcacaggtcaggaaaaaatgagggaagacaaaggacattatgactcctaaagaggagtgtcccccacagcaagtccagctgaatatgtgtactatagactatagtaaatgtttcctaaaagcctagtttcgtgataatatatctttggaaaatgctaagttaaaggcaaacatcttctagtgcagaagcacatatgtgctaatgtgcgtggtgaacctccagtggtatcgcacgctgtttcacaaaaatcaaatgttcctgattgaagaagtcattatttttagcatattatgaaaccaatgttcaatgaaaaatattacttagaaacatcactttaagagtattcccaactatactcttcttctttctcctccactgtattctcttctttcttttttgtaatattttaaattctggtggttctcaaactttggtaggaatattaaacaaggaatgaaataagctatgagctgaaagaacaaaaatttgcaagatttataattattaaggattacaaattatttataaagactaaacttatatagaataaatatttataaagacttttaacatgcatactatcaatccacaagatagcatccatctgaatataatctgaatccacgtgccatgattcaaatgtcccccagtgttcgtactgcccttccaaactttgcagctgttaacttgttagaattattgaaaaataattggtaagccttggatttagggtcaaaatgtggtgagacacctactccaatattagtagctataaggaagttaccacaaatttgaatatgtgtatactagtcagtgaaatattctaatagtaaaacttaggttttgggtggcattcagagttcctagtagagccttcggcacctaggagaaaataaaaaatggtggtaattacaacaaatattgattaattacaaccagttattgcaacaggtattgcaagaactctgtcaggttgctatggagaattttgtcatctctattttacaaaataggaaactgagtctcagattggttacttaaaataacctcctaatatcacaaattagtttttgaccaatttgggacacgaacttggttcttactaaatatactgtcctgtttttataaattgatggataccaagcaatttttaaggagaacaagattctatctccagagtagatggaaaaagttgttccccgtggataaggcatctgtttttcaggacagacctgtggaccaggcatttttctgttgagaattctttgttctttcaacacatcacaaatagaatttctactcattttctctgtgaaatgcagtctcatcatttctatgtcagaagggcaaaatgtaacatatcaaccccaactctgtggctctgggattacaactctgacaaatcaattataatctcttactcaaaggagcatatctagcacttacctaactatatatggttgagtagaagtaaatgactgcaacatttctcagaatttatcaggtcttcactgacacctctgtagatcccattttctctattaaagctaattttctcatcaaagttaatagatgcaactagactattatatctgcttcttattggcacctctcttctgaagtgctgaaactatttccattgaaccatgagagctaagaatggaatatgaattcacattttaaaatttctcctgaaatgggacttctgcaaaaggtaaattagatctgttagtgtcacaaccatactctatacaaacattaagtacatataaaagaatattttgttaccttctgacaaaacctgttggtatgtaattagtctgttcctcagaaattgagttgaacaaaacagcataattttactaatgcaaatatgtgagctctaataatgtattactggctctaacagtgggtgactgtaatagtgtattactggctttcatggatgcattaatattagtagaaacaagcataagattggctactttactattactcctgaagcctgaaggtagccttttaacaaaggaaaaaaaaatcactcaacaggaatatcacctaccaatgtcacagaagttattcttcaaatcgactgtcctcaaaaagctctatgtaccactttttctatactctgtgttcgaaagatgacaaaacactttgcctactattagcaaatgtgtttctcacaatagccttagcaataagtttgtttattcctactttagtgggagaatttaaacaacttactcgcatttctgtaccttattatcatgattgcatgtgctttaatcctgggactagatctgctactgtgaattgccctgcgtttatgtaaaacatgttttaatatctagttagatgtttgcaggagttacagttaattataccaggaaattgctgtctctttcgatggatcaaagtagcaaatgtattcatttgtagctgtagttttagatttctgagctggagttgttttatttatgtatatcccaaggtgaacatatttgctgcatttttttgaacttgactatggactcagacaaatgaatagcattacaaaattccacattgggctaggcatctgtggtagcttttttggagggtgagaaagggaacctcttgcataaagagaattttctagtaaaggaaggcagaaaactgggatatcagcaaagacctagctccatgaacctagagaaaaccactacatttggaggctttgcaaatactgagctttctttcatctaaagctatccgccaagagaaaatgtctgcttttgttgaggcagaggcaggctggtattccagacaaatgagttttcagcttcctaaagctaatacgtgcattatataatgttcaagagtaaatgaaggctctgtttgtcattgagggccccagttatccaaaccagctttctatattaaccacattcttgacattcaacaattagtcagctttccacattgtttttgtttgttttctttggatttatcatcatagtcctaaccactgatttagaacacagaggctattttctacagaaggagtatgggtttataaggcaggattcttaggcctgccagtaggtagctctgtctctttggataaagcatccttctttgatgaacgtcaactgcttaatctttaagaggatagaattggttggtatagatttattctaagacactttctaactctcttttttgaatacttagtaagtttctcctatgtttattatgggtcagaacagtgtttaatcatatttcatagattactctgctttgacataactgacattaacgtaccatcctatgtgccaggaattgtaccaagaatggtatgtatattaactctttttatgttcacaatatcactgtgaagtggattctattattattcttactttacagataaagaagttgagactcagagacatagaaaagttgcctgaaatcacacaatcagttagtgacaggattcgaattttgaacccagttaatctgatatttgcccttgcagtggacactgttgatgcccctgccaccctatcacctttcttgaactcacacacccatctctcagatgcttaggggttggctgctgacagctcactacttgccactttttctagagaaataccactggccaaaataaagccatctcagctaagagacgaagaccatccctcctcagcagcctgcagggaacacattactgctctccttctagggaaaatgattcaaaccagttcccattcttcagtatagttctccactcctgccctcggtggatattcagatggagtctttaaaggataaatttaaaccagaaaaattatgtgaatgcactttttaaaattatatttccctcaattgctattttgttcttcacgaacttaatagatgaaatcagaacggcaaagtttttaaacaaaaacacacctagtagacttggcacactgtggtgcttgtgttttagcagccaaacccatttgttctcttctttcactaattggatctggctgagaatctcaaatcaccaaataatactttactaaacataatgcagccactctgataaagctgatttcccttctctcttttttttttcttggcaagcatttaggattgctaacagctcactgtgaccttatatccattgacactaagttcagcaaaaatttttccagaagcagtaatttgtaatgtaaaagtttaatatcttaaaagccaatgttgatctccactttggtcttaaagacttttggtgtatagctcatctagaattttcttcatgtcatacagagctaaagcatttatttatgtaacaaataattgtggaattccctctatgtcccaggcactgtgctagatgctcagaataaaatagtgagcaaaatagctagagctacatcccttatggaactcataaaataattataatctagagtataatccagtattcaccatcatatatttttattgtgatcttactgagctcttactatgatgtcttactgaggacatttgatgtaataagagcttctttcatgatgagatacattaattgacgtttgaaaaataaatggagttaagtgagtaaagaaagatgggatattagagttgaggccagaggaggcagcaggtgaaagaaccctgtgggaagaggaagcagggtgaggaaggcatgtaaagaactacaagaaccccaatcagtgaagaatcactatttaatatgagtccgggaatatagtgagggaaaaacaaaacaaaacaaaacaacatatgaagccctagagaacaagttaaagaattttagtgtgacctgatatcaatgggcaattattgaagagtctggaggtatttatatgtataggcatgatcagagggtagagaacatttcagaagttgagagcaacatattgcaaacaaggtcaaaataatgagaattttccccttggaaaagcagaaaataaatcatatggctgagctaaaagtggggagattataaagctgggatggttcaggatggatcaagcaaactgggccagaatcacacgttaagcagtgcgaatttcatactgaggtgctcaaggggaatgacctgaacaaatatgtactctagaaagaaaagcttggtttagcactgtccaattgaatgttccatgatgaaggaactgctctacaatctgtaccgtccaatacactagtcactagctacatgtagctctcgcgcacttgaaatgtggtttgtgtaactaagaaagtaaatttaattttttaaagtatgtttaatatggctaccattttagataggacaggtgtagtcgcattgtggaatatatgtgtgtggggtggtggtggtggtggtggtggcataggtggtcagaaagttggaatgaagaaaaggggtaaagagattattcagcaatctaggggagagatgatggcaggaagaataaagatggaaaaatcatagaggcaagaaataaaaacatttaatttacttgtctagggctcagaggacacaaatagaataataagagagaaagacctaggttaaatttagattacccatagccttgatgccaggtttagaagcctgggctttctccgaagaggagcgtggacctatttaagtttagtgaacataggtttctttactcagaattttcaaaaatgtgcctgtcagaaagtttaattgtggtgtgtaagataaattagcatgtgtctgttatatgagaactcttgtgccattatgcagcagtgactttcttggcctgacaactccttgatggcaaaagctagagcttagctatatattttttccctctcttgacctcacaggacctggttggcaggagatattgaatgtactccagaagagttaatgagagaataaacaaccccgagaatggtgggcaggtgatgaatgcagaaactgcttgagagtagcctttatagaagtttgcaactgattaatttggaaatcttttatccacaaaaatgttctggatcccttaagctcagggattgggattctgccgaaagactgagtattctacctagacttctaggcacataaaaaaccgtgggaaaattttggtgccaattgcatggaaatatttgaaaactttttgtttctgtagtgtttatccaagaaattttaaaataaaatatgttttttatatactttcagattatcttcctaaaagttcacatcattgtgtatccccaccaacagtgtgtacctctgatccctgtccacatcttttcaggaccaaacattaccaaggaatttattttttcctcaatctgacaggctaaaaatgaaatactattatttgactttgaatttcactgatcccttctgaagttgagttttcaaatattttgtatttataagttcttcattcctttttttagcttagttaaaaatttagggttttttttctcaatgacaaatgggaattctttatgtactggtcatattagcctttgaattcttatttattttggaaatatctcaccacactcaaatgtggcgttttgccctttaaaactagttagagcactctttctttttcttttcttttctttctttatttctttttttctttttgaaacaaagtctcactctgtcacccacactggagtgcaggagtctgaggtgaagtagaaagatctccacccacccactgcaacctgcaacctccacgtcccaggctcaagggatcctcccacctcagtccctggagtagctgggactacaggtgcatgccaccacgcctggctaatttttggtatttttttttttttgtagtgatagattttcactacgttgcccaggctggtgttgaactcctggactcaagcaatccatgtaccttgtgctccccaagtgaggggattccaagtgcgagccaccgtgccctcactgcagtcttgataacacagaagtctgacattttacacagtcgaccccataacttttttcctttatgccttttaaattttatgttatacttgacaaagctttttccacactaagattatatagatattctatagttttcattctgtagtatttatattcactcataaatttggatctttgttccatcttaaatttattttgtgtattagagtgaggtacagatctaatttcagaaaacaattttcccaaatgaaaactcaatcaactgtcctgcaagcctttggtcaaaatcagcctcatggaattatgtccccaattcaagtgtttaatgagggatgcaaaagctagatagaatgcattgtcccagaacatctctctgtctatctgggttgtagaaaaagaataatcttatgtccttttaacacatttaatttagaatcagttatgaggccccctatgtcttaatctccgcattacctaatacactgctctatgcatagcagtgattcaaaatatctgtggacttaaaaaaggagctagaaaaaggaatgtaaagaagagtacaacactatttatgccttcaaagttaacctagtagaataagatacactttattcaactatcttttagttgaataagagtgacgagagaggcacaaactgaagatatatttgatacttcattttttcaccatcctgataaagcatttaggatatttacagataatatatgcaaaccattcagcccagtgtctacacatagtaggctttcatgactggtaacttgaaaattattttctattatttcaggggttcaatagagggaaagacttctttaccatggaatcttcaagtttttaagatgagatagtttcatgtggaaaatgagaacctaaacgctccactaaatattaaattttaaaactatcgtatggttatttaccactacaacttaaaaaaaaaaacctgccattgatagtcttttcctaaaagtagacataagaatctcacacacaaaaaagataaacattaatggatgttgtttcaaattatatgtctccgctcttcaatcatagccttcatctataaactctaaattaagaccaaagcaggaattaaactcatacataaaatactgtaactttaatgtcatatgttaggataaatcaataggaggaataaatctgaagtggcagaagtaaccacctttgacttgcttggcatttaaaccttttgggcttgggaaatccactgatgccgcactttaaggggatttgattttataggctctttagcccaagagttttcaggaatacaaaaagcgacgtggccttggagatatgacaggtgtcaggctgtcactgtgaagctgctttgcttttaatggcttgttctcaaatttgaatccataatccactggtagaaaagctgtagacttgctggcaaagatgagagatgctcagaagccattaccttataatagaaattggtagataagtggaccatggaagtttagactctgacctaaagggaagtggataattgcattgaggtaattatcttgttaactttggacaaaattaaagttcacctttaaaagtgccagatcattaataccaaagtgcagatcttcattcacttacatgataaggtaaaaagaagttactaaaattgtctagctttatttaaaacatgataattcgtaattttttatttaaacacatttaaaatgtgcagaaagctcaaggactgggaaaataggagaaaaggtacccctgaatattattatttaaatgaaaaaccttcctttattactttgcttttcctatctggaataagagaggatgcatttgcctttagtattctgatcaaagaaatgagaaagaaaaagatggatgttaatagaggtcatctcaaattaaatctttttactcttcagtcatagcctgtgcctgttatattctaaattaggacaaaagcagggaccaaactaatttatgaaatgctatggctttaaatagcttatgttcaataaattaacacagagaagcatatgctgtgggaattagataaaatctattatcattgataaaaaatttctatcttcaagtctttaggcacagttgctagataattgctacttattgatctctgggaggaaactgatgtcccattggaagcctaattccctgatcagtgctaggtcatgatcactacctcagccaggtctgacttaaacaagtaactgtatgccaatctaacaaaaggcagtgttaagaggcattcaaaaccccacttaggaaatattgcaaggttaggggacagtctactccctcaaagagcagccaataaaggcctttctatttcagcagctttgaggggtatggggtgaagcttgagagtgggaaagaaaaactagactgagtagtaataactcaccccgctaattcaatcttctctgcatgaggcttgtagggcaccttattttcaaatcagatcaaatcagccaagtaagtagggaaacgtaggcacaaagccaactaatcaagctaaaagatatgatttgaatttaattatctatgtattttacagcaaaatataatttagcaaagaaaaaagaagcaacatttgaaaagctatctcatttattcatctcacattgtgagtgcagatacaatatttgaaactgatattctctaagaatattttaaaaagatgtagtaactgagatgtgtttctctaatatattttctgattttaaaaactaaaatgctttaaaattttacttgggatgattcaaaatgaatgacgtgaaattttaagagcaacttatgcatcatgactttaaaaagagacttcaaattgtgtcacaataaattgttctcatgcatcgctacatggttattcctttattcttttagtagtgtttcttaatatattctctggattatttacatacattttgcttcttttttttgtttgtttcttttctttttttagaaggagtctcactgtgttgcccaggctgtagtgcagtggcgccatctcggctcactgcaagctccgcctcccgggttcacgccattctcctgcctaagcctcccgagtagctgggactacaggcgcccgccacaccaccaggctaattttttgtattttttagtagagacggggtttcaccgtgttagccaggatggtctcgatttcctgacctcatgatccgccctcctcggcctcccaaagtgctgggattacaggcgtgagccaccgcacccagccaaattttgctttttaattcaaatgttccataatatatcttcttgatttttagagaattttatgtgtacgatttacaaaggcattaattcatttgcacgattacttgacaaatgttactgaatgcctgttttgagtcatgcagaatgctaactactagtttgcaatggtgagcttaaatgggaactgtttgtagactcatgcagataaagtccagtagggggaaagatactgcaaaaatcaccacacaaatgaatatacacttaaaatgtaaagtaactgccataaaggaaaaccatgtgattcaatgaacatgtgaaaaaatgtctcatcataggaatttagttataaattctgagtaaaatattcatttattagtgtcaagcaccaggatatccttgtatgttttttataaagattttgtcctaagaaatgagaggaaattgttacaaaacctagaatgaattgcagacaagatacgcacaatgtagaaatactgttccctaccctcctcaccaaacatttttataatgtttgtgaagtaggaagaaaggacgtcagaaagcacagaaagaagaaaatatgatcagtatgctaaaaatgtttccttccatctagtagacaaattgctctaaaagagttgggattcagttcaggttgtgtttcatttttgttttttaacccaagcgggcaaaaatagttttcaacataccacttgtagaaaactcttaatttaaatgtgtgtgcataaccattaaatacatgcttagttttaatgttttccagtgattgataaagggttgtatggtgttatctttggtctgttccaggagattatgtggtcatgtctgtctactttgatctgagcagaagaatgggatactttaccatccagacctatatcccctgcacactcattgtcgtcctatcctgggtgtctttctggatcaataaggatgctgttccagccagaacatctttaggtgagacacctttgtttatgttgcagtttctcaagataagtaccaaatacaagtaatttttatgtccatttctatgttgatctgctttaaatttagcctgcaattgcatagaaataccatttgtttcatattcaagagaactggcatttttaattcacaatagcaaagacttggaaccaacccaaatgtccatcaatgatagactggattaagaaaatgtggcacatatacaccatggaatactatgcagccataaaaaatgatgagttcatgtcctttgtagggacatggatgaagctggaaaccatcattctcagcaaactatcgcaaggacaaaaaaccaaacactgcatgttctcactcataggtgggaattgaacaatgagaacacatgcacataggaaggggaacatcacacaccggggcctgttgtggggtggagggattggggaggaaaagcattaggagatatacctaatgttaaatgacgagttaatgggtgcagcacaccagcatggcacatgtatacatatgtaacaaacctgcacgttgtgcacatgtaccctaaaacttaaagcataataaaaaaaaaaaaaagatttttttacttctatagttgggttctccttagttaccttgataggttttcttgagtaacttttcttaagaaattttagttaactattttttaaaaactgttttaatattaacagatgtgtttgtttagttctctggataatatgctgaagctgcttgcaccagctcatgaaagttgattgtgtttatctcttcccaacttggtattcggtgatgccacattgttaatgtgaaatcacccaaggaggaaatattaacaacatggaaacaaaagtcagggccttcttttttctagagttaattgttacacattcaccagcacgccattggctgttggctattccccacgagtaattattgggataacatttgaagtaatcggctctttacagaacagcgatggaaaaaattatttttgagaaaacatatttacctgtgaaatttttgggggaaaagcgactcttaagattatttgcaatttgctcaatctaatatatatggtgatctttgtcttgaattttcacatctgtttcttcacatggggaagaagactcacacagactaaaacaaagcccaacacatgaaactttttaaaaccttaactaaaaataaagctagtggacgtgaacaaaattcaacaccctttcatcagctatgtaaaacctagaaccacatcccttgctaactgtctaaagagtcagtagggtgtaatagctaggaaattgggttttggagtcccacaaatatgggtttgacatcacacatttaggataacattagaatgtcatttaatctctaattcacagtttcctcatatataaaacatgtataatttcctgtacctaacttattgggttctactagggttaaagtattcgatgcaaattgcacataaatagtaaagcctcagaaatgttggctactatagtcattttctgacaaaatggtctgtactaagttattaagctgagggcagaagtgattactgggggaaaagacatcatttgcatatctgtcctcttccaaacctaatttagtttcccatctgtttcaaaagaaagttattttgatttttcctgttatatgtggtactttgtgttacaagtccttctcaaaaattaaaatatcttgtctaatgctacacgctgaaacaaaccccaaatatgttgagcctattactttcggactattacttgtcactatgaacagatacatactgtattacaagcttctatgtctgtcatcagaatgtcagtcttgtacatctctagtacagtgcctggaacatggctggtacctcaaataattgttcaattgatgtatacacttatgtatggctggagcaaatacattgatgtattctaatccaccctcttcccaaaaacattttaaggaagagatttccaatcaatctgtcctcttgaagcctggattcttgctggccaaaatctctctcatgacttcttgggtaactcatttaacccactcagtaaataagtgttcactggcaaaggatcatggtggaagaagggatcaaagtgagtgagttttggaatgagcaagaggcccttaagcaaatagcagataggtgcttctacttgtttgtaatttgtaagtcaggaatgctcaatatggtctctatgtcttttctattcttcacaacacctgcatgtagaagttgctgtaatgatcattattatcacaatttttagagctgagctaaggaagtagaggtgctgcaaggttagatgacatccacaaagtcacagcataaggaggtagtagatctgcacctcagctgatgagacataggtttgctctgggtaggaggccttggtgaagaccaattgtaggtacaggtgagaagcggagctgagccagtttctctattttaactttgctgtctcagttttctagatcagtgctccttaaatttaattgaacatttaagtcactagaggactttttgaagtgcagattccttagttcaaccccaggaaatgcttatctaatgtgtctagaacgtgacttaggagttaggattgaaaaacaaacaaacaaaaaatccacaggtgattcaaacgtgcagtcgccttttagaaccctgctctagacttcattgagtcccattacttttctcaatgtttacaatccagagttaaatgagaggaccttaagcacacgcagaccttaagcttcttgccacggaacagttaggccatcttgtttgatgagcaagataaatttatccacgttgactcagagatactggctgttttctgagcacagagtcctagagtatgggcagccaccatcttggagcatataaaagtgaatgtagtttggtgcccaggtggtagttggtgaggcttatttctggtgtagtgacaatgaatgaaatgaaaataccatttggtacttgtcacctaactgctttgaggtgaggtaacatccctgaagagcttacttcatgccaagactggaggaactggtaaaagctatggatatatttcatccacccaggtaagataagtctaacttatttacttatcaaaatggaagctgtcttattgttggttgaggagacaatataaaccatccctactctgcctctcactattgatgtcattgcagtctctttcctgtggctccaggcagagccctgaaaatatcatgaggcaattcttcaagagtctacttctacatggctttgatgaatgcctatgtagcctaaataacattttcccaatttgctggaacagtatttaacttgcatgtcaaaatttgtttctcccaaattatcacatgccacattttaaaaaaattaactcatctacagtacctaccataaatactgacattttcacttgtcgagggtcaagtatagcctcaggcctgattgtaaaatgaaggccacagtgccaatttagtttttcagtcctctgcaaaaatatcagttgtgattaggtacaatgagaaacttacatgaattaatgcatagacaacctaataaaatgatttttagttaagaaatagaactttcttttctaaaataaaaactatcaatacctaatatttattaggattttacaaggtattggtaccctatgcacatttttaaatttaatctttactggagacttataaggttctccatcattaccaccaccactcccagtttgtagatgaggatctcaaacctccctaaggttctaccatgataatatggaagacgccagacccatatcacctccccagtcaggaatctacaataggtcccatctgtctggcacttcatgccacatatttttcatgtatttatggagctaaaatactgtggttcagagcacagcatttgaagtcgggctgcctaggtttgtatctcatctctaccacttactatcttgaacaagtttttattcctccaatgctcactgtttgtcacctgtaaaaataataataatagtaataataatacttacattatagaagcattatgaggatcttgtgagataatagaaagtgcttggcacagtatctggtcaaagaaaaagatcaataaatcttaactactttatttgcaattaaaaatatctcccaaaagtcataattatggattcctattctcaaacatagattgagcatctttgatctttcatgtatatactatgcattggctcactgtttcacacattcattgaacaaacatttattgagtcccagcatgatgctccactgtgggattatagtagtcatttagacagattctgttttcatagagtgtatagattagaaagggagattggttattacataatcaggaatagtataggaaagggccaatggtatttataaacatagttcccttgatcatctctttcctgtattaaaggctacccttcctctatagctatttaaaccaacatcagtctttccactgtctgaaattgcataacaagtacgtatttaggaaactttcatactaagctacaactaaatgacccaagagaaccacatggttcttggaaatgtagctgaactcttcaaaaatggctcagacaaagacttgaactgattagggagacaacagtaattttatttcctcttacttatcctttattcaagagtgtttttgcttttctcaattttcttctaagcatgttctaccagttacctacttatgagagaataagagctttacatcttttcctgtatgacactggtgcttttctcagtatcttcctcttctcttgccctccaagtctctctacctctttctttctctttctttctttcttccttctttctttctctttctttcttctttctttctctttatttctttctttcattctttcttttttctttttctttctcctttctttctttctttttccttccttccttccttcctttccttccctccttccttcctctgtctctctttctgtctgtctgtctttctttttgacagagtttttactcttgtcacccaggccggagtgcaatgccacgatttcagctcattgcaacccccgcctcccgtgttcaagtgattctcctgcctcagcccctcgagtagctgggattacaggcacccaccaccaagcccagctaactttttgtatttttagtagagacaaggtttcactatgttggtcaggctggtctcaaattcctgacctcctgatccacccacctcggcctcccagagtactgggatttcaggtgtgagccaccatgcctggcccgacctgtttcgaagtttccctagcacttccttttgacagaggagaatctggctgtcccctagaagtctcttggttagcagtaatagtcagaattgcacatctttaaatgatgcaaactttatttttcttttctgtcccccgtaagaaatataaataacaaaacctggtaaaagttgggattattgcttttagagtacagaaagatgcctccactcaggattagaaatgccaaactagaatcgtagaatggtaagataggtggaccttcaaagagttagtcccacagatgagaaaactgaggcctagagtgttaagataacttaagttcctatagcaagagctagaacctatttgaatactgaatccattttgcctttagtataaattacacaacttttacataagagagctcctcatccttctctggttgataaatataggttgtcttgacattgttccctgtcactaaacaaccactggagaggacaggtttggataggtgcttttgtataattagtaaagtatgagctttgaaatcactcatgtaatttctgtgttcaattctgtctgctacttaccaactattggatgtggtactggtcctttagccttgttcttctgatctataaattcagaatgaaaatacctgctgtgaagattcaaagaaacaatgtatatgaagcgcttatcactgcccttggcagaaggaagttttcagtaaatattacctattatgttacttctgagatacttattttaatcctataataatctaaaaagaatccatcaatcagagcatgtcacttacacataacccacctcctctatttagcatctttgaataatttctccctgcaattggaataaaatgtaaactgtctgcatgtgccacattttataacttcctttttatcaaaataattttaatccccttgtcccttcccaggtgccaggtcttctaaaaatttaaataacagacaaggtttctctttctcagaaccctcccttaatttaataatgatcaaaaggttagtttcttcttacattttaagctttactttaaacatcaacccctcaaaaaggtcttctctgagcattccatctaactagcttctcaccatccctgtattctccatggcacataccataatgtaacattatacttttctctgctgacatgattcacagtatatctctctcactaaaatataaggtacacaaaggccagaccaaatctattcatcagtgtttgtcatttcaactgatacatagtagacaggcaataaatatttgtaaatagagtgaattaaatccacttatacctcctttcccattgctgaaactgcccatcagaagtcatgaaacaatgtagtctcacgagtgactcagttacccaacttgcttatgcaatcacatgacctgtattattacacctctcttcaggtatcaccactgtcctgacaatgaccaccctcagcaccattgcccggaaatcgctccccaaggtctcctatgtcacagcgatggatctctttgtatctgtttgtttcatctttgtcttctctgctctggtggagtatggcaccttgcattattttgtcagcaaccggaaaccaagcaaggacaaagataaaaagaagaaaaaccctgtatgtatcattttccattggcaccattgaaatttttatgatttcggtttagtttgttttcattagcctatctgcaggctaaggctcagcagtttgggctccaagatgaaaacagcatgtatgagtttagccaggccataacgattcatttacagtcattagttacttgagagagactcaagtctgtttctattttctgtgtcagagttcttatgcaaatataattacctgctctctttattttgtggagactaaagccatttttgagaaatgtgaccttcttcttgttgctattattccaggtttcactgattttttgagatggagtgtcactctgttgctcaggctggagtgcagtggcgggatctcggcttactgcaacctctgcctcctaggttcaagcaattctcctgcctcagccccctgagtagctgggactataggcacacgccaccatgcctggttaatttttgtatttttagtacagacggggtttcaccatattggtcaggctggtctcgaactcctgacctcaggtgatccacctgtctcggcctcccaaagtgctgggattagatgcgtgagccactgcgcctggccatgataatattattaaatcactgatattttaaattaaaacttccatctcaggcattccactaggaagctataaggtccttgaagtttcaaggctgactacatttttgcaaatgatttagtgtgtgtatggaggtggaatgtgggtattgtcaccagataatttctattgatttcattctcgaaatgtatctttttgtttttaaaacaaatgatttactattatatgggcaagttagttagcctccttgtgtgttttatatatatatatgtagtgtattatttaaaaacacttgtcttatggggctcctatgagaaataaatgtggcaatgaagggcaaaacaaaaaatcccaaaatattacatagtactctacacatgaatgtacttaacattagtagttggtgatgatagttgattttgatgatttatacagtttccagcctggattgacttcagtgccacaatttgaaaacagggaggatgacttctacttgcaaccaaactttaaatagtgaggatgaagcataaacacaaatgcctaaagcaactgttttttattgtgagtgttgaggagagcacatagttacccatttacacacctgaacaaagtggctggctcatagaaatccccatgaaagttaaggtccattcccttccaagatatgggcaaagagaatcacctgacaatcctggatcatggccttctgctttgagagccgtaataacgctctacctatccaacccagagactttggaggttgaattgtaaggaaggaatttagctgattctaggttgtattctgatgcagctgcagaaacccaagtgaaatactacaagagtaatgtgtttatttgaatgtaagactttggaacatggaaagaaagaaacatcattattcttgatttaaaaaatgctttctttaattgctcaaatatttacaatgctttatgcagtccttcccttccctgtctgttttgcctctctctgactttccattttctctatccttgttttattttccttgttgtgttgtttttgtttgctccctcttgttcactttccatttcactctccctcaagaaggtggttctattgagagttggcatattacctgccagctataacaaggacatgaggactggctttcaaacaagttctgatgagtcctttggaaaaagccccttggccctctctgtcagctacgccattgcagagtagattttgttgcaaagatagaggcagattcccttattcagggtcatggaaatggcagaagaagaaaaggcagaggagaacaggataaaaatttgagaaaatgaaattacctgagaatttcatgcacttctttttaggcaattagatgattcatcagaactagcaagaaaataaactaggaatgagaagctgaaagtttattttcctgtttaatatgccttttggataattgtgtcaagactcacctattaagttatccgtgatgataattagaaaatagaatcatagtatttttaaacaggggaaccaggcaatagaaaacttccttgcaattgaacaactctggcttcttcagtcaagtaattgtagattaatttattaaaaatttcactagtaattacaaaattacacttaactttaagcaaatactttatcccaagctcagaactctccttctgtgtttataatttcagttcatttcacttactgtgttttcaaaatgtatttttaatttatcttgtctctctctttttttttcattttttttctcctttttattaaaaacaaatgcaattctcttttctgtctacaaacccaaagcttcttcggatgttttccttcaaggtataatgtttttggaatggaaattcactgcatgcaactgctaaatttaactattaatgcttacatggtgttttattttgttttatgagtagacatttaagcattctactagagataatatgttggagaaagttctacagacttctagagttgattcagcaactatacactaattcacataggttttaatcttacaccaagcccaaaagctataatccctgtgagatgtcataggtaaagaaggctgctttatccatcaaagccaaaatgagcttcctcttttcagatgaaaatgggattgagtcttactgattacgactaccaagtttgtactcttttaaaactaaaatttaactctgtaaatcttaattcaaaatgtattggttcattactgtttgtaaacttaatgatttctgtttttctgaacactacctgtaagttctgtaagaacaatattctttttgaaaggctttgagttaaaatatccattccttatttccagagtgatccctgagccttttggctctactataatgtgttgcaatgagatttctattcaaatataatagctgattctgagacgttagaatttctgtttagattatgctaaaatgaaatcatccaaattaacattaaatatatcatttagttgcatagaaatttaccaactggtctagcaggaaatttgacaagtagtaaccttcttttctcaatttccattcacatgtaggtaaacattgttgacattcttaagcttatagatggtgaatattagaaaaagaatcatagtcctttaaaacataagccataccattgtggtatacaatcaggaaaattctgtatttatatatattttaacattttctattaacatttaatacatttgctcagagtaatgggttttctatttgcctataactaagcatgacacaatatttgatttcagaattgatgcatttttatttctctgttccactcacatgcagcaccatcaaatgccttcatgtaaccaatgtcacatctaatacttactagaataagattccatgtaatttgatttaaatatttaactttgagttcttttggtgttcaatctccttgctatagctattagcttgatgatattattttcagctgcactgcttaagctcaaaatttgaaatctgcaaatgtgctatctttctaagttcaattttaccattgtagatcatgatgtcatagcaatttcctgagtacccattttcagattcatcatcacattggtgacattgtggaaaaacagcctaggatctctcgagaacaactaactgatccctctccttccctaccctcgtcccaggcccctaccattgatatccgcccaagatcagcaaccattcaaatgaataatgctacacaccttcaagagagagatgaagagtacggctatgagtgtctggacggcaaggactgtgccagttttttctgctgttttgaagattgtcgaacaggagcttggagacatgggaggatacatatccgcattgccaaaatggactcctatgctcggatcttcttccccactgccttctgcctgtttaatctggtctattgggtctcctacctctacctgtgaggaggtatgggttttactgatatggttcttattcactgagtctcatggagagatgtctgttctaagtccacttaaataatcctctatgtggttgataatgatctgaatctgtttctatgtccaaacctggtaaattttataatgtcatattgtttgtgcccagccctcctttggttagtgtactttgaacttcgatgtttgctgtgtttcaaacctgcaaggcaaagtaaaattagagcaagaacattcaaaccaaataagatatttttcagctacagcaaataaaacagtgaaagccctgactatttacagtagtggtatccttactagattcataatgcaattagatagaaaaggtccaaaactgtaccctatgttcactccgggtcaagttgtgataaatttgatcccaatagaatacctccctcatttaagaaaaatcataactcactttaaatatgaaagcctagtccagaaatctattacacctttatctcaagataggaagaaaatttcctccacattcatgtacaatgatgtaaatatttcaataacttagaatgcttcaagtttagtgcatgcatctctttagatccaaaataaatggactgaagttatcatcctattgtcttttattttgtgtccttgggctataaaagattcctgaatgtaattataaggatttgggtttggaaatggagggaggaattttcattgccttctccctcatgcatgaagattcgaacagcttattttttccttgtatgacatattacaacactttaagtaaaatatagactggataatcaacatttgccacctctaaatatgcccaatttcataactagagtataaagtaattgtatgtgcttgccgctatttttttcttccttttaggatgatagatcataacagaacttattctccatctcaagatctgcttctagtgattgtgagtgccttgtgggcagaatccttgtcatttcctctttgggtctgtagcaccttgcatagtgcctggcatatagttggtgctcaataaatatggtttgaagtgaattgccctcacatgcttctggcaaatctctgtgctggcctgaaaccagtgactcatcttctcacataggtgttgtcaagtgatatttgattttgtaaaaataaccagtaggatccaaagaactttagctatttatgttcatcttcaaaaaattattttaggcaaagtccatactccttttaaaacaatatttatgtcctatgtttgtgtatagacatgactctactagggcataattagagtttgtgtattatttttccaggtttggggatgagtcagtccttgcccatccacaattttgtttgtgaacttataacaggaataagcaaaattcatacctgactagtgttcagaatgtagcattctgtgcgaaaaagtattgaagattagcttttaaaaactgaaaaaaaaaaatgaatgactcacatagaggttgagccaatgactgtggcctcattagattacattgtagttaaacaaagcaatttctccagacttaaaacatgatgagttgagctctatcttcatgtactcatcctgaatccttatttttctaaaatagcaccctttgttaattatttttatggaaattattactctgtcataattaaatcatagctagtataactttacagataacctaaaaagaatagaaaagaagagagagtggctttgtcagtataaaaccatgtaaagtcatcatcaagtcatctggatgaatcttgaaacacatttagctgccagttttacaaacctttaatatatcagtgctccagtatataacctcaaacaaatgtaaatagaacgaattattttcttgttttgaattgtcaatatattaaatgttgactctttgggagagttgttggcaagtttcaatggtgagaaacattattgtcaacttgaaatgtgttctgtaatggggacactacaaaaagctagctttccaatgtgtgcatagtattggcaatatgaatatatattatatataatctaatacttattataagctgctccctgtctatgtatttggaaaccttttcacaaagggaattgcctaacatgtggacttttacaataaaaatgctgcattctaatccatggtggcatctcagtagtctggtgggactgtttgtcttagagattgtgacctctctttcctgcctcatttccccaaatcccctctcagtgagctttatctgtgagctgtgtgactgtgttttgcatggcggtactcttcacctcaaaaaaattaagagaggcatgtgggttgtagagtgaagaagaaaggcagacatgtaataaagtaagtaaaaattcaagtcttctctacctcaagaatttcggtgtggttaacattaattccagtgccagacaaagttgggatcccagctttactatttaccagttgttagacaattgtcaattcagactttagaatcctccattaaaaataatttatgtatttgtttatttgtttagagatggggtgtccctctgtcactcagtctgaagtatagtggcacagtcatagctcactgaagcctcaaacttctgagctaaagcattcctcctgcctcagcctcctgaatagctggaactacagatgcatgccaccatgcccagctagaagtctccattttagcagctataaattagatataccaatgctaacctatgtagtgacactcaacaaatggtcaaaagctctctccctcacttccgatgccttccatgcactgctgtcatgctcccttcatcctatcaaactagcttccctaatagaatccagcattaggcatataagcctttaagtgactctacatcactctatttttatttttaggaaatatttgcattgcaagtcttttaaactatatgtgggaaatttctgtctcattggaaaaaaacttacacattacattagttatttttaaggccaaagaactgttatttgtaccctcaaaatttacaaacatacaaagttgattagccctactccagagacaatgtcatgttttcttgaactcttttgaaattctcccaggaatataatattatcttcacaacacagctgccctaaccatccttggccccattctcttggcccctcatatcttcctgcatctaatttaatcatctatttctcaccttccaaacctataaaaatatagttttcacttagatgttgtctgctgtctaactcaatgccctgaactttagctgaattcatatctttatatggccttcattccttgcattaagtctcaatattattctgactagtagcaaaaatttttgtctgcaatgaaggtcaaattaagttaacaaaatgatgtggtcttcagggattatgtcaaaaattgctatctctatgctttgtcactatgaatctttgtcaaaggtgtagaatatgggggaatgacgtagaccaagagctcggctatgttttctagtgctcagtgaactgccaaaggtcacacagctagttaatgacagatcagggggtcatctaagcattgctctttccactgtgtctcacagtatttcagaatttagaagtaaaattctggaatactttatctttctgttaatattttaggatctgccaaactgcaggatgctttccttctttgatctaagcctcactttgactcattttattgcaatgagacaggaatttgagaatacctagtaacagagggaagtcaatgggttttgtatttattttattccttctcatgtgaaatgaccaattgatatttaatattacccatactgctttcagaatgctgtttcaaagaaacatctaaacaactccagacctagagttagcctttgtcctttgggatatgtggcagtagacaaccaaaaagtttccatggctaggatctgcaggctcattctttctactatttaagcaaagtggtggggaatgacctaactattatgattctttctaaggttacagattataagccaattgcaaaatccagttgtaactttcttttgccacattttggataataaagaaatagtttcctctaattatggtttgtgtaactaattggaaaagcagaggctcttgctccagattaactaggttcaaatatc

SEQ ID NO: 758 - DNA, 14032 bp, Homo sapiens
ggagactgaggtaggaggattgcttaagcctgagaggtcgaggttgcggtgagctgtgatcgtgccactgtactccagcctgggtgacacagcctgaccctgcttcagaaaaacaaagacaaaaaagaacaaacaccagaggtatgtgtcctgcggtaaagtgcagggatggtggcggtggatttagatgcggtgggaacatctaaggaaaactgggctctgctgcagctctactcccaacaaattttgatgatcctcaggcaagacacaaagacatgctataaactgaaatttgttaccatatacttttttttttttttaaagacagtctcgctctgtcactcaggttggagtgcactggcacgatctcggctcactgcaacctccgcctcccaggtacaagcgattctcccacctcagcctccccagtagctgggattacaggtgtgcgccaccatgcccagctaatttttgaattatttattcctttttttcttttcttttctttttttgagacagcgtcttcctctgttgcccaggctggaaggcagtggtacaatctcggctcactgcaacctccacctcctgggttcaagtgattcttctgcctcagcttcctgagtagctgggattacaggtgcccaccaccatgcccggctaatttttgtatttttagtagagacggggtttcaccatgttgaccaggctggtctcaaactcctgacctcaggtgatccacctgtctcggcctcccaaagtgctgggattatgagccaccatgcctggcctactttttgtatttttagtagagactggctttcaccatgttggccaggctggcctcgaactcctgacctcaagagatccacctgcttcggcgtcccaaagtgctgggattacatgcctgagccaccgtacctggcttgttaccatatacttttatagcacagtacttcacattgattaaagaactctcatactaactgtgtcatttaacatacacaaccaccaagcaaaggagacaggacaaacagtagcatcccatttccaaggctgagtgcagtaatggaaaaaataagagtttttatgaataagacaatctgagttcaaatcccaggcatcttgttcaacttttcagaggctttgtttcatcctaagtaaagtgtagacagtacatacacctcatggtcttttagaatgagtcaaggattgagtactgcacgtatacagtactcaatgtttccttccatcattccacagaaggaagggctacaagttcacacacctactctgactttaaagctccaagcagattatctttcaactcccatgctcaacctttccgtgctcagattcaagaatgtaactcagcatctctttaaaaggtgtttaaaagattagtcactgagatactctactaaaagttttttgttcaagtagatttgtgaaatgtcactctcttgaaatctcacaaagtgtgtatgtgtgtatatatatgtatgataccgaaggttctgagaagtcttgcaataaagaaatctatttgaactcattctaactagcatttcccaaaagtgcatttaatggaatccttttttacataattaccataaacatccacacagacctaactttcttttaaacatacttttaggaaaaatggttttgataaattcatgtctaacaaattataataatagattagattataatagattaacaatattaataacaatagatattattataggacagggcacaagaaattatcctttaaacaagatccctaaatcattcttttgcagcctgcattgaaattgcacattgcctagcgtcaaattcagaaaaatttatttaggcaactaagacatttttatttttggatttcagaataagtctgccacagacacaaagattccaagaagtggctcataatgtcatctagcagaagacacacttggggaaaaaggtgggggaggggtattatgttttgttgcaaaattgattttgtatgaggtttcttactccccaaatctaccttcagaaaacggtagtatctaatgatctaatgccacatcactacctctcctgtccttatccttggtctcctgatgaccgcagaaagcaagagagagccagagtggaacgagtgagctgttaactataaattacaaaaatgaggactccttttttctctgaaaaccaagaaagcggttactctgtcacaatccaaaaaaaaaggaaattaatcaatcatcagtatttgtcctgaaattttccgcagaggtctctggtgtgattaaaaacgtgggggaaggtcaggcgcggtggctcgcgcctataatcccagcactttgggaggccgacacgggaggattacctgaggtcagaccagcctggtcaactaaaaatacaaaaattagccgggcgtggtggtgcgcgtctgtaatctcagctactcggaaggctgaggcaccagaatcgcttgaaccccggaagcagaggttgcaccactgtattccagcctgggagacagaacaagactctgtctcaaacaaaacaaaacaaaacaaaacaaaacgtggggaagaggccgggtgccatggttcacgcctgtaattccagcactttgggaggctgaggtgggtgaatcacttgaggtcaggagtttgagaccagcctggtgaaaccctcttctactaaaaatataaaaattagctgggtgtggtggcacatgtctgtaatcccagctactggagaggctgcgacagaagaatcgcttgaagctgggaggcagaggttgcagtgagctgagctcacaccactgcactccagcctgggcaacagagcgagactccgcctcaaaacaaaaacaaaaaccgtggagaaaatgctaaactcgatttcttctgaacctatgctaagatgtcaaggtactgtgattcttctaaaagaattttaaaggttgttatgtttggtgtcctaaaagtgtacatggattttatattataacctacatcaagaaactcattcaggccaggcgccttggctcatgcctgtaatctcagcactttgggaggccaagaattccagactagcctgggcaatatggcgaaaccccgtctctacaaaaaatacaaaaattagccaggcatggtggctctcccttcagtcccaactactcgagaggctggggcaggaggatgccttaagcccaaggaggtagaggctgcagtgagctgtgattgcaccactccactccactccagcctgggaacagagtgagactctcaaagaaaaaaaaaaaaaagccttattcacagataattttttttaaaaatggaaactaaaatagaatttaaaacccaagctgctcagtttcttggaagatggatttttcctacttggtaatatactttgtatatctcgactattattgtgcatgcaagcacctctaagaagtacttgtatctgcaatgaattcttaaacctcagggagccaaataaaaagacaaggcccgaggaattctttcaaaaattaaagtaacatttcatatttgcttattctaacagacaaagaataaagaaggaatccgctaagttgcaagctgaggtgcagacaagtgctggttcacagtgacatcctagaaggaatgctctggataagagcttcaagcttctgtggttttctgaggaaagtgaacggaatctagacgtgtcctatagctcaaaaaatcagcgctatggaccacagcgcctaacagagtaaaataatacactgtgcagtttggccactaacagcaagagtgggaaggggcgaagaggaaccttgattgcccgacaccagggccacctgaaaagtcatcttgacacttcagtctttccattttgagatcggaagctttaaggaccattaaatcgctgccgctgccacaccaggcccgacggagcagaaaggctgcgctcacctgcggaagcgaccgggtgcacacctgccgggtggcgaggcccgcaccgtcacaccccgccccggcttacctgcccttcggtgatttttagcgtcaacttccatcccttcccacccatctggatccaaccaagcgcaagggcgggggagggagaagctagtgtcgcgaggaaaagcatccccgcaacccaccgcaggctttctctccttcctccccattccacacaagaggcagccacaccgcctctcctaaccctcgtctccaatgcaaggcctgaaatacttagaaaaaataataactgtttttaaggaaaagtaacatccccgctcccttccgcccctcaccttcacgaaagcaatcggggttgtggtaccttcgatatctaacaggatcacggtgacttcggcggggaccgaaagcacgaccatttccctaccggatgctacgggactcggcctgctgttggggagggcggagggcggcgccggctgcggctgcggcccccggtaccgtcttgggcttccggcggccccgcgcgatctcggagccagcgaccaagtgcagcccgccgcgcgtggggagaggacacttctgcacacctggaactggaaaaggcggccgcccaggagccctgaactcgtgagcaggacggggcaggagcccgagaccacgtgggcaggaaaaggggcggcccttgacgggttcggcggggcggggagggtgaaggcgccagcgccgattggccgccgtcaggcctcgaactggatccgtcaaaatgggcctcgcgtgggcgggaacaaagaagcgaacgcgggagcagggtgcgcgagagcgcgccctccgcagacaggttgagcgagcgggagaggcccggggcacgtgcagaaaggagccccgcgagtggcgcgccggggatgtgagtgccccttgccctctactgaatccagccccctccccgcccaccgcctccgcctttgcatagatacagtcatctggccagcccccgcccctcctcccggcgtcagcccgccagaggccgcgcggggcccgggcttcggccgatcagcccgggaggccccgccgcgcccccttggcccgcgcgcccgtggtcacagtggaagaggcgcccgcgctgcgctgcccggaggagccgtcgcgcgcccgcttcctgttcggctggttcctgccagctcgaggacaaaacacgcgtgcgcgcggcgggcgagcgcgctcgccgcctcagtcgccagcgccgggcgcagtccgcctttttccggagcagactggccgcggtgctagtcggtagcagcggccgccgcagcggctccgcactggcgaaccgagggcagaaaaaggcggggttgacggctttttggtaggagtgggctggaccggacgccagagacaaaggctcccaaggcaagagggactgtggccctgcgtcggctctgctcgggactgctgaccccaggaatttacgccccttcgtttttctcttctgattcttctcttctcccaagcccgcgtcccctcacgcgtggcctctctccttgccgggagggccgcgatggaggtcccgcccaggctttcccatgtgccgccgccattgttcccctccgctcccgctactttagcctcccgcagcctctcccattggcggccgcggccgccgcggcagctagccccgctcctcccttcgctcgctcccagctccgcccggcagggggcgcgccgggcccagcgccacgtcaccgcccagcagccctcccgattggcgggcggggcggctataaagggagggcgcaggcggcgcccggatctcttccgccgccattttaaatccagctccatacaacgctccgccgccgctgctgccgcgacccggactgcgcgccagcacccccctgccgacagctccgtcactatggaggatatgaacgagtacagcaatatagaggaattcgcagagggatccaagatcaacgcgagcaagaatcagcaggatgacgggtaccgcacgcttcttcccccgctccccctcccccagcgcgccgcacgcgcccttcgttcctcgtgagccgcgcgctgcccccattctttctcagagtcgattccccgcgtgccttctgggccccactagattggagggaagaggaaagtaagagatcgagggggtgactggagagacccgggaagagtgggggaagggcggaggggttggaggaggagggcggcggcgtctgtgtcccgagcgcgcaggcgccgcgtgggacccgggggggaggggccggcctcccagcgctgcacgctgcagctgccgccgcctcttcattgtgtctctgttaccactcggcgcggttttcctgggaagagttttagaggactgagttggggcacaagcaggcgactggtacccagattcacaaaacgtgttatgattgatgagttctctgggtggaacgttggcttgacagctgagaacgaagatggacctaagtaagataagatgtgagggattcatctaggaagttgtgccttctacctaaaggaatctgggcagaacctttactgtattttattggtctcttttgagctttgctttatgtagtgcggacagtgagctgtccgctggtttgagtaacttcgttgggatattgggatttttgtgtgacatagattaaatgtaaacatgaattaaattgcctacacttagggggtaaatgtccctgtttttatttcacgatttaattccagaactgaaggatcatttgagttattgttaattttttttaaaaacacttttatttctagtaaaatgtttattggaggcttgagctgggatacaagcaaaaaagatctgacagagtacttgtctcgatttggggaagttgtagactgcacaattaaaacagatccagtcactgggagatcaagaggatttggatttgtgcttttcaaagatgctgctagtgttgataaggtaggaactatgttttgcattgtgctgcttttgtggtgttttgcaaatttttctgggggttatatggtgctgtcagattaaataaatctgtcttgtaggttttggaactgaaagaacacaaactggatggcaaattgatagatcccaaaagggccaaagctttaaaagggaaagaacctcccaaaaaggtttttgtgggtggattgagcccggatacttctgaagaacaaattaaagaatattttggagcctttggagaggtgtgtgattatgtttacacatgttaagcttgatgtgtttataaaatgttcaatccttgtccgatttatgcagggcagattcatgtttcctgtaagagtagaattaaatgactgctcaagtcgcttccagtgactgtaccttgatttcattgctgctctgatggaaacccaactatctaatttagctaaaacatgggcacttaaatgtggtcagtgtttggacttgttaactagtggcatctttgggtacaaaataatattaatttctctcaatgcttcaaatatacaacaaatcactgtaggctgatgttgatcataaagcagtgatgtctgtatagaagtcacccgataagaataacatgtttaagttgaagcctgaaaaggcctttggcattctgacactgtaacgttttacaattatgggatgacgttgagtgtgcatctcgatttcagattgaaaatattgaacttcccatggatacaaaaacaaatgaaagaagaggattttgttttatcacatatactgatgaagagccagtaaaaaaattgttagaaagcagataccatcaaattggttctgggaaggtaaagccatttaagcactttaaatgaaaatttaaataattgaaataatttcttgatgtggagaaaaataaaatgatttaattttagaacttcggtaaaaattatactttcatgttttttgtttatagtgtgaaatcaaagttgcacaacccaaagaggtatataggcagcaacagcaacaacaaaaaggtggaagaggtgctgcagctggtggacgaggtggtacgaggggtcgtggccgaggtgagacttaattcttgaaatatgactccgtggtttatttaagctgtatactgctgaatatgagtagtcctgtaccaaagcaaaactttaaacttaaaaccattccagcggaggggggactgttcagcttagtggaggttgtgtgtggtggttttttgttgtgagctcactggtttcaaaaaactgttaaaagtgtggccactttgacaattagtgtcatcactgataggaaaagtgtaccattacatgatacaccgtggtgtgataggttttcttgggcaggagtccttgttttaaacagaacagtgtacctgtcttcggctttaatggaaaattgaatgattttccattaagtttaggaagtttgatactggcacaattggactttctgcctccttttttataacagctggaaaaatagtttttcaagcagatagcaatatatatgtccattctgccctttaagatttgcagagtgagagacaagaacgcatcattttatgttagaattgggggtcagaagttgtttcctaacaatcattgtgcattgtttcaggtcagggccaaaactggaaccaaggatttaataactattatgatcaaggatatggaaattacaatagtgcctatggtggtgatcaaaactatagtggctatggcggatatgattatactgggtataactatgggaactatggatatggacagggatatgcagactacagtggtaagaatatttaacttaattttataaagcagtggtattaaaattcattgttaacatacaatcctgttctgaaattgtgtgtatgggctttccattaaagtgttcggagttaagtgtttgaggcatgttacaatcataggatgattatactaacatagactggtggttataaatgaactaggatgtatgatttatgagtagcatctaatgggtgctaaaatatcttaatactttttatttagcatgcaaagatttgtagatttaatagtttgtgtttgtaaagaaagttttgtagaaaactatcttaatgagaattctgtgttttcaaaataggccaacagagcacttatggcaaggcatctcgagggggtggcaatcaccaaaacaattaccagccatactaaaggagaacattggagaaaacaggtgtgtataagagtacaggaaaacagtagaaatgtctaatttaatttaaagatcaatagacaaatgaaacgtaaaaacaaaatactatgtagcctgtttttactaaattgttgattttttaattgctttatgagcctgttttgcctaaagtgtctatagatctttaactttaaagtcttatctcactttctttagtattgcagaaaaacttaagagtttttctgtttgcttttgtgtaccaggtggtctagaggaataattaaacattttagaactattaacaggtaaagtactgaaatgggtacaacttaaggaaaacaagaatgttgtcttctaactctgacattataccttgtttgtacccgccagcgggaacttcattgcaggccgtgtgtcaccctgaccacgtctatctctgggggtcgcacgttgcgggcagagcgcaaggcatacaccagaaaacgctgtcctgtggtatggtctcttccaacttcatgtaccagcgtaaagattaaagtggaaaacttcagactttggcttcatttttaatctttttggagattaagtgtctaaacttaacttaaatggttttttacaggagttaaagtacataaatgcctttttacagcttaatcattttggtcttctgtttagtgttgtatttcaattgtggagcctcattttaagtgttcattcttttaagatttaatgcttgctttttctttttatagctaatagtgaaatctacaaaccaaaacaagaacttttaaatctgggatataaattaaagatcatatgcacagatcaatttatgttcttgtaataaacttattagaaattggtgtttgtgatagcattttacttgggttactagagatgcttctagtagaccttaatctagcatagttgaacctctgaatatgggaaggttgtattcccagattctttcctgaatagatttgaatttaatgtcatttgggaactccagggtgagtttattgactacccaaactgtattttaccaataaatatgcatatgatctttaattattgaagaaaataaagtgaggacttaaaacaattcatgaaagtggacctttaaaagcttgtcagagttgcacaaatctaactggtattttgtttttgtttttaggaggagatgttaaagtaacccatcttgcaggacgacattgaagattggtcttctgttgatctaagatgattattttgtaaaagactttctagtgtacaagacaccattgtgtccaactgtatatagctgccaattagttttctttgtttttactttgtcctttgctatctgtgttatgactcaatgtggatttgtttatacacattttatttgtatcatttcatgttaaacctcaaataaatgcttccttatgtgattgcttttctgcgtcaggtactacatagctctgtaaaaaatgtaatttaaaataagcaataattaaggcacagttgattttgtagagtattggtccatacagagaaactgtggtcctttataaatagccagccagcgtcaccctcttctccaatttgtaggtgtattttatgctcttaaggcttcatcttctccctgtaactgagatttctaccacacctttgaacaatgttctttcccttctggttatctgaagactgtcctgaaaggaagacataagtgttgtgattagtagaagctttctagtagaccatatttcttctggattgtaataaaattgttagtagctccttttactttgttcctgtctctggaaagccatttttgaattgctgattactttggctttaatcagtggtcacctagaaaaagctttgtaatcataacacaatgagtaattcttgataaaagttcagatacaaaaggagcactgtaaaactggtaggagctatggtttaagagcattggaagtagttacaactcaaggattttggtagaaaggtatgagtttggtcgaaaaattaaaatagtggcaaaataagatttagttgtgttttctcagagccgccacaagattgaacaaaatgttttctgtttgggcatcctgaggaagttgtattagctgttaatgctctgtgagtttagaaaaagtcttgatagtaaatctagtttttgacacagtgcatgaactaagtagttaaatatttacatattcagaaaggaatagtggaaaaggtatcttggttatgacaaagtcattacaaatgtgactaagtcattacaaatgtgactgagtcattacagtggaccctctgggtgcattgaaaagaatccgttttatatccaggtttcagaggacctggaataataaaaagctttggattttgcattcagtgtagttggattttgggaccttggcctcagtgttatttactgggattggcatacgtgttcacaggcagagtagttgatctcacacaacgggtgatctcacaaaactggtaagtttcttatgctcatgagccctccctttttttttttaatttggtgcctgcaactttcttaacaatgattctacttcctgggctatcacattataatgctcttggcctcttttttgctgctgttttgctattcttaaacttaggccaagtaccaatgttggctgttagaagggattctgttcattcaacatgcaactttagggaatggaagtaagttcatttttaagttgtgttgtcagtaggtgcggtgtctagggtagtgaatcctgtaagttcaaatttatgattaggtgacgagttgacattgagattgtccttttccctgatcaaaaaatgaataaagcctttttaaacaaaatccaaacttttaatcaagtcttgatatgtatgactgagaaaaaatacactacatctagagatgattgagatgttttgcaaagaattgaagggggagtgagaattggtttttcttgcaggggctttgaactctagatttgggctttgaactctagatttaattcagatttcagggtctatcagttcaccaactgatgcaaatttgaacagatactctaaggctaagtgtcctaggttggatgaactgaagctactatcaagatctcgttcccaaggattaatttagaacaaagtaattggacaagtttattggggaggggatagaaatgaattctaaagtacctataacaaatactctgtgtatgttttttacatcgtatttgccttttacattgtttagaccaaattctgtgtgatgttatcctcgggaagaggatagaaattaattctaaagtacctataacaaatgctcggtttgtatatgtttttatacatcgtatttgccttttgcattgttcagaccaaattctgtgtgatgttatcctaacaaaacaccttagtaatttctttggttaacatgttaatctgtaatctcacttttataagatgaggactattaaaatgagatgtctgttgggatgctagcgtggataagcagagcttattccattactcttcagtggatctttattttcataatggcagagatcctcactaatcttcacaaaacttaatacaagggcatatctgaacaattaagctactttccagtaccaagatttgatttaatgtcaatcaggatgctaggctgcgtgctgtagatcatgcctgtaatcccaagcactttgggaggccaaggcaagtacattacttgagtccagcctgggcaacatggcaaaaccccgtctctacaaaaactacgaaaattagctcgatgtgatggtgcacacctgtagtcccagctacttgggctgaggcgggacgattgcttgaaccagggaggtgaagtgtgcagtgagtcatgtttgcgccagtgcactccaccctgggcgacaaagtgagaccctgtctcaaaaaatcacaggatgctaaacttcaccaattaaaaagttgactaagctggccgcacgcagtggctcatccctgtaatcctagtactttgggaggccgaggcaggtgaatggcttgagtccaggagttcaagaccatcctggccaatatgtcaaaaccccagctctactaaaaatagaaaaattagccgggcgtggtgctgtgcttaggtgagaggattgctggagcccaggaggtagaggttgtagtgagatttgtgctccagcctgggcaacagagtgagaacttgtcaaaaaaaaaaaagttgactaaggccaggtgtgttggctgcagttgagctatggtcgctccattgcactcttatctggcctaggcaacagagtgagaccctgtctttaatttttttaaaagttgattcaaaaacatgtaagtgtatgaataatttttagttatagatgtgtgtgtataccatttgaattgattcttgagtagttagaaagggtcattcatagaaaaccccctttccttaaactttcagcgaaatagagttgacatctaatctgtggtttcaactttaagcaaaaacaatctaaatttatatattttttatagtcactagaaaatattgtttataaatatataggctgttcttttaggattggttggggtcttacatttgtcttgaaatagattagatgtggaatttcagcaagatttagttaatagcaaaaaataaaaatacaccttagactttactactttttataaacggtaggaaaggatatactgatgttgtgggtattacaaggtaatgctgaacattctgaagaccttaacttctgctgctcttccctccccctccccccgccccaacaagaatgaggttggaattgtgcttttttttttttttttctttccttccctgagtcggagtttcactctt

SEQ ID NO: 759 - DNA, 176286 bp, Homo sapiens
acagatgaaggaggacgcgcccccgccgctgtcctgcgcctcagccatcctatgagacgggaaaggtttctgtctgcagctgggcccgtgctctttaccagctcctggctttcttctctggaaggttcctgcctgttttgccctcacacctgctcctctctcagccctctcaggggtggggctggaggccaccaaagagcctcctctgctctccagttgctcgactgctcctcatttccccctggggtctgcgtcagggtttccttcttttccagccccaccccgcgtgcatcccacctggtctcgggtcggggctgctcccgcttactgccccctgcccaggctggtgtgcaccccctctggctgctttcaaggcctcttctctcttctcggcaggacaggcacaggcaggtggccaggtgtcatgcttagctccccgcccagtgagattctttcatttaacaatcttcccctgaatagttcatgttcattgctgaaaatttgaaaaatatggaaaagcacaaagattaagatataaaccgccctcaattcccctgcccagagagagtcactgctatgacttggtgactaggaaccttatttctctctcgctcttttttttttttttgagacagagtcttgctctgtcacccaggctggagtgcagtggctcgatctcagctcactgcaacctccgcctcctgggttcaagcgattctcctgcctcagcctcttgagtagctgggattacaggcacctgccaccatgcccggctaatttttgtatttttagttgagagagggtttcatcttgttggtcaggcggacttgaactcctgacctcaggtgatcagcccacctcggcctcccaaagtgctgggattacaggtgtgagccactgcgccttcatctctcttctgtgtatgtgtacgctgttttttctttagaatgggggacgttatcaggctctacatggtgtgtagtcggctagcatgttgtaagcctttccctgtgtcacaagtgctcatctggaacaggattctaatgactgcctgtggctatgttgggattcctttaactcagctccttctgcccagcatctatcttttttccatcttttgtcctaagtgttgctataataaatcattgatcacacatgcctgactgtttgcataggataaattacgggaaatgtttttgctgttcagggactgtgcccatttttaggcctcagagacaccatgccagactgcccagtattgatctttactctttttagatgatgccaaacttttctgtgaactttaaaaacctgtgtcttgacagtccatttctgtaagtctttcacattagatttcctgtcaggatgatagtcaattctaggcagatgatgttttctcagccatggctgaagcagttgtgatttgttgtggccatgtaaagtcccgatgatccattgcctccctggatgggttggaataatttggtttgggagcatataacagaatgacctggagtcacagcagctcagacggaagtgtatttctcccttacagatgaaagaattccaggccaggctggaatgacaactgcacacagtcatctgggccccctccttccagctcccatcaccccaggatgtggcttttatgcagatgatccaaaatggctgctcaagtcccagccaacacatcccattccagggagcaggaaaaaggtgtgtctttcccttcattttatgtgattcctttctagaagtactactcattacttctgcttgcatctccctggctagcacttacttagttatatggccatagctagctgaaggaaggacagggactgtcatacactagctaagaggcaaactgcttagataaaaaggtctctaaagaaggtcagagcggctgctagggtgcaactctattacttattgttatgggacgaactgtgtccctcattcaggttgatgtcctaagccccagaacctcagaatgggattgtatttggagacaggttctttaaggaggtaaggaggctaaaatgagatcattagggtgggccataatccgactgatgtcttacaagaagagattaggacacggacatgctcagagggacggccacgtgaggacaccaagaaaggcagctgtctgcaagtcaaggacagggctcaggggaaaccaaccttgccaacaccttcatctcggacttctagcctctaggaccatgagaagatacatttctgttgtttaagctgcccggtctgtggtactttgttatggcagcccaagtaaacaaatacagtcatctgctgctggaacaaatcaccccagcactgtggcttggcagcacacatgtctagtcatagagttatatgtagttacgtgtagagccatatgtatcgtcacacgttctgtgggtcaggaatttggacccagcttaaccagctccacttctcgccagggttcagtcaaataccagctgcctcccacctgagagctcagccggggaagggtccctttccaatctcacgtggtgttggcaggatccagttcctcatggcctgctggactgagaacctcagttctcactgcctgttggccagaggccgcctttatgtcctcgccatgtgggcctctccaacatggcagctgacttcatcagagcatccatgccaagaaggcaacagagagggccagggagactgaagtcatacccttttgcgacctagtcatggggtgacattccatcacctttgcccattggttagaagcaggccaccaggtacagcccaagctcacggggaggggtcatacaagggtgtcaataccaggaggtgaggggtgctggggccatcttatgagtctgcccactgaggtaactaacaaccttgaggcctgacacagtggacaaaggcccttattaacagcagagaactgggaactttatttatttatttatttttgagacagagtctcactcttgtcacccaggctggagtgcaatggcatgatcttggctcactgcaacctccacctcccaggttcaagcaattctgcctcagcctccggaatagctgggactacaggcatgcaccactacacccggctaatttttgtatttttagtagagacagggtttcgccatgttggccaggctggtctcgaactcctgacctctggtgatctgcctgccttggcctcccaaagtgctgggattacaggcgtgagccaccgcacctcgctggaacttaatttttttagagacagtgtcgctctatcacccaagctggagtgcagtggtgcaatcctagctcacttgcagcctcaaattcctgggttcaggtgatcctcccacatcagcctcccaagaactgggaactaacagctgtttctctgctgtccttctcaagaaaagggaggctactgctaccccactggggacaatgctgggtttccctttaggacaggctctgagacaaggcggaggtgctgtttgtggccacagagcaggggactctgggttgcaggtgtggcctggctaaagtaggctttactgggctcctctctgcctgcatcaccccccggctgggcggttgtctctgaggccaaccttactccctgctgggcaggctggacagctgccctctccgtttgcccctctaccacccaaaaggcaggaggctctggagaccaggaccctgcccgccacggcctgtgtcccaggcgtgagggggtgccccacagacctctgctgagctgctgctgaatgacgccccttgggggtcctgccggaaggtcagagcaggggtgcactcccataaagaaacgcccccaggtcgggactcattcctgtgggcggcatcttgtggccatagctgcttctcgctgcactaatcacagtgcctctgtgggcagcaggcgctgaccacccaggcctgccccagaccctctcctcccttccggggcgctgcgctgggaccgatggggggcgccaggcctgtggacaccgccctgcaggggcctctccagctcactgggggtggggtgggggtcacacttggggtcctcaggtcgtgccgaccacgcgcattctctgcgctctgcgcaggagctcgcccaccctctccccgtgcagagagccccgcagctggctccccgcagggctgtccgggtgagtatggctctggccacgggccagtgtggcgggagggcaaaccccaaggccacctcggctcagagtccacggccggctgtcgccccgctccaggcgtcggcgggggatcctttccgcatgggcctgcgcccgcgctcggcgccccctccacggccccgccccgtccatggccccgtccttcatgggcgagcccctccatggccctgcccctccgcgccccacccctccctcgccccacctctcaccttcctgccccgcccccagcctccccacccctcaccggccagtcccctcccctatcccgctccgcccctcagccgccccgcccctcagccggcctgcctaatgtccccgtccccagcatcgccccgccccgcccccgtctcgccccgcccctcaggcggcctccctgctgtgccccgccccggcctcgccacgcccctacctcaccacgccccccgcatcgccacgccccccgcatcgccacgcctcccttaccatgcagtcccgccccgtcccttcctcgtcccgcctcgccgcgacacttcacacacagcttcgcctcaccccattacagtctcaccacgccccgtcccctctccgttgagccccgcgccttcgcccgggtggggcgctgcgctgtcagcggccttgctgtgtgaggcagaacctgcgggggcaggggcgggctggttccctggccagccattggcagagtccgcaggctagggctgtcaatcatgctggccggcgtggccccgcctccgccggcgcggccccgcctccgccggcgcagcgtctgggacgcaaggcgccgtgggggctgccgggacgggtccaagatggacggccgctcaggttctgcttttacctgcggcccagagccccattcattgccccggtgctgagcggcgccgcgagtcggcccgaggcctccggggactgccgtgccgggcgggagaccgccatggcgaccctggaaaagctgatgaaggccttcgagtccctcaagtccttccagcagcagcagcagcagcagcagcagcagcagcagcagcagcagcagcagcagcagcagcagcaacagccgccaccgccgccgccgccgccgccgcctcctcagcttcctcagccgccgccgcaggcacagccgctgctgcctcagccgcagccgcccccgccgccgcccccgccgccacccggcccggctgtggctgaggagccgctgcaccgaccgtgagtttgggcccgctgcagctccctgtcccggcgggtcccaggctacggcggggatggcggtaaccctgcagcctgcgggccggcgacacgaacccccggccccgcagagacagagtgacccagcaacccagagcccatgagggacacccgccccctcctggggcgaggccttcccccacttcagccccgctccctcacttgggtcttcccttgtcctctcgcgaggggaggcagagccttgttggggcctgtcctgaattcaccgaggggagtcacggcctcagccctctcgcccttcgcaggatgcgaagagttggggcgagaacttgtttctttttatttgcgagaaaccagggcgggggttcttttaactgcgttgtgaagagaacttggaggagccgagatttgctcagtgccacttccctcttctagtctgagagggaagagggctgggggcgcgggacacttcgagaggaggcggggtttggagctggagagatgtgggggcagtggatgacataatgcttttaggacgcctcggcgggagtggcggggcagggggggggcggggagtgagggcgcgtccaatgggagatttcttttcctagtggcacttaaaacagcctgagatttgaggctcttcctacattgtcaggacatttcatttagttcatgatcacggtggtagtaacacgattttaagcaccacctaagagatctgctcatctaagcctaagttggtctgcaggcgtttgaatgagttgtggttgccaagtaaagtggtgaacttacgtggtgattaatgaaattatcttaaatattaggaagagttgattgaagttttttgcctatgtgtgttgggaataaaaccaacacgttgctgatggggaggttaattgccgagggatgaatgaggtgtacattttaccagtattccagtcaggcttgccagaatacggggggtccgcagactccgtgggcatctcagatgtgccagtgaaagggtttctgtttgcttcattgctgacagcttgttactttttggaagctaggggtttctgttgcttgttcttggggagaatttttgaaacaggaaaagagagaccattaaaacatctagcggaaccccaggactttccctggaagtctgtgtgtcgagtgtacagtaggagttaggaagtactctggtgcagttcaggcctttctcttacctctcagtattctatttccgatctggatgtgtcccagatggcatttggtaagaatatctctgttaagactgattaatttttagtaatatttcttgttctttgtttctgttatgatccttgtctcgtcttcaaagtttaattagaaaatgattcggagagcagtgttagcttatttgttggaataaaatttaggaataaattattctaaaggatggaaaaactttttggatatttggagaaattttaaaacaatttggcttatctcttcagtaagtaatttctcatccagaaatttactgtagtgcttttctaggaggtaggtgtcataaaagttcacacattgcatgtatcttgtgtaaacactaaacagggctcctgatgggaaggaagacctttctgctgggctgcttcagacacttgatcattctaaaaatatgccttctctttcttatgctgatttgacagaacctgcatttgcttatcttcaaaatatgggtatcaagaaatttcctttgctgccttgacaaaggagatagattttgtttcattactttaaggtaatatatgattaccttatttaaaaaatttaatcaggactggcaaggtggcttacacctttaatccgagcactttgggaggcctaggtggacgaatcacctgaggtcaggagtttgagaccagcctggctaacatggtgaaaccctgtctctactaaaaatacaaaaattagctggtcatggtggcacgtgcctgtaatccaagctacctgggaggctgaggcaggaaaatcgcttgaacccgggaggcagagtctgcagtgagttgagatcacgccactgcactccagcctgggtgacagagcgagactctatctcaaaaaaaattttttttaatgtattatttttgcataagtaatacattgacatgatacaaattctgtaattacaaaagggcaataattaaaatatcttccttccacccctttcctctgagtacctaactttgtccccaagaacaagcactatttcagttcctcatgtatcctgccagatataacctgttcatattgtaagatagatttaaaatgctctaaaaacaaaagtagtttagaataatatatatctatatattttttgagatgtagtctcacattgtcacccaggctggagtgcagtgatacaatctcggctcactgcagtctctgcctcccaggttcaaatgcttctcctgcctcagccttctgagtagctgggattacaggcgcccaccaccatgtccagctaatttttgtatttttagtagagatggggtttcaccatgttggccaggctggtcttgaactcctgaccttgtgatctgtccacctcggcctcccaaagtgctgggattacaggtgtgagccaccatgcctggctagaataataacttttaaaggttcttagcatgctctgaaatcaactgcattaggtttatttatagttttatagttattttaaataaaatgcatatttgtcatatttctctgtattttgctgttgagaaaggaggtattcactaattttgagtaacaaacactgctcacaaagtttggattttggcagttctgttcacgtgcttcagccaaaaaatcctcttctcaaagtaagattgatgaaagcaatttagaaagtatctgttctgtttttatggctcttgctctttggtgtggaactgtggtgtcacgccatgcatgggcctcagtttatgagtgtttgtgctctgctcagcatacaggatgcaggagttccttatggggctggctgcaggctcagcaaatctagcatgcttgggagggtcctcacagtaattaggaggcaattaatacttgcttctggcagtttcttattctccttcagattcctatctggtgtttccctgactttattcattcatcagtaaatatttactaaacatgtactatgtgcctggcactgttataggtgcagggctcagcagtgagcagacaaagctctgccctcgtgaagctttcattctaatgaaggacatagacagtaagcaagatagataagtaaaatatacagtacgttaatacgtggaggaacttcaaagcagggaaggggatagggaaatgtcagggttaatcgagtgttaacttatttttatttttaaaaaaattgttaagggctttccagcaaaacccagaaagcctgctagacaaattccaaaagagctgtagcactaagtgttgacatttttattttattttgttttgttttgttttttttgagacagttcttgctctatcagccaggctggagtgcactagtgtgatcttggctcactgcaacctctgcctcttgggttcaagtgattctcatgcctcagcctcctgtttagctgggattatagacatgcactgccatgcctgggtaattttttttttttcccccgagacggagtcttgctctgtcgcccaggctggagtgcagtggcgcgatctcagctcactgcaagctccgcttcccgagttcacgccattctcctgcctcagtctcccaagtagctgggactacaggcgcctgccaccacgtccagctaatttttttgtatttttaatagagacggggtttcaccgtgttagccaggatgatcttgatctcctgacctcgtcatccgccgaccttgtgatccgcccacctcggcctcccaaagtgctgggattacaggcatgagccactgtgcccggccacgcctgggtaatttttgtatttttagtagagatggggttttgccatgatgagcaggctggtctcgaactcccggcctcatgtgatctgcctgccttggcctcccaaagtgctaggattacaggcatgagccaccatacctggccagtgttgatattttaaatacggtgttcagggaaggtccactgagaagacagctttttttttttttttttttggggttggggggcaaggtcttgctctttaacccaggctggaatgcagtatcactatcgtagctcacttcagccttgaactcctgggctcaagtgatcctcccacctcaacctcacaatgtgttgggactataggtgtgagccatcacacctggccagatgatggcttttgagtaaagacctcaagcgagttaagagtctagtgtaagggtgtatgaagtagtggtattccagatggggggaacaggtccaaaatcttcctgtttcaggaatagcaaggatgtcattttagttgggtgaattgagtgagggggacatttgtagtaagaagtaaggtccaagaggtcaagggagtgccatatcagaccaatactacttgccttgtagatggaataaagatattggcatttatgtgagtgagatgggatgtcactggaggattagagcagaggagtagcatgatctgaatttcaatcttaagtgaactctggctgacaacagagtgaaggggaacaccggcaaaagcagaaaccagttaggaagccactgcagtgctcagataagcatggtgggttctgtcagggtaccggctgtcggctgtgggcagtgtgaggaatgactgactggattttgaatgcggaaccaactgcacttgttgaactctgctaagtataacaatttagcagtagcttgcgttatcaggtttgtattcagctgcaagtaacagaaaatcctgctgcaatagcttaaactggtaacaagcaagagcttatcagaagacaaaaataagtctggggaaattcaacaataagttaaggaacccaggctctttcttttttttttttttgaaacggagtttcgctcttgtcacccgggctggagtgcaatgatgtgatctcagctcactaaaacctctacctcctgggttcaagtgattcttctgcctcagcctcccaagtaactgggattacaggcgtataccaccatgcccagctaatttttgtgtttttagtagagatggggtttcaccatgttggccaggctggtctcgaacttctgacctcaggtgatccactcgcctcagcctgccaaagtgctgggattacaggtttgggccactgcacccggtcagaacccaggctctttcttatacttaccttgcaaacccttgttctcattttttccctttgtatttttattgttgaattgtaatagttctttatatattctggatactggattcttatcagatagatgatttgtaaaaactctcccttcctttggattgtctttttactttcttgatagtgtcttttgaagtgtaaaagtttttaattttgatgaagtcgagtttatctattttgtctttggttgctgtgcttcaagtgtcatatctaagaaatcattgtctaatccaaagtcaaaaaggtttactcctatgttttcttctaagaattttagagttttacatttaagtctgatccattttgagttaatttttatatatggttcaggtagaagtccaactttattcttttccatgtggttattcagttgtcccagcactgtttgttgaagagactattctttccccatggaattatcttagtacccttgttgaaaattaatcgtccttaattgtataaatttatttctagactgtcagttctacctgttggtctttatgtcgatcctgtgccagtaccatacagtcttgattactgaagtttgtgtcacagtttaaattcatgaaatgtgagttctccaactttgttccttttcaagattgatttggccatgctgggtcccttgcatttccgtacgaattgtaggatcagcttgtcagtttcaacaaagaagccaagtaggattctgagagggattgtgttgaatctgtagatcaacttggggagtattcgcatcttaacaatattgtcttccacctatgaacatgggcaaactttgtgtaaatggtcagattgtaagtatttcgggctgtgtgggcacagtgtctctgtcacagctacgcggctctgccattgtagcatgaaagtagccataagcaatatgtatgagtgtctgtgttccaatagaattttattaatgacaaggaagtttgaatttcatataattttcacctgtcatgagatagtatttgattattttggtcaaccatttaaaaatgtaaaaacatttcttagcttgtgaactagccaaaaatatgcaggttatagttttcccactcctaggttaaaatatgataggaccacatttggaaagcatttctttttttttttttttttttttttttgagacggagtttcactcttgttgcccaggctggagtgcagtggcgcgatctcggctcactgcaacctctgcctcccaggttcaagacattctcctgcacggcctccctagtagctgggattacaggcatgcgccaccacacccagctaattttgtatttttagtagagacggggtttctccatgttggtcaggctggtcttgaactcctgacctcaggtgatccacccgcctcagcctcccaaagtgctgggattacagggtgtgagccaccacaccctgctggaaagcatttcttttttggctgtttttgttttttttttaaactagttttgaaaattataaaagttacacatatacattataaaaatatcttcaagcagcacagatgaaaaacaaagcccttcttgcaagtctgtcatctttgtctaacttcctaagaacaaaagtgtttcttgtgtcttcttcccagattttaatatgcatatacaagcatttaaatgtgtcattttttgtttgcttgactgagatcacattacatatgtatttttttacttaacaatgtgtcatagatattgttccatagcagtacctgtaattcttattaattgctatgtaatattttagaatttctttttaaaagaggacttttggagatgtaaaggcaaaggtctcacatttttgtggctgtagaatgtgctggtgacatattctctctaccttgagaagtccccatccccatcacctccatttcctgtaaataagtcaaccacttgataaactacctttgaatggatccacactcaaaacatttagtcttattcagacaacaaggaggaaaaataaaataccttataaagcactgtttaatattgtattaaattggatcaatttgggggctagaatgtatgttagagacatgatatgtccataggtccttgctatcacagtgaggtctcagggacagtcgtttggtatcatttgggatctcataagcagactctctctgcttgacctgacaaatcagagtctgtgttttaacaggttcagtgagtgacttacatgcacattggagtttgggaagctccactgtaggtgcttagaccttacctttgttgttgctaataacaatgcaagcatttgggaggaagacctgtgttgctcatatgtgtccaggtgtagctgaggtggccttgcttatctgctgtagggccgttgagcatttctgtagctgtgatgagtgagctgaggtgagcctgcggagagctcccagccattggtagtgggactcgcttagatgaactggaaggaccctttcatctgagcagccactatggagaaaaacaaccgaatgaggggagagacaatgtgcaattttatttagggcacaaaggagagctgtggttagaaggtgacatttgagtggaaagggggcaagccatgtgtatagcgggagaagagaggtccaggcagagttaacagaaggcagaaatgctttccatgtttgagaaccagtaaggaggccagtggctgaagtaaggtgaagggcagaaataaggatgaggctgcgagagatgagaggttagagacgagcgtcttgtgcaccaagataagcttgtgtggtcaaaacaagtagtttaatttatgtttttaaaagatcattttggctgggcacaatggttcatgcctgtaataccagtagtttgagacggtgtggtgggaggattgcctgaggccagacgaccagcatagccaacatagcagcacctataaggtctctacaaaaaactttaaaaaattagctgggcatagtggtgtgtgcctgtagtcccagctactcaggaggctgaggaggctggaggattgcttgagtccaggagtttgaggctgcagtgagctatgattatgccactacactacaacctgggcaagagagtgagaccctgtctctaaatatacacacacacacacacacacacacacacacacacacacacacacacacacacacacatatatatgtatatatatgcatttagatgaaaagatcactttgacaataccacatgctggtgaggatttagaaaaactaggtcacttattgctggtgggaatataatatagtacggccactctggaaaacagtttggcagtttgtcataaaactgaacataccgttagtatacagcccagcagcaactacaatcctgggcattaatcctagagaaatgaaaccttaatgttcacataaaaacctatactcaagtatgcatagcagctttacccataatatctaagaactggaatcagctcagatgtccttcaacaggtgaatggttaaactactcagtaataaaaaggaatgagctactgatagcatgcaacagtttaggtgaagttatgctaatgaaaaaagccaatcccaaaaggttatacatactgtatgattctatgtttttttgcaatggcacagttttagggatggagaatagattagtggttgcctggggttagagatggggtagtagagtaggttagtggtggcagaggagagaaaagagagggaggtgaatgtggttataaaaggacaacacaggggaatacttgtaatggaaatgctttgtctttttttttttttttttttttttggcgacagagtcttgctctgttgcccaggctggagtgcagtggcatgatcttttctcactgcaacctctgcctcctgggttcaagtgatacttgtgtctcagtctcccatgttcagagtgaaacaaaccagaggtaatgttcatccaaataatccaacacacatgacattaaaacatcaagatcaggtcggacgtggtggctcatgcctgtaatcccagcacttttgggaggccaaggtgggcagatcacttgaggtcaggagttcgagaccagccgggccaacatgatgaaaccccatcttgactaaaaatacaaaaattagccgggcatggtggtgtgcacctgtagtcccagctacttgggaggctgaggcaagagaactgcttgaacccgaggggcagaggttgcagtgagctgagagtgcgccattgcacttcagcctgtgtgacagagtaagactccatctccaaaaaaaaaaaaccaagatcaattaaaatacagcattactgggccgggtgtggtggctcacacctgtaatcccagcactttgggaggccgagatgggcagatcacgaggtcaggagatccagaccatcccggctaacacggtgaaaccccgtctctactaaaaaatacaaaaaattagccgggtatagtggtgggtgcctgtagtcccagctacttgggaggctgaagcaggagaatggtgtgaacccgggaggcagagctggcagtgagctgagatcgcgccactgcactccagcctgggcgacagagcaagactccgtctcgggggaaaaaaaaaaataaataaatagaatgctgtagtgtccttgagtttacatgcccctccttacgcttgtgtgcccgtgcagattgcttgattacacaattagaggaggctggcggaggattgttttaatttttttttttttgagacagtctggctctgttccccaggctagagtgcaatggcgcaatcttggtgcactgcaacctctgcctcctgggttcaagcagttcttctgccgcagcctcccgagtagctgggattataggcgcccgccaccacgcccaactattttttgtatttttagtagagcagcgtttcaccatgctggccaggctggtctcgaactcctgacctcagatgatctgctgccccagcctcccaaagtgctgggattacaggcgtgagccacacctggccgtttgttttaattttgaaggtgaagtgaaagtgactacatttaccaaaagtgattgaaaagccaggactgttcttaccctgtttttccagttcttgctcagagcaaggtggtttctttttcacttaatcaccatacttacttttcatgtagaacaagtcagtttgagttatcagttcatcatcttaactaaattccatgggggaaggaattagttttagtttcttaaacttccaggtttgcttattggacaaaatgagatagcaaggcagtgtttttaagttagattttttatttctttggtaatacaattttctcagaaacttagtagtcttttagtttagttgtttttagttggtcctatgttttggatcacccctctctactttattttgatagtgccaactgtgaagacatctgaagccataggtttggatgggaaggaggcatctttagcctgatcatcttcgccaggctgtttatctccttttgcttggctgagaagtcttaataggaggcttattcccagctatttggggacatagaagcagttagccattgcttatattttactgaggtctgtgtggtatgttgattgtagtcagttaacgattttgagaactgaaggcagcctggtatatatagagtaggtattagactgtgtttcttctaattgaatttcccatctcttgtaatctatgccatcatcttctgtactgctgagaaagaaagaaagtttctaatcaaactataccactggttgtaagatgcagtttggctttagtgatgttaacacatgattcaaacgtgaaattgattgagtattggtgaaatacagaggagatttaaagccagaagacctgggtttaaatgctggctgtatgacttcatatctgtgtgatcttgggcatgtcatggttggcacttcaatttcttctctctataatgggggaagtgaggccagtcatggtggctcatacctataatcccagtgctttgggaggccaagatgggaagatcgcttgaggccaggagtttgagcaattgggcaacatcgtgaggccccgtctctacaaaatattttgaaaaaattagccaggcccagtggtgcgtgcctgtggtccgcgccactcaggaggctgagacgggaggatcctttcagcctaggagtttaaggctaaagtgagccatgattgtgctatcgtactccagcctgggcagcagagcaagatcctgactctaaaaaaaagtaaaataaagtaaaatgggggaaatgaactgctttagtaacatcatctgttttttctgtgagcagcgtagcttgacagccattggtgaactcgtgccctgtgcttccctgtccagatccccattctgcccgcaacatggagtataacggtttattcatagtagtcgagaaacactcactgaatgaatgaatgaggtgtagaactaagtggagtgggtaattcaacacatattaatttccttcttttttttatttttagaaagaaagaactttcagctaccaagaaagaccgtgtgaatcattgtctgacaatatgtgaaaacatagtggcacagtctgtcaggtaattgcactttgaactgtctagagaaaataagaactttgtatattttcagtcttaatgggctagaatattctttgtgtcccagctattttaaatggattcagaaatccatttaagatgaagaaggacccttttcccatatttctggctatatacaaggatatccagacactgaaatgaataatgttccctttttgtaatcttttatgcaaaaattaaaaccattatggtaattgaacaacatgtttatgtttagttaacacccttagcaactatagttattttaaaaccatctatggtttgatatttttgcatttgttgcaatagtaggaacagcacaagacagttcagtttgtctctcttatttgctttttcttggcagtttgctgtcctattgtacctctgctcctagcagtggctggagcccactcctctgtgcttcgggattagtggggatcgtggggcattgactgtaggtcagctttccttgcttgatctttctcactgggatgaactagcagcaccttcttttgtagctgctttgcttttgactatctttctgaccgttgttcctagtagctgtagatggtaaatatatttaggcctgtttccaatggctcagtaggagacatattcacctatgatatctgaattctgttacccacatgggcatgcgtgaaatagttgccttgccttactttcccttggaataaataattcatgttattctcctggtagaagctagaaaaagcctttatagtcagtcagaaaaaaatttttagacaaataatcttgattttagtactgacaaaaacgtgtggtgattctttttttaatttttttttgagacggagtttcactcttgttgcccaggctggagtgcaatggcgtgatctcggctcactgcaacctctgcctcctgggttcaagtgattctcctgcctcagcctcccaagtagctggagttacaggcatgtgctactgtgcccagctaattttgtatttttagtagagatgttggtcaggctgatctcgaactcccaaccttaggtgatctgcccgcctcagcctcccaaagtgctgggattacaggcgtgagccagggcgcccggtgattcatttgttttttcaaaaaatttcctcttggccattgcttttcacttttgttttttttttttttttgagacggagtcacgatctgtcacccaggctggagtgcagtggcatgatcttggcttactgcaagctctgcctcccaggttcacgccattctcctgcttcagcctggcgagtagctgggactacaggtgctcgccaccacacccggctaattttttgtatttttagtagagatggggtttcaccgtggtcttgatctcctgacctcatgacccgctcaactcagcctcccaaagtgctgggattacaggcgtgagccaccgcgcccggccctctcttgtctttttattgtggtaaaatgcacataaaattgactgtcttaaccatttttaggggtacagttcagtatatatattcgtaatgttgtacagccatcactgccatctacttcataagtttttcttctgtcaaaactgaacatctgtcttcattaaactccctatcatccattctttcctgtagtccctttctactttctgtctgtatgagtgtaactgctctggagacctcatgtaagtggattcctacaggatttgtgttttttttttggtgatctgcttatttttaatgcctctgtgcatttgtattatatactttcaaagtgatttcacaaaaccgtttcattttaggttaactcatttctgttgtttgtgaaatactgtgtatgattctgttctgtttctgtctaatttgtggaaatgttgtgggaagaaaatgaaataacaaatgagcatatgtcctgaaaataaaaatataaaaattctaagttagcatgctattgtagaatacaacgctatgataaaagtaggaaaaaaaaaggtttgaattctatctctgctacctgtgtaagctgggtgactttagataagctgtaacgtgtttgagccttactggctcatttttgaaatgtaatccctagttacacagttcttgtgggatcagatggtacatgtgaaacactgtgaaaaagcaactgcatagatatgttcattagccacctgagcgggaagcgtatcccattgcgatgcccatcatccaaagctatatgttatctttacttttttttttttgagacagagtcttgctctgttgcccaggctagagtgcagtggtgcaatctcagctcactgcaagctccacctcccgggttcacgctattctcctgccccagcctcccaagtagctgggactacaggcacccgccaccatgcctggctaaatttttgtatttttagtagagatggggtttcaccgtgttagccaggatggtcttgatctcctgacctcgtgatccgcccgcctcggcctcccaaagtgctgggattacaggcgtgagccactgcccctggccatctttactttttttgtgaaatgactttaaatacttggcaaacatttggtcattgttcatctgatctccaccatccaggtctcagagaacataatttctctctgaaagcttattgacccaggaaataagatctctttcaatctgagtgcgtcaggctttattcttgtcattttgtcttttgataattttcaaatggaattcatggaatgttggcttatattcatatattagtaaagtatgttgagacatcttaagattgatttgtggttctatatgccatattaaatcaaaataatagctgttaatggttttcacattagtctgtctcttgtttttatggagtaatgctgagagttcattatgcttgttctacagaagagcatgttaaaaggagtttttggagtcagagaggttattcttggtttcataggatacactctatactttttagggatttcagagtatatagctgaaggtgatattttatgtaaatatgttttatggaaacttattgctcatcgctgtttcctgttaactctcctaaaatataattaaacttttggaacttttttatagcttttgtgctagactaatttttgtctctaatgaggttatataaatggcagcttctgacgttttcaatgtaggaagtcatttaaaacttcatgtatattgtgaaaatgtagtctgctttaagctctctaaagtggtctaagttactggttcctaagtatggatgagcatcaaaatcatctggaaaatttgttaaaaatacagtaatgaaggcacctcactgtcctttttcccaaacatacttctgcattctgtttgagtaggtagggactacacatttttcacaagtatcctcttgggaatacccaggaatgcttacttgagcaacctcttactaatatgtaccttgataaggtggctaggtaaacataaatatacaaaaatccatagatctcccatatattagcataaatcagctagaaaatataacgtttaaagatctagttcacagtagcaccaatatatcgaactctaaggaatcgataaatatgcaaaaactttataaaaacttctgttaatgtttctgaaagatataggtgaccactttctagataggaagattttatattactaagttgaattttctctaaattaacacagaaatttaaaataatcttgatcaaaattctagtagaggtatttttgaacttgttcactgcaagaataaatacataattgcaaagaatatctcaaaatcatcaccaggcctggtgtggtggcccatgcctgtaatcccagcactttgggaggctgaggcaggcagatcacctgaggtcaagagtttgagaccagctggaccagtgcggtgaaacactgcctctactaaaaatacaaaaattagctgggtgtggtggtgcatgcctgtagtcccagctacttgggaggctgaggcaggagaattgcttgaacccaggaggtacaggttgcggtgagcctagatcgcaccactgcattccagcctgggcgacaagagcaaaattctgtctcaagaaaaaagagaaaaaagaaaaagaaatcaacactaatatggtgagacttaatgtatgtgacattaaaatagtgattggatgttaaaacaggtatagaacagaaagaagagtgtatgtgtgtatctgtatgaatttatgatgggtgtaacatatatgtattagggaaatgagggaaatgatacatttctctgactttgggagaacattatatctctacctcatattgcaaacaaacataaagttcagattaattacctaaatgtgaaaaaatgaaataatttctttaaaaaatgtaatcttagtttgaggaaggttaacattataaaggaaaaaactgttttgagtggaatatagttcaatatgtcaaaatccaccttcaacaaaattgaaagtaaattgaacttggggaaagtattgacagcatatagatcaaaggttactagcctgtgtaaagagcagttataaatatcgttaagaaaaacactgtcgacctgtcggcaccttgttctccgactcccagcctccagaactgtgacgagtaagtgcttattgtttaaaccacccagtctgtatgtggtattttgttatagaaactcaagctgattaggacactagtaatcagtagactgaaactgaaacaaaaataagaaccttttttacctgtcaaattggcaaacattaagaatattcagatttttgtcagaggtgatacaaccttctaagaaggcaatttgggaaaatataaagctttagattattatatgtctgacctagcagttttacctctagggtgcttacccctaggaaagtgtgtaatgatattggtgcagtgcccttcatcccattagaaaattaaaaataaccttaatggcctaccactaaaaggggattgaaaatttaagatatatttatttatgtgtttattgagatggagtcttgcactgtccgcctgggccagagtgcaatggtgcgatctcggctcactgcaacctctgcttcccgggttcatgtgattctcctgcctcagcctcctgagtagctgggattacaggctcacaccaccgcacccggctaattttttgtatttttagtagagatggggtttcactgtgttggccagactggtctcgaactcctgacctcatgatccgcgcccctcggcctcccagtgttgggattacaggtgtgagccactgcgcctggccagatacatttatacaagagaatgttagttaacattcatagatatttatattttgtttactttttattaaaaaaattttttttagagacaggatcttactctgtcacccaggcaggatgcagttgcacaatcatagcccactgcagcctgaactcctgggcttaagtgatccttctgcctcagccttttgagtacctgggggactttaggcagtgctactatacctggctaatttttaaatgttttatagatgagatcttgctgtattgcccaggctggtctagaattcctgggcccaagtgatcctcccaccttggcctcccaaagcgctgagattacaggcatgagccaccacttctgaccaatagatatttatatttgtgactggaaaatatattaacaatgtgttaaaaaattcagttaaaaaataatgaaagatttttgcttctggctaagatagaataacaaggacagcatttatcttcttgccttgaaatagttgaaaacggaagaaatatatgtaacagtggttttcaagttattgggcatcaggcaaagaagaatagttatcccaggaaaatgaatgtggagagccctacaatttccttacattactgcctggtcatggcaagaggaaaaactgagaggagactgaggctgagccagtggtttgctgggttgaggaggcagagctgggagtgcagagatgcaaggtggtgagagcccatatggaagaataccagggaagagagctgcagagggagctccggagacctgcaccctgccctctcagtaccctgtcatgtgtgtagctgagtactgacgagcacttgcttgtgcggaaatgacccagggctggaggtagagccacctgaaaggattagaaggaacagttgctgaaagtcacacagggccaggaagaatttctaatcacaccagttggagtggaaaacctcagctctcatagagcaggtagggtactcagaagggtttgcccacctagccccagactaagtttcgttactctgaccctacctaatattaaaaagagattaattaaattgttcgcaacaaaaataatatatttcagtgtttgtaacacgtagaagtgaattgtatgacaatagcataaaggctggaagagcagaaattgacatgtatttgcgctgggcagaataatgctcccctctttccccaaaagatatcaagtcctaatccctggagcctgtaaatattactttatatggaaaattgttttatgatgtgattaaattcaggatcttgagatgagggggctatcttggatgatctgggtaggcactaaatgcaatcacatatatataaaaaggaggcagagggagattttacacacagagagaaggccctgtgaagatggaacagaaagatttgaaggtgctggccttgaaaattggagtgatgaagctataagccaaggaatgcagcagccaccaaagctggaagaggcacggagcagttctcatttagagcctactccagagggaatgtggtgctgccaattccttttttttttttttttttaagatatcatttacccctttaagttggttttttttttttttttttttttttagtatttattgatcattcttgggtgtttcttggagagggggatttggcagggtcataggacaatagtggagggaaggtcagcagataaacatgtaaacaaaggtctctggttttcctaggcagagggccctgccacgttctgcagtgtttgtgtccctgggtacttgagattagggagtggtgatgactcttaacgagtatgctgccttcaagcatctgtttaacaaagcacatcttgcaccgcccttaatccatttaacccttagtggacacagcacatgtttcagagagcacggggttgggggtaaggttatagattaacagcatcccaaggcagaagaatttttcttagtacagaacaaaatggagtgtcctatgtctacttctttctacgcagacacagtaacaatctgatctctctttcttttcccacatttcctccttttctattcgacaaaactgccaccgtcatcatggactgttctcaatgagctattgggtacacctcccagatggggtggcggccgggcagaggggctcctcacttcccagatggggcggccgggcagaggcgccccccaacctcccagacggggcggcggctgggcgggggctgccccccacctcccggacggggcgggtggccgggcgggggctgcccaccacctcccggacggggcggctggccgggcgggggctgccccccacctcccggacggggcgggtggccgggcgggggctgccccccacctcccggacggggcggctggccgggcgggggctgccccccacctcccggacggagcggctgccgggcggaggggctcctcacttcccggacggggcggctgctgggcggaggggctcctcacttctcagacggggcggctggtcagagacgctcctcacctcccagacggggtggcagtggggcagagacattcttaagttcccagacggagtcacggccgggcagaggtgctcttcacatctcagacggggcggcggggcagaggtgctccccacttcccagacgatgggcggccgggcagagatgctcctcacttcctagatgggatgacagccgggaagaggcgctcctcacttcccagactgggcagccaggcagaggggctcctcacatcccagacgatgggcggccaggcagaaacgctcctcacttcctagacggggtggcggctgggcagaggccgcaatcttggcactttgggaggccaaggcaggcggctgggaggtgaaggttgtagtgacccgagatcacgccactgcactccagcctgggcaacactgagcactgagtgagcgagactccgtctgcaatcccggcacctcgggaggccgaggctggcagatcacttgcagtcaggagctggagaccagcccggccaacacggcgaaaccccgtctccaccaaaaaacacgaaaaccagtcagacatggcggtgcgtgcctgcaatcccaggcacttggcaggctgaggcaggagaatcaggtagggaggttgcagtgagtagagatggtggcagtacagtccagccttggctcggcatcagagggagactgtgcgagggcgagggcgagggcgagggaattccttaatttcagtttagtgatactaattttggactctggcctctaaaactgtgaaagaaaaaattttttgtttgtttgtttcttttaagccacatagtttgtggtaatttgttacagcagctgcaggaaactaatttatgctgcatgtgaaatggtgtaataaggtagattgtgatgaagatacatagtataaacaattaagcaacaactaaaagcacaacaaggaattatagctaatgaaccaaaaaaggagattagaataataaaaatggtgaatcccaaagaagccagaaataggggaagaggcaaataaaggaaagaaagagcttgatggtagatttcaacctaactatgtcaaaaaggacattacatgtaaaaggcagcgatttttcagattgaatggaaaagtaagactcggtatatgctgctgcctgcaagaaacacattctaaatataaaggcaaaaataacctacaggtaacagaacggaaagaagttcactgtgcttacaagaattagatgcaagctagactggttctgttaatatcagacaaagtggatttcaaagcaaaggctcttgcccaggatgagatggtcatttcataatgatgaaggggattcgttcatcagcctggcatagcaagctgaaatgtttatgcaccggactacagagctaaaatacatgaagcaaagcctgacagaactacaagtagaaacagacaaatccacagtgatagagatttcagtagccgctctcaatgatttgtagaacacgtagccataatatctggatctagaacacttgaccaacactgtcccctgtgcaacctcattggcatttacaggacactccacccagcaccagcagaagagacactctctcaagtgctcacagaatgtttgccaagatagagcagatgctgggccataaaacaagtctctaaattaaaagcattcaaattattcagagtatgttttctgacctcagtatcattaagttggaatatattataggaagataacctggaaaagcctcagatatgtggaaaaacccatttccacatggcccatgggtcagaagtgaagtcaaaagggaaatttgaaagtcttttggattgactgatataaaaacaatagatttctaaacttgtggggtgctgttacagcatagtaaatggaaatttctagcattaaatgcctgttttaggaaagaaagatttcaaatcaatgacctcagcttctacctttggaaacttgaaaatgacaagcaaatggaatccagagttaccagaagggccaggtacggtggcttatgcctgcagttctgccactttgggaggccgaggcaggtggattgtttgagactggcagttgaagaccagcctgggcagcctagggagaccccatatctacaaaaaacaaaaaaattagccaggtgtggtggcatgtgcctgtagtcccagctaaccaggagtctaaggtgggaggattgcttgagtctgggaggttgaggctgcagtgaactgtgattgtgccactgtgttccatcctgggcaacagaatgagaccctgtctcaaaaacaaaaacagttactagaagaatggacatcataaagataggagcagaagtcagtaaaatagaaaacaaaaatacataggaaatcaataaaaccaaaagctggttcatcaagaacatcaataaattggtaaagctgataggaaaaacagtgaagtcacaaattagcaatatcaggaatgagggagatgacagtagtatagattatatagatattaaaaggactgtatgaggcaggtgtggtggttcacgcctgtaatcccagcaccttgggaggccgaggtggacagatcacctgaggtcaggagtttgggaccagcctggccaacatggtgaaactctgtctctactaaaaatacaaaaattagttggtcgtggtgctgtgtgcctgtaatcccagctacttgggaggctgaggcaggagaattgcttgaacctgggaggcggaggttgcagtgagctgagattgtgccgttgcactccagcctgggtgacagagcaagactccatctcaaaacaaataaataaataaaaaggactatatggtaatattatgaacaactttatgccaataaatttgacaacttatagatgaaatggatgagttccttgaaagacacagaaactattaaagctctctcaagaagatatagataagctgattagccctatatctattttattgaatttaaatgtaaaaatcaatatttagttactggaaaacttttaagtgtggttggaaatggtatacgaactttttcaactgaattttatgaagtctaatcacaggtaaaggttttctgatgaaaatttagtgtctgaattgagatatactgtaaaaaatgttatatatcttaattatttcttcacattaattacatgttgaaataatactttgggtgtattgggttaaattaaatattatgaaaatcttgcctgttttctttttacttttgatgcgtcagctaggaaatataaaagtgtagctcacattctgtttctgttgacagtactgctttggagcacagtgtttgaatgatctatcatttcaaagacctttcctcagttcgttattcatggctgtctgtattccacatagataaggtctgaaatactgctaagtggcatgttttgttttatgcttttataagtttgttgatcattactgatgtggacttttggtgcctcttaggctcattgctatcttccaaccattgtttgcaatttttacctagagataaagagaaagagacatttggtttcagagtagttagattgggatcatgaaagagcaacctcattttgatgcttcaaaaatagcacatcccccgtattactgggatttgctattcttgggattacttcaagaacatccttgtgttactggtttggatgcttctgaatgctgtgaagtcagtttcatgtacatggctcatcagtttagctctctcttggctttgtttagacagttggagcatgatggcctaaacagcttctttcaattaaacattttaaaatagtttacaaatagtaaacaaactccagtttttgtgactctttgtctcgcacaacaaaaacacaatctgaccatgatcatctggcatcttagggtgaaatatggttatactttggcccataccgaaagcaagattaaaaaggggcaggagagatagactgctgaactgattttcaaggttccaagaatattgtaggttaagagtaaaagtaaacttttggtagaaagcagtgggttgtctaggattgaagtatctgaagtttttaaacgaaaatttaaaaagaaaaatgagaattgccttacaagtacaatctcttcttttttaaaaaataaactttattttgaaatagttttagatttatagaaaaaaattagatagggtaggaagttttcatataccctacatccagttaccccagttattatcatcctaatttagtgtgagacattttcatgtttaatgaatcaatattgatatgctattaacttaagtccagactttattcagattttcttaatttctatgtaatgtcctttttctgttccagaattccatgcaggacaccggatacctcattacatttcattgtcatgtcaccttaggctcctcttgacagtttctcttctttttttgcttagaaattctccagaatttcagaaacttctgggcatcgctatggaactttttctgctgtgcagtgatgacgcagagtcagatgtcaggatggtggctgacgaatgcctcaacaaagttatcaaagtaagaaccgtgtggatgatgttctcctcagagctatcattgttgtaggctgagagaagaagcgatcattgagtgttcttctgttttgagtccctgaggatgtctgcacttttttcctttctgatgtatggtttggaggtgctctgttgtatggtttggaggtgctctgttgtatggtttggaggtgctctattgtatggtttggaggtgctctgttgtatggtttggaggtgctcttgtatggtttggaggtgctcttgtatggtttggaggtgctctgttgtatggtttggaggtggtcttgtatggtttgcaggtgctctattgcatggtttgcaggtgctctattgtatggtttggaagtgctcttgtatggtttggaggtgctcttgtatggtttggagatgctctattgtatggtttgcaggtgctctattgtatggtttggaagtgctcttgtatggtttggaggtgctcttgtatggtttggaggtgctctgttgtatggtttggaggtgctctgttgtatggtttggaggtgctcttgtatggtttggaggtgctctattgtatggtttggagatgctctggtatctgcctgcattgcttgccacacctgcccggtcagaaggcgctatgttgacaattgtgcctgcacggtgcctaggtcaatgaagggaaccgatggtagccactggatgctcctgggaaaatgtcactacaggcaccagagaagccagagctatgcccaaatttctatgagtctcagttttcttaaccataaaatgggatcaatgtttttgtggcatgtgtatgagtgtgtgtctgtgtatgtgtgaggattaaattgtgtatgtgtgaggactaattgccactactggatcctcaaagtggtaagaagtgttcttattaataatgacatccttacactcttacccagcaagattgatgggtgtggcactgcttctctttttccatcacatggtttccatggtatccttttgcccagggaatctttgctttgtggctagcactttgttgtttggctaatcacgctttctgtggtcaggacgctggcttctctggagccatgggattctagctccctgtcttgtccctagagtggtcactgtcttctctctccgcttgcaattcctgctttgctcgcatctcacttatgcagtgacgtatatcagtttcaccttgttctccgtgcctgctgatcattggcaccacttgcatggtgccatttagggcctgcttccagttaagcttgcttctccacaggcctaaatatccttgcttgcttcttttattctcactggcaggaccagggcggtctgtctttgcatgagacagggtctcgctcagtcacccaggctggagtgcagtggctgatcacggctcattgcagccttgagctaccgggctcaagctatcctcctggcttggccccttgagtagctgggactacaggcgtgcaccaccatgcccagctaatttttaaaattatttgtagagatgggatctcgccaggttgcccaggctggtcttgaacgcctgggctcaagtgatcctccctccttggtttcccaaagtgctgggatcacaggtgtgagccactgtgcctggcccttgatgtttcagttcttgatatttgatcctcagagtcagaaaatctaaaaagagggctatcccaggttgccttggttcatggcaaatgggacgttaagagggcagagagaatatgaacagaaactgttctaatattggtcatttaatgtgtaagtattgttcttttttaaacctccttcattttttttccaggaattgctggacacagtggcttggtgtgtgtctgaggactgtaggccatggccctaggttgtggttttaggtctcaggtgctcttcctggctgtctccttgcttctttcccatgtcctcttctttgtttccagccatttctcccttatgcttaagtttggtgcagcagggtttggctgctctcagattcctgcttcctcagatgctgtagttgtcaggcccagcgggctggcagcgggatcaggatctggctaggtttgctctcactgtggcagagtagggggaggcgtgggagagcacgtgtgaccccaggccagctgtagggagcataggcatggtcacgtagccttcaggtcctagactttgtcttctcatgagtatggctgtgtgtgtatggtgaaaactaggttctacttagcccaagaaaatgggcacattttgcatgtggtttctgtagagaaatgcactgggtatctgacatagcctggcagcatgcctccctcaggtaggttagtctcaggcggtgaagcacgtgtgtccagcaagaacttcatatgtggcataaagtctccgttctgtgaggtgctggcaaatcaccaccaccgtcaagaggctgaagtgatttttgtctagggaggcaggaaaggcttcctggagtcagcagccagtaggtgaaagagtagattggagaccttcttaatcatcaccgcctcttgtctcaaggggtgccaggaagctgtggaggctgaacccatcttatgctgccagagagtgggacaccatgagggtcaggtcaaggggttgtaccttgtttggtagagaattaggggctcttgaagactttggatgtggtcaggggagtgtatcatttaggaagagtgacccggtgaggacgtggggtagaggaggacaggtgggagggagtccaggtgggagtgagtagacccagcaggagtgcagggcctcgagccaggatggtggcagggctgtgaggagaggcagccacctgtgtgtctgcggaagcaggggcaagagggaagaggccagcagcgtgctgccatcacccagcgactggcgtagattgtgagagaccattccctgctcttaggaggggctgagttttagttttctcttgttatacaataagcttggtatttgtttacaaaacatttgtaaagctaaatcaaggtttgataaggcttctagttttatttaagaagtaatgttgaaataaatgtttgtccaattcgctttgctcatttaaggactttcagtacaaactgcaacaacaggattaggatttaaacgtttctgagatgtttttactcctcagaatttcccagaatgtgatctggttttgattttcaagcttgctgacccaataggttaacccacaagttttacgaagaccatctcagtccacttacatcaactgcccatgccacggttaaagagatcatcgactgatgtttggcacagcttcctccctcttgggtgggcaagcatttggaagagaaggctcctatgggtgagagtggggcaccaaagtcttccctgtcccatcccctagcttgagaagcccttctctaatgtggactttgtgccgttagcatcgttactagcttgaagttgaccatctggacgtactttctggtttagcctcacaagtgagcaaggagggttgagagatgtgctgtgaggaatgtggggccccagctggcagcaggctctgggtcaggggggcagggaccacgggcatacctgacagtgaggaggggccacacctgcagaaaaggatgcaggactccgccttgggaagtgttctaggccagagcgagggtctgtggtttataagtacacccacagtgctcgggaccctgcagatgtccagggtgccgtctgagcccgtatcatccaacagaatgttctgctagtgaagattaaagatttactccaggggctttaggatttattatatatatataaatcctatatatataattttttttttttttttttttgagatggagtttcgctcttgttgcccaggctggagtgcaatggcgtgatcttggctcactgcaacctccgcctcccgggttcaaactattctcctgcctcagcctctcgagtagctgggattacaggcgcccaccaccacacccggctaatttttgtattttttagtagagacggagtttctccatgttggtcaggctggtcttgaactcctgacctcaggtgatctgcccgccttggcctcccaaagtgctgggattacaggcatgagccaccccacctggccaggatttattgtatttgaaccatctaccattttaattttgatgttatgtagtatttgatgataatgaaagttaaattgtttttctttccatttttctgtttaagtgaatgacctgtatctagtttattcagtaacttcctgcatatatttgtttctttcattcttaatgaatatattcttaatttagttgctattatgttttgctttgccccaaaattgaaatcttagtttccttttagctcgttttagaactagtgatgggatgtgtcttccataaatctcttgtgatttgttgtaggctttgatggattctaatcttccaaggttacagctcgagctctataaggaaattaaaaaggtgggccttgcttttcttttttaaaaatgttttaaattttaaatttttataggtacacgtattttgtaggtacatgtaaatgtatatatttatggggtacatgagatattttgatacaggtatacaatacataataatcacaccatggaaagttggatatccatgccctcaagcatttatcctttgtgttacaaacaatccagttacatgctttacttattttattttatttttgagacagagtcttgctttcacccatgctagagtacagtggcatgaccttggctcactgcaacctccgcctcccgggttcaaccgaactttgggctggtctcaaactcctgacctcaggtgatccgcccgcctcggcctcccaaagtgttgggattacaggcgtgagccactgtgccgggcctgattgtacattttaaaataactaaaacagtcagggcacagtggctcatgcctgtaatcccagcattttgggaggctgaggcaggtgatcacctgagatcaggagttcgagaccagcctggccaacatggagaaaccctgtctctactaaaaatacaaaaattagccaagtgtggtggcgggcgcctgtaatcctggctactcgggaggctgaggtaggggaatcgcttgaacctgggggtggaggttgcagtgagccgagatcacgccactgcattccagcctgagcgacagagtgagactttgtctcaaaaaataaaaatgaaataaaattgggccgggtgtggtggctcacaccttagtcccagcactttgggaacctgaggcaggtggatgcttgagaccaggagtttgagaccagcatgggcaacatggcaaaacgctgtctgtacagaaattagctgggtgtggtggtgcacaactatagtctcagctacttgggagattgaggtgggaggattaattgagcctggaaggttgaatctataggtagctgagattgtgccactgcccttcagcctgggcgaccaagtgagaccctgtctcaaaagaaaaacaaaaaaacaaaaaacaaaccactattatcgactatatattattgtctatgatccctctgctgtgctgtcgaataccaggtcttgggcccttatttccatcactgagcaaacttcactctgttaagcagcaggtgtgggatttcatcgttattcagtaattcacaatgttagaaggaaatgctgtttggtagacgattgctttacttttcttcaaaaggttactctttattagatgagatgagaattaaaaatggtaacttactttatatctttataattgaagcccactagaccttaaagtagttaccagatgttttatgcatttaaatggccttttctctaaaattagaaagtaacaaggaaagaaaatgcttcgtttctatgcaaccctcttggtgactagtatgtgactcttaatgcaaccctcattgcaccccctcagaatggtgcccctcggagtttgcgtgctgccctgtggaggtttgctgagctggctcacctggttcggcctcagaaatgcaggtaagttgtacactctggatgttggtttttgtcgggggccagctgctactgatcctttatgtctcagctcagatgtcatttcaaaagtctgctctgccctctccaaattgcagtcgaccttgccctgtttatgtttccctcatagcactaatccatgtcagaaattgtcacgtacagtctatctgtgtgcttgtttattttctatcccacccttccgcaagagacttatgggatgtgtgccccaggacagcaggggtcttactgtcttatgctctgttgcagcccagcagcgataacagtgtctgcacatagtacttgcttaaaagatacttgccaaattgttgaaggttgaggtaccaatttcattattgctgactataggagttatagcaaaatatccatttgtctgttacatgagttaaaaatatggttgttgcactgtgaatagtttggtttagtcaaaacagttgtatcttaacggattgagaaacaaaagcaggaccacttttcatcagctccctccttctccttaaccagcaatacatgctgatgctgatatcccatagaccctcagctccatcctgagtcactgggaatgtggtctaaaccctcactattaatatgaactgagtttcaataagaatcttatatgggtcgggcatagtggctcatacctttgatcccagcacttcaggaggccaaggcaggtggattgcttgacccagactaggcaacatggtgaaacgccgcctctacaaaaaatacaaaacttagccaggcatggtggtgcgtgcctgtggtcacagccactcgagaggctgaggtgggaggatcacttgagcctgggaggtggaggtcgtgttgagccaagatcgcaccactgcactccagcctgggcaacagagtgagacctgtctcaaaaaaaccaaaatccagaaaagaacttatatggctgcagaggtataatcactaaggaaatttccttttgtataatcttttttcttttactatcatttaaaaaaatgtgttatatttctgaagcaacacatccaggttctgcacatagcagccaaagtgaccttaaagaatataactgggtcttgtcattcccttatttaaactcttgtacccatttcccagtgccgtttagatagagattccagactcgtcaatggctctgtcacctcagacaccctgcattgactcattagtctgattagagtcaggtttttcttcctcctgatggtttttttttcccccttagttctcagcggaacagtcacttccttagggaggtttccccagccaccctctgaggccgtgcttgttgccagactctgccactagagggcagggctgcaccactcctggcacctcgcacccggcctgccctgtcactctgtgtgttgggtgaattcctgtgatctgtgactcactgctctgtgtcctacacattcggcttttcttctctccccacaaccccattttataattctcctttttcaggaaagctttattcccatttaaaaatttttgtttttaaaatggtattttcttacacttattttctaattaaaaatgagtgttttaagaagtattatgatttactgcaaataatttttaaacccagccttttagatcctctgtgatcataagagaaatgaaggatgtctcccaacacttgagcttcatccacatttcatcctcctgttctttcagctgagttttccccatcccattagggactgttggaatataaaactggcttttccctaacagggaatgaattgcttctgtttctcctgaaggagagctggaagaatgacttgcgttcttttgcatacacaggccttacctggtgaaccttctgccgtgcctgactcgaacaagcaagagacccgaagaatcagtccaggagaccttggctgcagctgttcccaaaattatggcttcttttggcaattttgcaaatgacaatgaaattaaggtatgattgttgcctcaggtcacaaacatgcgagtgatgctgtgagtgagtctgtggagggtgagggcttctgaacagggagtcctgtgggagtgcttcttggggtatgttgtatgtcgtaatttagactaccatcatttgtgttatttttgaggcacctaaggacttctttccacttctcatttcttactgtggggtgaagagttgaattgggagatggtttctagatgcaaattgaaaaggcatttttccagagcagatttgttttcggcgtactagagtgactctttaacctagctgcgggaagatgactgtgccaagactgcaggtaggagaaagctcactgacgaggccttgtgggtctgaacgtcctgcagctatcagagcctgttggcttcctgttgtgcattccaacaaatcatcttcaaacccactttagtgttttgtttataatgtccagaaatagtgaccctgtcacatgctctacagattacaggattcttagcctcttcctttttggtaggtcagtcctgggtttgagcccaagtgaccctcctgggaggtgatgatacacactgggtagagtggaatcagatggacttggattagaattctgtcctctttactagttattttcctctaggcaaactgcccaacagctctaagctatttccttcgtattctgaaaaataagccttaatgggacccatatagggcaactctgagagtaaaataaaggaatatgtgttagagtgtagcatagtcacccacgggaagggcttagatgttagctgctactgctcttattagctgaatgatttggaataaactgttagcctctctcatgttttttctcttgagcttcgaagttttcttgttaatactaaggagatattcaaactagtcatggggttttggaatgacgaagggagatgatgaatctaaagaatttagtgtaatatttcttcatgctcagtaaatggtagtttctgctgctgttatttttattaccatctctttggaatgggagtaggtgctcctttgtggtcagaggctgtgagagctccacagcgccagtttgcccatctgtacactggggtctgttgaaggcagtcccctctgtgatatctctggctgtcagagctcagatgatagatggtatttttgtactcttagttctcatcattttcatgatttcgatcaccatttgagtatgatgatgctaacactttgttgaacgtagaatccgttaattacttccttcctgaacctttggcattaaaaaaaatctattctgctacctctctgctcatttatggttattcaaatttattatcaagagcctggtacagtggcttgtgcctataattgtagctacttgggaggctgaggtaggaggattgcttgaggccaggagtttgagaccagcctgggcaagatagtgagaccctatctctaaaaaaactgaaaaaaaattagctggacatgatggcatgtgcctgtggtcctagctactcaggaggctgagacaggaggctcggttgagcccaggagttggagttcgaggctacactgagctgtgattgtgccaccacactccagcatgggtggtaaaacaagatgccatttcttaaaaaaaaaaaatatatatatatatattatcaatgaaattcagtagtaccaacaggattataaacaaagatagtagttcccttcctactttttctcttaatccttgtgtctcacaggcaaacataactcttagtatttcttccaatatttactttcatgtttctttctttctttctttttttttctttgagatggagttttgctcttgttgccaaggctggagtgcaatgacgcaatcttggctcaccacaacctctgtctcccgggttcaagcgattctcctgcctcagcctcctagtagctgggattacaggcatgcatcaccacgctcggctaattttgtacttttagtagagatggggtttctccgggttggtcaggctggtctcgaactcctgacctcaggtgatcctcccacctcagcctcccaaagtgctgggattacaggcgtgagccactgcgcccagcaacttccacatttctaaataacatgcttctactgctattttttttttcaattttagacatttttttactttcactatagttctatcagaattcagtgtgtacgttattatgcctaagtaaatagtcatggttgcttacgtattatatttctttgattgtgtttcttatttgatgagaaagctgtgttttttgctctgggttgaaactggagagaggacctggggaggaggaggaggacagatgaagttggtgactgtaccttcatggccatagctgggttctcagcacccggggatctgctgatcacctactcataggccaggcccctatcgaagttctaggtgacccagtgctggggacgggggggccacctgcaaggtctaatcatggaggtgggggctacagtgttggcttgtgctggggccagcatccttaggaaggcatcttggaggtggaggagacagccgcccacttcttgattggggccttcagcagcaccagcttcttgggcaggctggtgctggctttcatcaccatgtcgtgttcaatcttcttccagatcctgacttctaggttcagctttcctcagaccctggttcctttcagaggccattgctgctgccttgctctttgctggcttgtgccttgattatatgtctttgtacaactttttgttttcctggagttaatcttcacatctgttttcttggagttaatcgttacctctatatcgcttgcttattattctttggcctttttgtcttctcacaccttccaacttctttgtaatatgtgtttagtacaatttttcatgacaggtagtttactgaatcagtttttccccagtgtggtcatccaacttgagttatccagctctctgccccagtctgggcaggttgatcttcaggtctgtagtacacttgtatcctaggacttctctttgccattagcctggaatttcctttgcagttctcccgttggatgcccagttcctagatgccatatgtttttctatcgtctagtagcttcctgagagaagatgaatgggagggaaattgtatgaggttttgcattcataaaaatgccattttttttcctgtacacttggctgggtatggtgttctggggtagaaatcattttccctcagaaatgcaaagtctttgccctgttgtcttaaaatctccaacgtgacccgattccttaacctatgaatgtacttttctttggaagctttccatttttggggaggtgaagtgctaggtacttagtaggccttttaatttggaaacttacatcccttcagttctgggaaaattttcttaacatttctctgagaagttcttgccttttattttctgtgttctctcctgaaattggttagttggatgttggtcctcctagattgactcacatcttacctttttcttttctttttctggtactttttagatatccatctcaaactcttctattcattgttatgtttttaacttctttcttttctttgtctcttgatggggtcttgccctgttgcccaggttgtggtgcagtggtgcgatcatagctcactgcagcctcaaattcctgggctcaagcagctgttctgcctcaccctcccaagtagttgggactacaggtatgcaccaccacgtccagctattttctttacttttttttttttttttttgagatggagtcctactctgtcgcccaggctagagtgcggtggtgggattttggctcacttaagcctctgcctcccaggttcaagcagttctcctgcctcagcctctcaagtagctgggattacaggtgtgcaccaccatgcccggctaatttttgtatttttagtagagccagagtttcaccatgttggccaggctggtctcgaacgcctgacctcaggtgatccgcctgccttggcctccgaaagtgccgggattacaggcgtgagcccatcattagatctttaaataccagtatctataagtcttttcctcttgagtcagctagtatccctggaaggaaattactcattttcctgcttggaggctataagcttggctatgtttatcctgcaaccggggactggaagggaggggactgacagtgttgctggtcagggtgccctcttactttttgttttctgtgtgcatctcacgtctgtcctcagcctatgtaaacacctcttgagattatccctctcaatctttgccggaggtgggggaggggctgcttcctgggctgccttggattggagggaagacctcaggtgagtgggtgggaatttgcccaaggagccatgagaccagccactatttcaccctctccatccctccactttcagatgtatgtggcgcctccaaagcccgagctcttcttggcgtctgtggcttcaataagcttgctttttgctggtatccctcctaccctcccctgtccccagcaaagcttgcatttgaacttcttcctacgggctaacaaatcagtcagttatgtagctcttgttactttttagcttccgaagttttgttgacacccgtagtctgctaatgtccctgttctgttctttctgttcgtgtaaatatatgctttatacaacttctttacatgatttttgtggggtttctgggtagcagagcttcacaagttcaatccagcgtgttggattagaaatctcccaccctctggtttattcttattctcaaaattacctgccaaacactgatactcccttgtttttccttttcctgacaggaaatgtacataccatacaggacagaaatcattagtgtatcccttggtgaataaccacaaagtgaacttaacccttgtaaccgccacccaggtcaagacagaatattaccaagcactcagaagcctctcccctattcccccgtcactgctcctgccttcctccccaaggtcatgactgctggcttctaattccagagtctgtttttaaattctgtgtacatagaccatggattaagtgttctttttgtctggtttattttggtcgacattaagttcatgagagtcttctatattatcgtgtgtattagtattcctgtagttttaggagcttcatagcattccattgtagggatataccacagtttattcattgtattatcactgggttgtttctagttcttggctattgcgagcagtgctactgtgaccactcttaggtgtgtcttttggagtacatgtgcaggtttccatcttgcacagctagaggtggagttgttgggtgatagggtgtgtgcatctcagctgcagtagaaactgccaaatagctttccttgagtgcttgtaccagctcacccttttgccactgtgtatggggattccaggagctctggtcctcgctagcacttggaattgctgatgcttttactcttagccttcctgatgggtgttttctggaatcacattatgattttaatttccattccttaaagtacccttggctctgaagtttaatgattcatgcatctcttcccttttgaagtactcttacaggtatgttgtgcatgtgttgaaaagtggcactatctattctaaaatacagtatgcctcctctgtgtttgaacagttgtagcgtggccttggggcctcctgttagctggcttggagaagggattcttgggattgtagagattagacctgaggaggccccttggagctctctgactaaattttattctttattattccaaactatttaagctcaccgtgtgctgactcatcataataatgagtagctctcattgtgcttgtctatttggactcatacaatgattttttttttttctttgagacagagtcttgctctgttgcctaggctggagtgcagtggcacaatctcggctcactgcagcctccacctcccaggttcaagtgattcttgtgcctcagcttctcaagtagctgagactgcaggtgcgtaccaccatgcctggctaatgtttgtatttttagtagagacggggtttcaccatgttggccaggttggtctcaaactcctgacctcaagtgatctgccttcttcagcctcccaaagtgctgggattacaggtgtgagccactgagcttggccaaagtagttttttaagatgttagtatcttttcttgcagctaaaaaagtttgtcagagatgattctactttgttctccaggtgttttctcagggagaaattggaggcagtaagccactgggggagtcctgtggctggggggtggggtagtcctgtggctccttgtcagggagtcctgtggctggcaaggagagaagtcctgtggctgggttgggagggagtcctgtggctggggtctcatcctgtgcctaacagtgtccagaggtgccgagaccagctcagtcggggagaccctaacccagcagcgctagaggaattaaagacacacacacagaaatatagaggtgtgaagtgggaaatcaggggtctcacagcctttagagctgagagccctgaacagagatttacccacatatttattaatagcaaaccagtcattagcattgtttctatagatgttaaattaactaaaagtatcccttatgggaaacgaggggatgggccgaattaaaagaagaggttgggctagttaaccgcagcaggagcatgtccttaaggcacagatcgctcatgctattgtttgtggcttaagaatgcctttaagcggttttccaccctgggtgggccaggtgttccttgccctcattcctgtcaacccacaaccttccagtgtgggcattagggccattatgaacatgttacagtgcttcagagattttgtttatggccagttttggggccagtttatggccagattttggggggcctgctcccaatacagaggtctcgtgtaaattccctgggaggcgataagcctctgagaaacagactatgctaaccacgccatgaaagagaaacttatttataaatcagatgccagttactagtttactgcttatttgcccaggcgtagctctgacagagtccccgactcatagtgcttgctcagtgcatgctgaacaatgattggaatcaagtcatggctcagagcatagttttgaataatgggaaatggatgttcttaagtaacatagtcaccaagataatgcgactagctgggtcaccccttttcaattttaggatatttttatcaagatttaaatggccatcattagagttatagcactttctcctttggattgtcctagaggcccatgagaaagtattccctaatttcttaggagaacagtttgtgggtagtatgcggtcatgtccagttaaattgcagatatttccgatcgaagatgttccagtcctgagaacttcgtgacattagcaggacttctacaagccatctcttagggtggggcatttactgcagttggctagtactcttttctccttaactttgtcatttgttgatttttttttaactgtccccaaatactgtgggcagagtgtatctagaattgaggcctccaccattgcggagaggacatggatgctgagcagtcccctgagtgaaggttataaagaagcaaatagactacacatgtctgtaaactgctcttgagtgtcccaaatttggggtacttcagttcagctgtaggaaaagcctcaaactgtttatactttgcaagaattggaaacttctaattcacgttaagttttatgtaatacatgataagcttcataggagcttcatcttttatctacttggacttttgcttccgtaggttttgttaaaggccttcatagcgaacctgaagtcaagctcccccaccattcggcggacagcggctggatcagcagtgagcatctgccagcactcaagaaggacacaatatttctatagttggctactaaatgtgctcttaggtaaggtggaggcatatgagtggaagagtctccagcatgtactcaagatagacctttgaaataaataaaaccagatgatccctcagcttctagaccaggctatttggcactggttgattgaatgtgaactgcactggggctgctgtgagcccgcatgggtctctgtgaccctgcagatgcagccgtgcccagggactgggcagtgggtgtgggctggtgtgagccctgtctgccacccagggcctggccctctgtctgtgtcggccatgactatggtgagtcttgtaggcttgagactgtgcctcgggttcctgcgggttctctgtaggtcagttgacagtttctcctgttgtttgggtaactgtggaaacgaacactggcaagtgctgaagcgagcatgtggacgtgcgatatgaaataacgacctggctttcaaaggcagtgaggctctctggaaaggaccttgctgagctagggatgtgggtgtgtagccattcccagtgggcctcatggcgtactcgttcatgatcatgtttgtgccatcttgatctctcaggatctcttcttttttaacagattaagccgggaatctccaaacagtgagtcagatgttaagatgtcttgcttccacccccacaggcttactcgttcctgtcgaggatgaacactccactctgctgattcttggcgtgctgctcaccctgaggtatttggtgcccttgctgcagcagcaggtcaaggacacaagcctgaaaggcagcttcggagtgacaaggaaagaaatggaagtctctccttctgcagagcagcttgtccaggtaggagcacagggtttactctaggccctgcatgtgaatgactgacattcaaagaaccgattaatttggaagagaagcggcagaaccgagagttagaggtgtggactctggagctgcgctgctcgtttccaaccctaggtgctgacctctagctgtcttccctctgtatgtccctgtcaccgtgagtcaaatgcgggtgatgcctcctcaggtgccgtgttacctaagcctctcagagaccactgctaccctgtttctaaaaccagaggtcacgatatgtgttcatccacccagtaaatactgattgagcacccactgtgtgctaggctctgggataggggctgggtatacaatggtgagtatttcagctgcagcttctgccccgtggaggctgtggcctagcacactggtctaggcacggtggtatatgctcactcaaggagatagggacgtggtcgtttggggtgtcggaacaaaatgtcggaacttctctttccaatgcagagaaaccttgcagtaattctaatgtactgtgattggcagttgacttcagttctttgtagcacgcttactcaggttatttcactaactatgtaaccatgcagcctcattttaagcaattggattttttgaactttacttaaaatgttatgtcagggtttttattgtgcttaatgtgtgccatttagctaagttttgtaggatacgaaattgtaagtggcttaaaatgattcttaatagaatcatgaattgaagataatgctaataatttaagcactgagttaggtagtgtttgtaaaatgcttagaatgcttcctggcacatgttaaggccatgtaagtgctgcgtgttgataaacagctgagcaaaagtggactcttaagaaagtattggggctgagagttctgttccaaccagctgccctttggttatttttcagaataaaagcagagtctcatgggatatgacatttatatttccttcacaaaaaacactgctgagtgttttgttgagtaaaaagggtgtagccatggtaataatacatttaaaatatagtttatttcatctttaccttgccttgttttttttttaagctagctttttattgagaattccacacatacaaaagtatcaactcatgaccagttatatttcatttataatcctacttctccctttttttattatttgaaagcaaaccccaattatcctcttatttcatctataagtatttcagtatctctatagatgaggactcttctttatttttaaaactttatttttaaaatgatggtcagatgcagtgttcatgcctgtaatcccagaactttgggaggccaagctgggcggatcacttgaacctgggagtttgagaccagcccgggaaacatggcgaaaccccatgtcttaaagaaaaaaatcagccaagtgtggtgatgcatgcctgtagtcccagctacttgggaggctgagatgggagggtcacatgagcctggaagatcaaggctgcagtgatccatgattgtaccactgcactccatcctgggtgatggagcaagattctgtctcaaaaaaacaaaactgcaaaacaacgtcacaaaacagtgccattgttagacctgaaaatattaaacatttcctacatcaaatacccaccaactcattatcaatttttctctctactcttttggaatcagcatctaaataaaattggtcgataaggattgtaaatctctttgatgaactggttcccctccatcccagtttttttcccttagagttcatttattgagaaaccagattgtttgtcttctaagttttcctgtggtctgatatactgcttccatctccactgtgtaaattaacacctttttctcttctctgtatttcctgtaaatcaataattggaggaaaagccttgtcagatttagtgtatattttatatctgagtccagtatttcttatataatattttaagataagtgtactcttttaaaaagtattgaaactatatgctcaattttttttaactgatgcttttaagaaggctgcttgatcataaaagtttagagatcattggtctgatgggaaaagcaaataattactaaaccgtttagcaaggttgaggtgcacatggtggggcctggagaagttcagtcatgagccgtcacttatgggcacgtggaatctgacccggcacagagttgggagaagacaggagctttatagacagaaaatgtggtctttgctaagtcccaggagtgaaagggtgagacagtgctcacagcacacgagtgtgggtgcgtagacagagcaagggtgggtcctgaaaaggcctgcaggctttctcatagattagcaagagtgctggttacggaggtttctaacatttgtgaacagatcgaaactgtgttaaattgggattgcagtaatcctggaaggacagggatagagggtgaaggggaaaaaagggtatggatgtgagacttaattgctgattttcttaagacctttctccaaagtaaataaatgatgtggcacatttttgaactggcaaattctaaactctagatatgattatctctataacatatcttactccatcttcttttgactaaaaactgttcttaattaaattaccatgagacgttcaattcagcaaatgtagtttggctaaccatatttaattagaatttaatataatcctaggcctggccaaactattaagcaagtgtgggcaaaatattgataattttagatatgcaggaacttagtttgctttccatgtgtgcttttcgaaaaaggaataaattgaaaaatagaggaagccctgaaatccaagaagcaaactctctcacctaggcatgcagtaaaagcaattctaggatgattgctgtttggcgcgtagttcgtattagaaaccattcttcttgaataaatagtatgtttaagaagctgggcagagggaaggcatatgcatatattatcaacaaggagggagaaaaaggcaattagtaaccatccataggagggtcagcaagatttataaaggaaatttgtgatccaagtatgaagcaaaataaggtgcagaataaattttaagcaagtaatagattagagtaagagaacccatttgaccattaaccttgggacattctctttcaaatgacatggagtagtactgaaatctttctttctttctgagtctaggttattgtgactggactcagaaagaaatatttcattattgcagtgaataacatttgtgaacattattgttcataaattatgcagtgaataacatttatgaacacgtgatgtgtaagatacatactgtttatttttagttaagttttttggctcaacttctaggcagagaacattaaatgtaaatagtgttacctaggagcatgtaaatggaaatctccatagtatgaaagcagtgctgttgctaacagaatttaggagggggcagatgaggtgaaggaaatgtgggtgctgatttccttattacattgagaggagccaggagattctttgttcaaaatggatggcttaagaagtcaaagtataagctgattacgtagagcaggtacccaaaaatgttttgtgtaaggggccagatagtaaatattttcagtcttgcaggccatcccaagtctgtggcagctactcaacactacctttgtagcatgaaagcagccacaggcagcccataaatgtggctctgttccggtgaaactttaggtacaaaagcaggtgcaggccagacctgacctgtgcactgtggtttgctgacctgggattcaggggtatagaagttaccatcagaagagctaaaagtgagactttttactttatactcttctacactgtctgattttgaaaaaaagaaacatgtattttataatattaaagatagggttggcaaatagcaaataaaaatacagaataccagtgaaatttgaacttcagatacattatgagtaattttatggtgtaagtatattccaaatcatgtgggacatacttacactacaaaattatttgttgtttgtttacagtttaaatttgagtgccttgtattttatctggcaactgtaattaaagggaaaaagaataaattcattatgttcatataatgtgatatagcaggggtccccaacccccaggctgcagagtggtactggtccatgggtccccaacccccaggctgcagagcggtattggtccatggcctgttaggaaccaggctgcccagcaggaagtgagcagcaggtgagctggcattcccacctgagcaccgcctcctgtcagatcagtggcagcattagattcccataggagtgcaaaccctattgtgaactgcacatgtgaggggtctaggttgtgcgctccttatgagaatctaatgcctgatgatctgaggtggaacagtctcgtcttgaaaccatcccctggccctgtggaaaaattgtctcccatgaaaccagtctctggtgccagaaaggttgggtagcactgtgatatagtattaaaagtgctaataaatatggcatactgcctttaaaatgtctggtagctctttctcagtggcactcataatagtgttttttgatttttaaatgtgtgtcaagctgactctcccctccgtgtatgctgggctttattttccctttcctagtcaccagttttgggaaatagagatcttcattctcatgctgctcctctagtgcaagtgctccatttatttttaaggaattaatataacaaaaaatcatgggaatttagaaaacaacatggaagctaatgatcacattggtggaagtgatagggaaatatttagggggagaagttaaggtataaactttgtcaatgaagtcctattaaaaacaacaaaaaagtgaagcttaggatgcattttataaactctgaccagaacacctgtgtttctctgtttctaggtttatgaactgacgttacatcatacacagcaccaagaccacaatgttgtgaccggagccctggagctgttgcagcagctcttcagaacgcctccacccgagcttctgcaaaccctgaccgcagtcgggggcattgggcagctcaccgctgctaaggaggagtctggtggccgaagccgtagtgggagtattgtggaacttataggcaagttattagcaaggtctactcttacaattaactttgcagtaatactagttacactctattgattatgggcctgccctgtgctaagcagtctgcattccatcttccttgccaaaacttataatacaaatttcatctttattttataaataggggagttgggctgggtgtggtggctcacgcctgtaatttcagcactttggaaggatcgcttcagcccaggagtttgagacaacctggccaagtgagaccctgtctctacaaaaaaaaaaaaaaaaaaaaaattagctgggcatggtggcacatgcctgtagtcccagctgctttggaggctgaggtggtaggattgcttaagcccaagaggttgaggctgcagtgaatcttgatggcagctgcactgagcctggtgacagagcaagatgctgtctcaaaataaatttaaaaataaaataagagaattaaagtttagcaggttgggtggcaaaatgaggccacacatttaaagcccctcctcctgattcttttctctgccttggctgcctcctgtggcattttaggtgctgagaaatgaaaacagtagggaaaatagttccaggatcctcatgttaatttgccagaaatggcatcttcaagtcgtcagagggatctgagagttccttcctggcctgacttgagaaaatccgtctgtccccagctctgcgtctgcctccactgcccagtcacctcctctccatgctcttggggctgggccctaccccaccatgcagtgctgccctggagcagtgagcttggtgggtcctgtctggcatgagagctgcctttgggagctggatcccagcctctaccactgggtctggtgcctagcaggctatggataaacttctgctgactccggcctctcctaagccactgcaacgtggtcggtgtagtgcacagtgtgtgtgcagcgtggccttactcacagcctccacattagagagaatctgactgaagtcttactgctgcctcgtgtgaacataaatgtttgccagaaccatgagcaggaaatgttaatctgccttgtttcctgtcctttacacggaagaatttttttctgtatggaatgcgtgccttacaaataatgagtggaaatacccatcgctaatgaaaagttatacttgactgttagtcagctaaataatctgagatttctaatacttttaatttggcttttacaatgcaatttatcttagcttttttgatttcttaggtcatatctttagaactatatatttgaatgttaatgtaattttcatattgaaattaaaatgttgaactgcgatgttaagtgtttcctgtggaaaaacgttcacattttctctagttttaaagttgaatcaagctgtttgaagattttcacatttcttctagattttatcagcttgttactttatctgtcactttctgtgatttgcagctggagggggttcctcatgcagccctgtcctttcaagaaaacaaaaaggtgattatttcagaaatcagagtcttgtgttgaatcttactgattttcttgtatttctgtaatgtaatgtatcttgtatttcttgtaatactgtattggactctgtgtatatctcttctcagatgagtgattatatgtgtgaatgttgctggaatctgataaccaggcctgaatagttttgtagggtggcttttaaaaattactttcatatcagaattgctttgtcataaattttgaacgcatcataaatttctaatgttcggggtcagcagactttttttgtaaagggacagagtgtaaacatcttagctttatgggccatatggtctcttttgcaacattcagctctgccctgtgacaggaatgcagttgtaaagacatgagctactggccagctatgttccagtagaactttacttacagaaacagacaggctgtagtttgccaatacctgccttagggaatgtgttgttatattttgtgagttaccttctcagtaaattttatttagtattagtcaggaatattattaagtagcttcttttccagcctggtcaacatagtgagacccggtctctaccaaaacaaaacaaaacaaaaaaacagccacgcatgtggcatgtgcctgtagcctcagctgctgctcagggggctgaggcaagaggattgtttgagcccaggagtttgaggtcacagtgagctgtagtcatgccactgcactccagcctaggcaacagaatgagaccttgtgtcttaaaaaaaaaaagtttcctttgttgggttattttaatttggacctggttatcatttttcagccatatttaactttgtacatatcagaatgttctgataaaacttaacttttattaaagtgtttgtgatataatctgctagttttggtacacattatcttttgcaatgccagttattttcttttccagtgtgggtttgcataggaaaagaattgctgtcactttctattttgaaatcttaaaagactgatccttttttgtgtcatgatttgagtatttaattgagagcctaatgcctaatattatttgcagtattaaatgggatcttaacaggaatagcattctagccttcattgaattaagtaaacatttcttaagagaacttggaatctataatatttgcgtcatcatagtatgagatacttaatcaagtttgagattttagtgaaacattgtttagaagccaaaaggattctaggaaaaattaatgtctatattcttgaattaggagagattttgggacgtgtgactaagttacgctgacacttgtttgtttcttagtcgctttttccagtggcggtgagaacgaagatgactgattcacattgctcagatgagtttatcctcttctggctgggacatgggatatatcctgtctcttttaagcctttttggtatttttcccccattgagagctgtgtcttcaaactcttctgttatagctggaaaatcctttttaagtgaaatctgcccaaattataagacagatgaaggtagagttgtgttggatataggattagggtgaaagtagtgggggtgtcctggagcctctcttctggtggcagcctagctcttgtgcctttgaggaaattaccctggggacggctctgtggaacatatttgcaaaccactgatttggaagatagagatggcttttgttaagatctgaattcacctttttggcattttatttgatttctcaaggtaaagaacttattttgtaataaagtttcctattatttagtagataggccaagttgctgtgttaattccatgtagattttgggtttcctttgctcattttttcactcttaatctcacatcattgtaagtttatggaagttatcatacttctgactttttctttgaagagcagaaattagaaattcccaataattattttgatagtgtcatttaatgacactcacatgtgatgtagccacaaagatttaatgagttcagttttaaatcatattaagactgttggtttcatttgttctcattaatgtaattctgaagatgaacaataaaatgtatttttagaactttcaaatgaaatattatttcatccttccagatcatataatgcttaagttctgattgttaatcataaagtctagaaaattaaaagataataaaatgaaagtgacttttaggtattagagttttattataaattctggtgtgtcattggagctatgacatgaatatttcaaaggccaatagcattggatctttacagttataacttaccatttttaagtttaagtagtaatatagattatttaataatcaaaatcaataaatattaattattaaaatgttttgtggtatagtttgagaatcattgcttttaactttttccatataggtttattgactttaatagcattctaaacataacatctctacattctttgtgtttaatactgtggaggtataaaaatacttatatatgatgataaactatattagagtaaattaaatattcttatgagtttcattttagagtgcatttacttaattttgaagtccttatttttagcaaactaaaaggaatgttggtacattatttactaggcaaagtgctcttaggagaagaagaagccttggaggatgactctgaatcgagatcggatgtcagcagctctgccttaacaggtagttctcactagttagccgctggtgtggaccttcactgtctgccttccaccccttgcccttcctgctcgtccccctgcacctggtggacagcacgactgggggcagcagtggagccaggttgcttaaatggggcatattcgggcttcttttataatacttactctgaagcttgtgtgtctgtggtgtttgcatcatatatttgttgttttccatggtttaggctgttttaaaattaggtttatggcttgagcatagggctttgtgagtaggggatggcaggtcgaaacatctcatgagttggatgggttatgctgggggttgggaaatgggatgaaaaattatgggatgaaaaattgcctatggatagtttaacttgaaagaatctgcctttgtttacagatagttatcttttttcttttttgagatagagtctcacactgtcacccagtgcagatacccagtgtcactggagtgcagtggtgtgctcttggtgcactgcagcctccgccttctgggttccagcgattctcctgcctcagcctcccaagtagctgggactacaggtgcccgccaccacgcttggctaatttttgtatttttttgtggagacgggtttttgccatgttggtcaggctggtcttgaactcctgacctcaagtgatctgcctgcctcagcctcccacagtgccgggattacaggagtgagccactgtgcccggccagttacagatacttatctaatgaaattctctgtgtactttataaaagatgaggattaactgaaggtactaataactggattatatgagggtggttttggttgtataatcctatctaaaagaatattttagctataactgaaagtaagacttaaatatttagagaggaaaatctgaataattctagtagtaattatttatttacaaaataaaaatagatttttttttgattacacaaattaaacaacaataaaacatcacagcaatccggatactataaagctcacatgcttaccgacccaactgccccaggagtgaccactgccaacagcttcatgtcgacctttttgccataatttttatatagccttttttgtttttaaatggtaatttagaaagtcaactaggaaaatgtgttacaggtttatcttccaggagaataggactggagtcgagatcttgaatgtggcttggaagaaggcaagcccaccccagagagatgagttgacagttgtttctgaccactgcttgcttagagggcctgcgtgtctgtgaccgcctagctttgcgcccctgactaggctgccccttaattacaaatgtctttatatattgctccagctaaggcttggagtagtcggttaagaacttgaacttcggtttttgcagtgaaacagcatttgagaatatcaccttctgataagccttattttataaggtgggtactgtagtgggaggcagtgtgagagatgcttgaaggatgcactgctgtcctgcatttcagcatcttcaggatgctgtgcagctgaaacatttgataacggtggaactgttcgttattttgcaagcctgtgattccctattgaatgttttctctcgccatttgacaaatgagtgtttctctgtcttcagcctcagtgaaggatgagatcagtggagagctggctgcttcttcaggggtttccactccagggtcagcaggtcatgacatcatcacagaacagccacggtcacagcacacactgcaggcggactcagtggatctggccagctgtgacttgacaagctctgccactgatggggatgaggaggatatcttgagccacagctccagccaggtcagcgccgtcccatctgaccctgccatggacctgaatgatgggacccaggcctcgtcgcccatcagcgacagctcccagaccaccaccgaagggcctgattcagctgttaccccttcagacagttctgaaattgtaagtgggcagaggggcctgacatctttttttttattttttatttgagacagagtctcactccatagtgcagtggaggccgggcacaggggctcatgcctgtaatcccagcactttgggagactgaggcaggcggatcacttgaggtcaggagttcgagaccagcctggccaacatggtgaaaccctgtctctactaaaaatacaaaaattagttgggcgtggtggcacatgtctgtagtcccagctgttagggaggctgaggcaggagaattgcttgagcctgggaggcagaggttgcaatgagccgagatcgtgacactgcactccagcccgggcaacagagcaagactccatttcaaaaaaaataaaaaaataaagtgcagtggctcgttctcagcccactgcaacttctgcctcccaggctcgagcgattctcccgcctcagcctcctgagtaggtgggattacaggtgggcaccaccacactcagctaatgtttgtattttcagtagagacagggtttcaccatgttggccaggctggtctcaaactcctgaccttagatgatccacccaccttggcctcctaaagtattgggattatagttgtgagccaccatgcccggccctgccacctgccatcttttgagttcttccctggagacctagacctgaaccctcctgcttgttctcttgttatctaatacccctattgacagcgcagcttagatcattaatggagagcttgacctcatctgataccttcactgaaggaaacaacttagtgtcttttgtgttgaacactgaggtaaaaaattggaatagttgattatatgaactctgctaaaattgagtgcattttacattttttaaggccttgttgggccctggttaaataattatttttaaaaatccttaaggagcctattataaacagatctgtggtcttaatgaaatgtgattaatactgtgcattattttaagaacttttgacttttcaaaaaacttttacaacatttcccatttgatagcggcataggtttaagcacttctcatctctaagttagtggacaaaaaaccctcatggatagtctaataatgtttgctacaagtccatgttgagttttatactccattttattttcagttttaaaaactgtggttaaatatgtgtaacataaaatttatgttcttaaccattttttgcgtatacagttcgctggtattaaatacatttaaataatgtcatggaatcattgctaccacccatctctgtaaccttttgatcatgtaacactgaagctctgttcccattgaactctattcctcctttcccgccaagtccctggcaaccacgattcttctttctgtcttctgaatttgactactttgggttctcatatactttaggagtcacacagtatttgttttacttagcataatgtccccaaagctcatgcatgttgtagcctatgttagaacttcctaatgtttcaggccaaatactattccattgtatggataggccacattttgcttttccattcctctgtccatggacacttgtattgcttcatgttttagccattgtgaatcatgctgttatgaacgtgggtgtacagatagctcctggagactctgctttccatttttttggctaaatacccagaaatggagttgcttttacattccaattttaatttaaaacattcatatcattgagtgttttacttaatagtatagtagttaacaaacttaataaaatagtattttggtaataatttgctggtagtccattgttcagtttttttaggtaaattacacaggacatttcaagtggacatgaaacatcttgtgatgtggaatcatgccccaagctgatggctaaacatatgaaataccataccctaaatttagtagatttagtctttgcaatttaggagataacctgttatattgttaggtttttgtcgaaaagctttgtcctcatatttccaacttgctgtaaaatttgtttgtgaagacaaatatttttgtatgggttttttctttttcatattaaaaagaaatgtccacattggaatttttttggagtttttagagctaatagagcttttcataatgtagtgggaatgagtgatcagtaagctcttagcagtttccatgcgtgcatttctgtgccttgaaataaatgacagatgagtacatttgtgttctgtgtgtaaaatgtgctctttcctcattgcacttccatgttggagggcttgtctcttggtgatcacacttcaaaattctcacagccccccttgaaccgtttaggtgttagacggtaccgacaaccagtatttgggcctgcagattggacagccccaggatgaagatgaggaagccacaggtattcttcctgatgaagcctcggaggccttcaggaactcttccatgggtatgtggactacaggtgatgcgctacaaagtggtttgtattcagacctggacatcttaattatatctttgcttccaagaagaagtcctttgatactgttttctgagttctgaatagctgatgaaaatgaccaattgaggaataatcatactttttcttgatctaaatcttatacttttgagttatcttagcataaatgtataattgtattttaagtggaaatttgtcacttaatcttgatttctctgtttttaaagcccttcaacaggcacatttattgaaaaacatgagtcactgcaggcagccttctgacagcagtgttgataaatttgtgttgagagatgaagctactgaaccgggtgatcaagaaaacaaggtgagggacataggcttgagacgacttggtgtttctgagcttgtgtgaggatttaaaatcgccctggctactgtctactttattgctttcccatccctgggcctttaaatttcccctttaaataccagctcttcccaggcctgttgttttctgcctttccaggtactacccacagccttgagaattgcctgagttctgcctcctttgagagtgtgccccagacaaatctattctgtactgaatgtttccttgtctgatttcttggatcattcatttgatggttgcgtatggcctgcaacgtttcttgttttggttctactgaactgttctaaaagtctctcttcatattatctttttacatgtaaatgtaactgtcttcacttttaattcctcaaggacaaggaatagcgtttcacagttcgtcccatcaatcagaattatagcctttggcatctccctatctaccaggcccacttcctcttagatttgggcttccccaggctgttgcctttccccaagtagcttctgcttgtcctgtagaagacctttcatgctttgcttctgcagcagccgttcctgaatgcctagtgtcaactgccttcttaccacgcccaccctccctgcatgctgcatttatcccctgccacagccctgtgaccctgtgtcctgctgcctctgacttgtctgtttctgcttggccatggtctctgtgaggtcaggtgtgcatatgggcacaaaccagggcatctctttatccccagcacctggcttaagtgctgctctggaactatctgttgaatgaactaatgcatgaatgtattgttgagtatgagacaaacaagtgtcattgtctcctttctagccttgccgcatcaaaggtgacattggacagtccactgatgatgactctgcacctcttgtccattgtgtccgccttttatctgcttcgtttttgctaacagggggaaaaaatggtgagtacaaaaggggatgtgcacagttgaaggaaataactaggtttcagaggtcagcttggtggcctgtttttgccttgcgtgcagcagaggaagtagaatctgaggatgagtttggttttcactagccgaggggagggaggaaatgatgggagcaggtaggttattgggtctggttttgttcatttgaaaacaatctgttgtttgaggctgaaggtggcttgggtgatttcttggcagtgctggttccggacagggatgtgagggtcagcgtgaaggccctggccctcagctgtgtgggagcagctgtggccctccacccggaatctttcttcagcaaactctataaagttcctcttgacaccacggaataccctggtatgttaaaagttcacatcttattttctcagatttaatcattattgtaaaaactatttcagtattgactattttagttttagagcagtaagtgttttgagttcatttgggatatttgacctgcgttgtagctcttcagaaaacacatgaatagtgaagttctttgtttcatgggttccctttagatgaaacccatagaggagaaaagtagaaacctcagcacgtaagagccaacatatatacacatcggatttaaacctaaagcacaaattgtgcctggtcgcagtggcgctgagtcgcactcagccaggccaggcattcacactcagggtgagtgggaaccaggactggctgaggcagcagtggacccaagtctccatcgcgcccatgcttactatggagccttctcgttctctctttttctttgggtgagagggtacacttgtgtttttgaatttatatgaggtaagtgtgtaatagggttttttctaatcttttttaagtggaatctggaattttaatcagatttattatctgacaacctagaattataatccagaaagtctgtggtattgaggacatattggcaatatgatgaatctctaattcttaaatcctgaaacttttttttttttaatcacttagggttattatagtgaagtcatttctgaatttggatcttctcttcacacctctttttctctttcctgagaattaagcttttgtttcgagttagaaagttgatagtagggaattgttccatggctgagcaatttatctccacagaggaacagtatgtctcagacatcttgaactacatcgatcatggagacccacaggttcgaggagccactgccattctctgtgggaccctcatctgctccatcctcagcaggtcccgcttccacgtgggagattggatgggcaccattagaaccctcacaggtaacggccagtttttcagctgtgttttttctagttatgcttactaaggtttaagtttagatgatgatgtttgttgcttgttcttctggttaggaaatacattttctttggcggattgcattcctttgctgcggaaaacactgaaggatgagtcttctgttacttgcaagttagcttgtacagctgtgagggtgagcataatcttctgtggaaccatttcttcacttagtggacattttatcattgctacaattaaaattggagcttaataggaaatatttccatgcactctaaagctgtaaccagtaatacccaccatgtatccatctctcagctttagaaagaaaacgttgccagtaaagttaatgcttcataaacttcagtttaagttctaattctcagaatatttgtttgaaatagacctcttcctaaaggatatatttagaaataacctatcattaagtgtaaagtctgttgaatatgctgggcacggtgactcacacctgtaatctgaccactttgggaggccaaggtggaaggattgcttgagcccaggagttcaagactatgggcaacatagttgaccctgtccctacagaaaattaaaaaaaaaaaaaaaaaaagtagctgggtatggtggtgcatacctgtagtctcagctactcgggaagctgaggtggaggggggattgcttgagccccagagatcaaggctgcagtaaggcgtggttacaccactgccctctagcctgggcaacagagtgagactgtctcaaaaataatagtaataataatcagttgaattaaaaaaaaaaaaaaaaaaaccactgtgctaggcccatagtatggtaagagttaaagtgagccttagggattatttactcaacctctgtttctgtataaagtggaataggctcaattctttaagtgatagcatgttgaacctttccataccaactggctcataagtcacaactggccagtcaacaagagtaaaaattaactggtaaaaatcaaagcaaaaaacctacaattgtcaaatttgtgggataactcccccttttaaaatgtcatgcctgacagtaatttctctctagtttccaggttttcagtcagttgtgtcttttttgagcagaaggaagcatgctaagagctcaatcttgtggctagctgggggtctttgtgtcagccatgcatgtgatggtgcccctgggtgcttggggctgcaggggaggggtacagcagtaggggcctgttctgttctctcgtgctgtggagtacatagtgacatagtggggtggtccttggtgtaggtcccttgttcctacccctgggtctgagatttatttagaagtggtgttggggctgtgcggcaggcccctctgtaactgatcaatgtttgtgaagttgctgtttgagagttgaaaccatgacataagcagaaatggaaggaagaaagaaccagttatgtgaaagggacacatttacttttaagcttgtatttactgagataaagtattcttaatcaatgttcttgagaggtgtgggaaaaatgcaacatcctggttgcagttaaacccagaacattgtgtgttgaagagtgacggttctcaaaccgtcaagacgcgggtactgagtgggactaacctgctgtcctcttgccttggaccttgtgttccagaactgtgtcatgagtctctgcagcagcagctacagtgagttaggactgcagctgatcatcgatgtgctgactctgaggaacagttcctattggctggtgaggacagagcttctggaaacccttgcagagattgacttcaggtaagtgagtcacatccattagatttcatgaactaagctcaattgaaagttctgggatcacttgatgcaaggaatgatgttatcaagtaccctgtccatcagaaatccgagtggtttaggtagatgacagtgattttctcctcccagtggctttttgctgaactttgccctatgcttggaattttattttattttattatttatttagagacaagatcttgctctgtcgcccaggcttgaatgcagtagcacaatcatagctcactgaagctttgaactctaggactcaagtggtcctcctgcctcagcctcccgattagctaggagaataggtgtgtgccgtcacactggctaatattttttgtagaaatggggtcttgctatgttgcccaggctggtctcaaactcctgggcttgattgatcctccatcttggcctcccaaagtgctgggattacaggcatgagccactgtgcctggcctagaattttaaaatataagtagaagagtagatttttttttttggtagtcctcgtcatttaagtattctggatagtgggaataaaagagcttagaatttttcatctttgtcttaaacttttaaaaaaatgtagcttatattaattctgcttgtttaaaaagaatatactcttcattatactgaacctaggtaagacagctggtttatattttgttgcaattaaaaaacgtgagctgtggttgcagtgagccaagattgtggccattgcacttcagcctggcaacagagtgagacttggcctcaaaaaaaaaaaaataacatgagctgtgttggcactttcattttctaagagtagttttggctggagaagttttctttcagtactttcttttagaagggaaattttcctttataatttagggtttgttttttttttttccaagccaccttttatagagcccttgtgggttatttcatttaatccttagaatgtttataaatctgggcttgttctcggctccacccacagatagggacgctgagcgtgcatgagtgggcagcaagatagcaggttatggagggcccagctcaccccttctgtggcttgagccaattttatagggcacttacagagtcttttgaaatagtatttattttgaagaaaaagaaaaacagtttactgagtactgtcttattgagtctggaattgtgagaggaatgccacctctatttatttaaagccattggccttttttgttgttttgagtaagtgctgcccaaggtccttccagggcacctggatgagcctgctctggagcaagctggcggtaagtgtttactgagtaactaaatgatttcattgttaaatgtgctcttttgttaggctggtgagctttttggaggcaaaagcagaaaacttacacagaggggctcatcattatacaggggtaagcggtttatttttgtgagatgctgttttaccttcaagaaggtgaaagtgaggctttccttgtggaatttctctaaatgcattcgtcatgttttagatgtttatttcacagtttatatcatgaaagttataatcttgtcatatggatttaagtctagtaatgttgagttctttctcactagctttccaaaatatcttacctaaaatttagtcaaatacaagattatgtttatttttattatccttctctctaaagcttttaaaactgcaagaacgagtgctcaataatgttgtcatccatttgcttggagatgaagaccccagggtgcgacatgttgccgcagcatcactaattaggtatttaccaatattttatctcttttccttttttggttgaagtactaaaagatacgagaatggaaagagagggaagaattcaaaggatgtagagcagtattcctgaatctgagctcatttcagccattctattcttaaactataatgaaaaaaaaatccaaaaaagtctaaaattataattaaaaaaacaacaaaatactaactgtccattgtaaaaagtaatgcactttcattgtaaaaattttggactatagagaatagtactaagaagaaaaaaaaaatcaccttcaattctgctgccacctggaggtaatcactgttaatattttgctatatactctatgagtttcttgttcaaaatcaggtcaaaattacatgcaattttgtaatctgacaatttccacttaatattttattagcattttcctgttatgaaacagtaattttagttatgggtcgttgttttgctatgcggttgggataaaattttatatactttttttggcaattacttattatacataaatgtttgtgtatagttttctttttctgagaattcctggaagttgagttaccaggcccggctttgaatttttttttttattttttttttgagacagagtcctgctctattgtccaggtgctatctcggctcactgcaacctctgtctccctggttcaagcgattctcctgcctcagcctcccgagtagctgggattacaggggcacaccaccacgcccaattaatttttgtatttttagtagagacagggtttcacgatattggccaggctggtctcgaacttctgaccccgtgatccacctgcattggcctcccaaagtgctgggattacaggcgtgagccatggcgcctggccaggctttaaatttaaaacaaatcttctaatagctttatggaggttataatttacatttcttgaaatgtactcactttgagtgtatagtaaactccaattttatcacatttctgtcaccccaaatgtatccttgtgcccatttgctgtaacctccggttcctgccccaactcctaggcagccactcatctattttctgtcccttaagatttgtgttttcgccaggcgctcatgcctgtaatcccagcactttgggaggccgaggttggtggatcacttgaggtcaggagttcgagaccagcctggccaacatggtgaaaccttgtctctactaaaaatacaaaaattagtcggatgtggtggcacacgcctgtaatcccagctactcgggaggctgaggcaggagaatcacttgaacctgggaggcggaggttgcagtgagcagagatcgcgccactgccttccaacctgggcaacagagagagactgtctcaaaacaaacaaagatttgtattttctggacattttatagtactggggtcatagtatagatggacttttgcatttggcttcttttacttaattgtgagattggttcttgttgtagcatgtatcagtagtttgttcatttttattggcgaaagtattctattatatgaataataccatattttatctatccatcagatggatattatagagttcatgttttggctaatttatgaattatggtactgtgaacatttgcctgcaagattttgtgtagacatgtcttcatttctcttgagtagatcacctagaagtggatttttaaataattttggtacttactgtgaaactgctcttcaaaaacataccattgttccttccttccttccttccttccttccttccttctttccttcctcccttcctccctcccttccctacttccctctccctttccctttcccttccccttttcccttccccttcccgcctgcctgcctgcctgccttccttccttccttccttcgtttctttctacatatacacatttttttaaatttcaatggtttttggggtacaagtggtttttggttacatggctgaattttggttacatggtgaagtctgagattttagtacacctgtcacccgagtagtgtaccttgtacccaatatgtagttttttgtccctcaccttccagccttccgccttgtgagtctccaatgtccattataccacactgtatgcccttgcgtacccacagctcagctcccacttctgagaacatatagcagaaacatgccaaagtatactcccactaccagaatgtgattgtgcctgattcttctcaccagtacaaatatttcaaaaaaagttaaatatgtatcagttttttgggcagaagttgatacttctctttatttatttattttttttgagatagggtctcattctatgatgcccaggctggagtgtggtggtgcgatctcggctcactgcagtctctgcctcccaggttcaagtgattcccacgtcagcctcccaggaagctggaattacaggcgagggccaccactgccagctaatttttgtattttttggtagagatggggtttcaccatgttggccagactggtctcaagctcctgacctcaagtgatccacctgccttggccttccaaagtgctgggattacaggcgtgagctaccacacccggctgatatttctttttaaaataacttaccttcttttgaaagtaatacatgtttaatgaacagaatttaaggaaaatataaaaaaacgaaataatctttgtaatcaaactactgaaaagaaaaccaaagttacattttggtgcatattctttttcattttcatcattgtaatttgcatttctttgattacttgtgagacactcctttcatttacttaataggtttatatgacttgcctattcagagattttgcagctttaccattttctgcaaatgatagcaacttctttttgtttgtttgtttgtggagacagagtctcgctctgtcactcaggcaggaatgcagtggtggaatcttggctcattgcaactattgcctcctgggttcaagcgattttcctgcctcagcctcccaagtagctgggattacaggagtgtgccaccatgcccggctaatttttgtatctttagtagagatggggttttgccatgttggccgggctgatcttgaactcctggcctcaagcggtccccctgtctcggcctcccaaagtgctgggattacaggcgtgagccaccgtacccagccagtagttacttcttatattctagaaaaaattctactcatgatcaagtctccatgaggaaagagactttaattgaagatcatggggcttgcagaccaatatgataaaatagttcattgtttctaaaagtattactgagtgttgatggcagatatgaacccttttgtttttgtaggaaaatgttacccgtattctccatttgaattcagtttagatttgttaggaatcgcagcttaagctttgccatctgggagtgtttgggacagttttgcagacaaaattgcaaaagtgcctaaggaatgcagctggcattcagacctgctctgtgctcagtactctgtggacagacactgttcagcacttgttgatcagaaggtttagaaagagaactttcaaagttggtttttaattaaagcatttaatagtgtaaatagaaagggattaaattttatgacagacaaaagaaagtacagcacccagctgggcgtgggggctcacgcctgtaatccagcactatggggggctgaggtgggtggatcacgaggtcaggagttcaagagttcaagaacagcctggccaaggtgatgaaaccctgtctctactaaaactacaaaaattagccgggcgcggtggcaggcgcctgtaatcccagctactcaggaggctgaggcaggagaatcacttgaacctggacggcagaggttgcagtgagccaagattgcaccattgtactccggcctgggccacagagtgacattctgtctcaaaaaaaaaaaaaaaagaaaaaaagaaagtacagcacccagttatgtccgagtgggtgcatgagagtgaccctgagattggagacaacgctgtcacgtgcttgaagaacgccacctgagaaagggggcgagaagtggtgtccgctggtaaccagaggtgttggcttagccatctgcagggaggagggtggtctatcacaggtgagtttcatctactttcttaagcaaattaaccttacttttgtgttaggcttgtcccaaagctgttttataaatgtgaccaaggacaagctgatccagtagtggccgtggcaagagatcaaagcagtgtttacctgaaacttctcatgcatgagacgcagcctccatctcatttctccgtcagcacaataaccaggtatgctgacccagtggcatcttcacattgtcgggaaaatgccctttcctgatgcctttctttaggctttaattgaaaacattttattttctagaaaaaagcttcagctcaggatgtttgagtgtaggtcagtcctttgataggatattatcattttgaggattgaccacaccacctctgtatttaagctctgccacaatcactcagctgtgacactgtaaatctcttaatagtttattacattccatgtgctgacagttgtatttttgtttgtgacacttacgtattatctgttaaaacattttcactttagttgtgttacctttaaagaggattgtattctatcatgcctgttgattttttggtgagcgggctattaaagtcagtgttatttagggttatccactagttcagtgatttgcgagattatcattcacatttattgtggagcttttgaatatcgtgtcaaatggccacatatatcccattcttatctgcttcttaggtgagtgggacacagtgctttaatgaagctataatcttcagaattctagcttgcagagaagattgcagaagtgataagacttgtgctttttaattttgtcttttaaatgttattttaaaaattggctttatatgatactctttttttctgctgagtaacagtgttttacaaaacttggactaaatgacttctaagcttaaatgatcacttgatgctttttttctgaattaggaactcagcttatcaaatatcaaagtcataattcctgaataaataacgtcttttttcatgtaaagactgctttaaaaaacacatggaaggctgggtgcggtggctcacgcctgtaatcctaacactttgggaggcccaggtgggcaggtcgcttgagctcaggggttcaagaccacccagggcaacatggcaaaacccacctctactcaaatacaaaaaattagccaggcgtggtggcgggcccctgtaatcccagctactcgggaggctgagggatgagaatcacttgagccccggaggcagaggttgcagtgagccaagattgtgccattgcactcccagcttgggctacagagtgagactctgtctcaaaaaaagacacacacacaaacaaaaaaaacatggagacatttttttggccaccttaatatttcccctcagataatttcctttgtttaaactcagaactggcattttctctcttggagaagattcaggacaaatactcctttaagataagtagaagcagtgaaagaggatttgattatcaggaatttgataagcttagaataaattgttgcttcttaatgtcatttcagaagatgaatatttattaatagatgccaactgagatatcattaaaattgattactaactactacttggaaaagtctcccagttccaaacttcagcaggcctcttgacaattcagctgtggtcaattgggtcttgcgtgatagatacaatgaccaattgtgcagcagagtgtgctgcttagctgcctattctgttagcattcatgtgttaacttaaaatcataatctccttagttttgttgagtgtctccgtggacaagacactgtgagggatacaaaatcagattggctttattcaaaccactggggtattataattcatttataatttattttattttttgccttttttccatgtgttctaaaggaattagagtttgtatataactataatgggggatagaaattgacatgtgccatgaagggaatgcaaaaaagtgccgtgggagatgagaagtggagaaaggaatttcttttttcttggaagcaggaataacttcatgaagcatgtatttcaacttaaacagatagtaggcaacgctgtaaggggagtatggctgcagcaaaagtgttcggggcagactgggaggaagggagggaataaattcagccattgttatggaataatgatcaaaatttattttcagcccgtttcacttaaaagttgagactgcttaactttttttaatctttaatcttaaacttttaaatgccatttgatctttaaaaatatatgttttaatagtgtattttaagtctctatatttttgttattagaatatatagaggctataacctactaccaagcataacagacgtcactatggaaaataacctttcaagagttattgcagcagtttctcatgaactaatcacatcaaccaccagagcactcacagtaagtctctttcttgatcggtcttactgacattgtaatagtttttggtagcttgtatggccagttagttgtatggtcatcttacggtgaggtgcttgtcttacagctcttacttatccatgaggcttgctaagaaattgtgcttctgtgaaaagaatctcagcttactccaggaatgtaaatgactatgttttttctgattattaaagtaatacacgcccaaaataaaaaaattcagccaatttaggaagacacaacaattaaaataagccaggcatggtggctcatgcctgtaatcccagcactttgggaggccaaggttgggggctcacttgaggtcaggagtcggataccagcctggccaacgtggtgaaaccccatctctactaaaaatacaaaaattagctgggcgtggtggcgggcgcctgtaatcccagctactcaggaggctgaggcaggagaatcgcttgaacctgggaggtagaggttgcagtgagctgaggtcaagccactgcactccagcctgtgcaatagagcgagactctgtctcaaaaaaaaaaaaaaaaaaagaaaagaaaaaagtaaactactgtcacctgcattggtaatgtatcagaagtttaaaatgtctagattataattaactcagtgacctggtaatatatactaagggaaaaatatttataatttacatttttacatttttatttttttaattttattattttttttttgagacagagttttgctcttgttgcccaggctggagtgcaatggcatgatctcagctcaccacaacctccacctcccgggttcaagcaattctcctgcctcagcctcctgagtagctgggattacaggcatgcaccaccatgcccggctaattttgtatttttagtagagacagggtttctccatgttggtcaggctggtctcaaactcccaacctcaggtgatccgccctcctcgaccccccaaagtgctgggattacaggtgtgagccaccatgcctggccttacatttttataataagaatttatgttgctgacattagaaaagaaccataatatccaagaatccaagaataattaaattatgtacatatgctagtatatagtgtgatgctttggagaatttttaacaatatggagatgtataatctggattgtaatattgagtgaaaaaaggcagaatacaaacctggtgggggtatagtcggatttcagttaagaaaaataatatttacatatatacatttctcacactggcagataatcaccaagataaattttgggattgtggatgatttttttcttctttatatttttcagatattctcaaattttctaaaatgagcaagtataacttttgttatcagaaaaaaataatatacaaaagtaatgttaatttgctggtgaccaggttaaacctttttatttttattttttgagatggaatctcactctgttgcccaggctagagcacagtggcatgatcttggctcactgcagcctccgcttcctgggttcaaatgattctctggccccagcctcctgagtggctggaattacaggcgtgtggcaccacacctggctaatttttgtatttttagtagaggtagggtttcaccaggttggtcaggctggtctcgaactcctgacctcgtgatccacccacctcggcctcccaaagtgctgggattacaggcgtgagctactgcgcccagccagacctttttattttatttgacaaaagaaatacttccatgttatagaagactaaatattgtttgggctgtctgcagtatggtcttcccttgatttgttcaaaatatcgtaaactttgcttatttatttttattgtggccgactgtgtcgggcactgttgtaggcttgggatggaaaaacaggattcctgcccttagggtttctgcaggctggtcagggagacgatgtggtaagctggagctcagctcctaaggatgtgcaggggcagttgagaggcggaagggtgggagatcattccagggtgtgggcagcacaggaacctctcttcattgggatataattgccattctgataacacgtgtttgaggtgtctaaagtaggaagttgtaccatggtgggacagatatcctgtggttatcatacacagatctcagttttcttctcattgtttgtactttttataaagggtaacaggagatataattcaataaacctttgtggtgtttgggtgtgattttattgtttctttcttctcagtttggatgctgtgaagctttgtgtcttctttccactgccttcccagtttgcatttggagtttaggttggcactgtgggtatgtattttcctcagtatatattaatagttgtctacaacagtatgacataaacatagttattaggatgccctttttctttctttttaagtcttttatcaatttggctttttggaaaaatatctgatggaatacttgtttctgctatattagctgtgtgagactagtgacaggagctgtgggaaatgaatgccaaatgttcttaggcattgatgggaatttcagggtgtggtcttcaagttcatttaagggaattttcatatgctggcaaaaggcttttctcattagcttgactctttccaaaattatttgctgtgaattagaagtttaggaaccttttttcacttaattgtgacctagcatacgaaatggtgatgatttaggaactactgttcttgtattaacagcttttatttaaaaatgattttcctccagtagatggccctactagcatctgggaaataatttcaagtcttctccagcattcaggaataggctttcattttgtgtatcaattactgagaatgattttggtgactcacatcacatttgagaagtaaacctgcagatttcttgtgtgtgtcagcaaatgaccaactgatatttgcttgaagtggattacattatctgctctagaatgattgctttcccaccttcctcacatacagactgagcagctacggtttctaatcataggtctggcactagacttcacttctgggcaactttggcattggagtaaaatgtattaatttaaagaaagttaaaaatccgttcaagtaaacatacagttctaatactttttacaatttaaaatatagatttaaatgataaaataaaaaagaaaatatgggtagacaccataatcctcgtttctgcatctgttcacaaggggttgatatttatgagttctattctccatatccattctatgttctcttaatgctcagtcagcacctcaggtggttggagttcaatgcttggtagtttgacttacactgtcttttctaggggattgagccctgggtagtcctgcttatttgaggttgcaatttgtctttcaataacttttactacaagatatggcgtgttaaaggataccattggggaaccaacataataatatcaggaaaactaaccacgtcagacctgccccattgtgtatcaagtacactatttttccatagtaataaagagttcaccccagccaattctcttttattttgtgcctgtttactcaatggcattaacatgcccaaatgtctgggtagctgtctcatctccagttcagcagaaccattgtcatatgccctagtaaaagcattccttcattggacacttaggccccaatactttcattcagatctactacctgatttcatttctcaaatgatttttatggagctctgatttataggaaagatgttagttgattaaaaataaaacaatttctgagctggtataaaatgtattgtgacatgccttcctcttggaattgcaagagaaaggaagactgttgtttgcttaaaaattgtctataatttgactttgcaaatgtctgcttccagagtgcctccactgagtgcctcagatgagtctaggaagagctgtaccgttgggatggccacaatgattctgaccctgctctcgtcagcttggttcccattggatctctcagcccatcaagatgctttgattttggccggaaacttgcttgcaggtactggtactgagttgaaacagggactccaggacttggattttgatttccttagggggaatgggggtggtgagcatatgaggggaaaatactataaggtcattgccagtgatggcttgtccctttagtcaaatttcagatgttacctatatgcataaacacatgcagttggcagctgttctgtgctgagtattttaaagtagcctcttcccaatatagcccctcagttaactacaagtaaactcattttgaatttcattttaatgggcaccatatgccagtactccctcgggcactgggatgttaagaaagtataatgtatggacttcattctcaagttagttttagattagagggggatacacgtaaacaaaagtgcagtggtcacacagagtggccctaatcactctccttgggcagatttatgggctggtaggaaagagcacaacacggagagggtgtagcaccttggcgatgataatggaggatgtggccagcaaggaagacggagtccattgaaattgattttgggagaagttgccaatctccatgaaagaattggggcctgtgctatttgcttcagggggctataggagagtttcgtgaaagggactaaaagatgagtattttaataagatcattcatccaacttgaacatgggctggaggagaaggtagggagactcaggagattaatgttgatgctaaggcaagataatggctttgggactgtagggaagacactgattgtaagagaatgaaggaggcagaattgccaggcctggttcaccaactgaacttcggttgtgaagacaaagaaacctgggatgacttcacatcctgggcaggtgtgtggtggtgacagtcatggaaattgggaacacagatttgtgcgggaaacatcagtttcagtttgagtttggcttatcagttgaatatcaggcacagatgtctggccaactctcaacatagggtcttaaatgacttcagttccccaagcaatttgtccttcccatgctattggggtggagaggtaatgtctgtgcccatatcacagccagtgctcccaaatctctgagaagttcatgggcctctgaagaagaagccaacccagcagccaccaagcaagaggaggtctggccagccctgggggaccgggccctggtgcccatggtggagcagctcttctctcacctgctgaaggtgattaacatttgtgcccacgtcctggatgacgtggctcctggacccgcaataaaggtaatgtcccacttgggtgctggattcatacagccttaatgactatgggtttccagactacctttgtttagtaatctgtcccttctttattctctttttgctttaaatgaacaaaattgctcagattgtgacactaaatttaacatcaaaatgtgaccatgtggatgggtgcagtggctcgtgcctgttattccagcactttgggagactgaggcaagtggatcacttgaggccaagagttcgagaccagcctgggcaacatcacgaaaccccctctctactaaaaatacaaaaaattagatgggttgggccgggcgtggtggctcaagcctgtaatcccagcactttgggaggccgaggtgggcggatcacgaggtcaagagatcaagaccatcctggctaacacagtgaaaccccgtctctactaaaaatacaaaaaaattatctgagcatggtggcgggcgcctgtagtcccagctgctcgggaggctgaggcaggagaatggcgtgaatccgggaggcggagcttgcagtgagccgagatcgtgccactgcactccagcctgggtgacagagcgagactccgtctcaaaaaaaaaattagatgggcatggtggtgcgtgcctgtaatcccagctacttgggaggctgaggcaagagagttgcttgaacctgggaggcggagtttgcagtaagccttgattgtgccgctgcactccagcctgggtgacagagtcagactctttccaaaagaagaaaaaaatgtgaccatgtgttttatagctcttttagtatcatcagtcactgttatccctaagagggaaatacctagctttagttttaggtttccagcattagccaagaaagctcagaattgatgttcctggccaagtacctcattgctgtctccttaaatcttggttaatggctactgtcctggctagcatagttatggagcatttccatggttgtagaatgttctgccaatctcagggacagttttgcttttctgtgaagcaataaaatcaacttcaaaacaaatgttaactatttgtacaatggatttaagatagaccagttcacatacttttttttttttttttttttgagatggagtttcattcttgttgcctgggctggagtgcaatggtgtgatctcagctcactgcaacttctgcctcctgggttcaaacgattcttctgcctcagcctctcgaggcagattacagctgggattacaggcatgcaccaccacacccagctaatttttttgtagttttagtagagacggggtttcaccatgttggtcaggttggtctcaaactcctgacctgaagtgatctatccgcttcggcctcccaaagtgttgggattacgggcatgagccaccacgcccagcctaagatagaccagttcacttactgtttatatctgattactctctctttgccttgtcttctacctttaaaaatctccctactaacttcccattctcctttagctgccatcagtcttctcccttctctgcaaacatctctggagagtcccagcctcagcccacagagcttcccactgctctgaggtggaccttgtttgcaaggcttctttggctctcttggcctggaccctgtctactacttcagccatccttccttaacccctgctggtggtttctgttgccacactccatagcagcgtttcccgcccagatcatgtctttacatctctgggcactgctctggtcctgcctgcctttccctctttgtatcctgcaggctgctacccccatcttgagtgtcctcttcagttggctttcagagggcctcctgggtgttcccttacccacttgccactccccagtcactgggttcagtccttcctgcccaccagcacatgctttctaggctctgtcctaggccgtcttctctctttgtagtctctgggccagtgctgttctagagagtggcagaattttctataaccatggcagtgctccatagctatgccaggcaagacagtagccactaaacacatatagctgttgagcccttgaaatgcagctagtgtgactgaagaactgaaccccgattcggtttaattttcattaaatttaaatttaaataaccttatgtgggtagtggctccagtattgggcagggcagcctgagagtcggggctgttctcctgtcttcagtgtctagatgagggacctcagaggacctgtctctggagctgcagttcaatgtagccagctgccccgtgacacttacatatagctgatttgtggatatgtcagacacggtgtgatgagctcagctttctgtcctcctccccacatctgcccctgccccatttaccccactttgtgtcttatcaagctagaaacaggtcaccacaagtcttcatttccactcaccaagtcttttgtttcccctactaaatattttgcgagaagaaagtgtgtacctttgtattcacatacatgtacatgcacatatacatgcacatatgcaggggtccccaacctctgttaaaaaccggactgcaggccgtgcgtggtggctcacgcctgtaattccagaactttgggaggccgagaccagtgcatcacaaggtcaggagatcgagaccattccggctcacacggtgaaaccccgtctctactaaaaatacaaaaaaaaattagccgggtgtggtggcgggcgcccatagtcccagctacctgggaggctgatgcaggagaacggcgtgaacctgggaggcggagcttgcagtgagccgagattgtgccattgcactccagcctgggcgacagagcgagactctgtctcaaaaacaaaacaaaacaaaaaaaaaaaaaaccaggctgcacaggaagaagtgagcaagcattaccatctgagctctatctcctctcaggccagtggtggcattagattctcataggagcgtgtatgagttcgttctcacacttctgtaaagacatacctgagacatataaagaaaagaggtttaattggctcacagttctgcaggctgtacaggcttctgtttctgggaaggcctcaggaaacttgcagtcatggcagaaggtgaaggggaagtaggcacatcttcacatggcccacaggaaaaagagagaaggagagagagagagagacagagagagagagagaaaaagaaagattgagagggagagaggagggagaaaggagagtgcctgtagggggagttgctacacaaaggagcaccagggggatggtgctcaaccattagaaactacccccatgatccaatcacctcccaccaggccccacctccgacactggagattacaattcagcatgagatttgggtggggacacagagccaaaccatatcagagcatgaaccctattgtgaactgcacatttgagggatctaggttgcatgctccttatgagaatctaatgcctgatgatgatttgaggtggaacagtttcatcccgaaaccatcccccgccaaccctggtttgtggaaaaattgtcttccacagaaccggtccctggtgccaaaaagtttggggacctctgcacatatgcatgcacctgtacatggacacataatacatgtacatatgcatactttatattctctgccacttctggtccagactgatatactatctcatttggattactgcactagccttttgttttggaaacagcattttttaaaaaatttaatttaatttttttgagatagggtgtcattctgttgcccagcttggagtgcagtgtcatgatcatagctcactgcggcctcgatctcccaggctcaagtgatccttctgcctcagccttctcagtagttgggactacaggcatacccaccatgcccagctaattttttgatttttttttttttttgagacagagtctcagcctgtcgcccaggctggagtgggttggcgcgatctcagctcactgcaacttctgcctcccaggttcaagtgattctcctgcctcagcctcccgagtagttgggattacaggcgcctgccaccacacccagctaactttttgtatttttagtagagacggggtttcaccatgttggccaggctggtctcgaacttgtgacctcgtgattagcccgcctcggcctcccaaagtgctgggattacaggcgtgagctaccgctcccagccaggaaacagcattcttgagataattcatataattcacccatttaaagtatataattcattctctttagtatgcccacagagttgtacagccatcaccagaatcagttttagaacccataaaggaactctgtactctttacccaaaacctccatgcctccagctgcaggcagccactaacctgccttctgtctctgtgactctacgtcttctggacattactgtggatgggctcatacagtcagtgagcttgtgactggtgccttctaccaagcagggttttcagtgtagcagcctctctgtttttcttttttttttaaattgtgacggaacttctgcctcccgggttcaagcgattctcctgcctcagcctcccgagtggctgggactacaggcccatgtcaccatgcctggctaattttttttttttttttttttagtagagatgggtttcaacatgttagccagggtggtctcgatctcctgacttcatgatccgcctgcctcggcctcccaaagtgctgggattacaggcgtgagccaccatgcccggctaacctttcatttactgtctgcatttcttccctgatgccttccagtccatgcacccgattgtagccattcatcctattatggtttaaggtgactgtcttagtcagcatgggttgccataacaaaataccatagcctgggtggcttcaacaacagaatttacttctcacacttctggaggttgggaagtccaagatccaggactttcgccttgccctcatgtggtgagggggtgaggaagctctgtggggcctcttatatatggatgctaatctcattcatgaggggtctgccctcatgacccagtcacctcccaaaggccccacctcctaataccatcaccctggtaattaagtttcagtgtataaatttgggggactatagacattgaaaccataacaagcacttttctaagatcagggagtgagtaagtagcagagctaggacctcaattccacatgtcagtcatcttgccttcactctgctccatgatggctgcctcctagagcattgggagtctcgatgttctatatgctctcatgtgttgtgtattggagatagttgaggctttatgaatacatctggatttgttgacttctagctttgctggtaaccagctgtgaccttgaataagttacttcatctctgagcctgtttcctcttttagaaacaggagtttaaaatgctgctttgggttgggcacggtggctcatgcctgtaattccagcactttgggaggctgagatgggaggatcactggagcttggagttcgagaccagcctgggcatcatagtgtgagatcctgtctcctcaagaaattaaaaaattagctgggtgatgtggcgtgtgcctgtggtcccatctactctggaggctgaggtgggaggattgcttgagcccaggaggttgaggctacaatgaaatatgattgcaccccatcctgggtgacgagtgagaccctgtctcaaaaaagaaaaaaaaaatgctgctttgtacccctttcatgtcatggcgtcatggccaacatagaatgccctggttgtttgctgttggagggcatgggcctgggggctccctgagggctccttccatcttcaactcattctctgtgcacctgttaggaagttgtgggccagtccctaccatgtatcattgtgtgggtaaaagtaaataaaatgtgtacagtgtctgaactgtacatatcagggtccaagaacaaaatgagtgacatgggttagctctttttaataaatggtaaaaccaaatattctaattttcagttttgttatacttccatcacatgtttttgtttttttgttttttgtttttgtttttctattttaggcagccttgccttctctaacaaaccccccttctctaagtcccatccgacgaaaggggaaggagaaagaaccaggagaacaagcatctgtaccgttgagtcccaagaaaggcagtgaggccagtgcaggtaggaaacagcgtggggaagggagggacatgagtgcagcatctgtcatgtagaaacataggatttaagtaacttggtgttttagagaaataaatataatacacatcagtaaagtgagagaaagtttctccaggtgcggttcaagatattagaaactaatgactgatgtacacagaccaccttttggtctgaagcatttctaagtgccactggctgacatgcagcccctacagcctccaggcttccagccctagcatggagcatcactctcctatgcttccctggttgcaggtgatggctggagaggcctcctgattttcagtaagggaagtggtgtagatgcttaggaatagatgtagtgagtgaaaaaactgattctgatatgtcaaaaattctgattggaaatggaatatttacatttggaagagctaaaggcgagagaaagtggggataaagtcatctgagttggaggagcttaaaccattcacaagtttggaggacctttttttacccatgaaaaggtcagaacagaaggggctaggatttaggtgtgactgcagtttattgaattcccatccatactgctctcggtgggcagtggcaggggcaggagaggagcctggcaaagcatgaagtgactgctgctgcctctgctatctgggacgcctggccacctgtctgtacagtctccctccagacccattctcacgctgtctcttggcacccaggggccagtgatggttctcccatttgttttgtgtatatagcatttatatcaaggctatttatttatttatttattttatttatttatttttttgagacagagtctcactctgtcacccaggctggagtgcagtggtgcaatctcggctcagtgcaagctctgcctcctgggttcaagcaattctcctgcctcagcctcctgagtagctgggactacaggtgtgcaccaccacacctggctaattttttgtattttttattagtggagacggggtttcaccttgttggccaggatggtcttgatctcctgacctcgtgatccgtccacctcagcctctcaaagtgctgggattacaggcatgagtcactgtacccggcctatttatttatttttaattgacaaaattgtatatatctgtaatatacaacatgatgtttgaaatatgtgtacattggccaggcgtggtggctcacacctgtaatcccagcactttgggaggctgaggtgggcggatcacgaggtcgggagttcaagaccaaactggccagcatggtgaaatcctgtctctactaaaaataccacaaaaaaaaaaaaaaaaaaaaaaagccgggcatggtggctcgcgccagtcgtcccagctacttgggaggctgaggcaggagaattgcttgaatctggcaggtggaggttgcagtgagctgagttcatgccactgcactctagcctgggcgatagagcgagactccgtctcaaaaaaaaaaaaaaaagaagaaatacatatgcattgtggaatggctaattaacctgtgcatcacctcacgtatcattgttttgtggtgagaacacttaaaatctactctttcagtgattttcttgcatatggtacattgctattaactgcagtcaccatgctatacagtagatctcttgaactcattcctcctgtctataaatgaaattttgtatccttgaccaacacattcaaggttttttttgagatggagtcttcttcacccaggctggagtaccatggcacgatctcatctcactgcaacctccgcctcccaggttcaagcaattctcctgcctcagcctcctgagtagctgggattacaggcacatgctactgcacctggctaatttttgtatttttagtagaagtggagtttcaccatgttggccaggctggtctcgaactcctgacctcaagtgatccgcctgccttggcctgccaaagtgctgggattacaggtgtgagccactgcacccggcctcaagcgttttaaaagatgctcttttctaaggattgactgtagtacaggaggaagattgacctgttgaaaagcctcagcctttacaagtgtaaaattatcagtatattactatcatctttctgatgaattaaataaactaaggactccaagtcaaaagtcttcaaactgaagtagaatagttgtatatagtgcttggcactttaatatttagtatcggtttaatgataatgtttgtgcctttgccgtctttaaaacatttttacatcatccctgtttgattacttggtgtgctcatgaagttgttggccactaaggaatcttaggctcagagaggttctggaattggccagtggtccttgaatcagctgctcctatgattctctaactgatttctcacaaagcaaacaagcaatcataacaaaacaactgtgcacactgctcttcttattttgttatttaaaaagtacttaggctctacttatgtttgttagtcaatttctcattacttctagttaatcaaaaggtcagaggaaatacttgaatattttcatactagaatactttaaaaaatcatgatttccagtaatctctttaaaacttggcaagttattttgatctaaaagtttatcttttgtgtgcatatttttaaagcttctagacaatctgatacctcaggtcctgttacaacaagtaaatcctcatcactggggagtttctatcatcttccttcatacctcaaactgcatgatgtcctgaaagctacacacgctaactacaaggtatgggcctctgcatcttttaaaaatatatatgcacacatacttacgtctaatggatagttgatgtttttcttatgatttgtaggatgtataagccctttgagatatgagttacatttagttttttcaagtttgtttgtctttcagctttgtttatgatagcttctatcatacaggtgttttggattttcatattgtttgtactcacagctaagattgattacagtgacagagctaggatgtgcagccaggttatagggggaagtggccctggtggagtctggagggatccgtgtacaggcttccttccctcccgtgaggctcacacaaaaatacagcaacatgctggtcctgcaggtaccctctgcctaacatgagccacaattccagactcacagaagaaaagcaggtgttcggcataaaccatgtgtttcaaatagtctgggcatggtgagccacttgttatcagctagggaaagtttatgtcagcgtaagaaactgttcaccagatacccccaagagccagcctttctgtctagggatgttttagttttttagttcatttttttttttaactttaaaattttctgttcatctgcaatttgttagatatgaagtatgtgtctaatttaatttttgtttttggttgtccccaataatgtttacagaagaatttttctgcactaattggcttgagttacttacattctcatagttctctagtttcagtagtttcatttattattttgttatatcaatctatctgtctgctcatctattagaagcatccttgttttttttttttcttttttagacagagtcttgctctgtccccaggttggagtgcagtggtgcaaccatgcctccctgcagtctcagggctcaagtgatcctcccacctcagctcctgagtacctgggactaccggcatgtgccaccacacccagctaatttttacattttttgtagagacagggtctccctaagttgcctgggctggtctcaagctcctggcttaagtaatcctccctccttggcctcccaaagtgctgggattacaggtgtgagcaactgcacccggctacaagtatacttcttaattattgtagcttaatggtatttatgaggggatcagttcccctgttgttctttagaattttctggatattcttctttattgattttgggatgtgaacaatagaatcaacttctacttgtagattgatttagggagaacttatacctcagatgttaagtcaccctgtccagaatgtgggatgctttcctatttgttcagaactttttaaattacctcagaagcacatgaaatttaaaggattttaaaaaaaacttaaagattatttcacatagctcttgcacatttcttgataaatgaatcctcaggtattcctctgtttttgttactaatagttacttcttatgggttttttttcccctgaaaatcatttatcaaacgtatgtggcttattttctgaaggatgtttgataattttggaagatatgaaagtcttcatattttacaaggtttgaggtctctttaagctgcatggttctcatgtcagctcccaaagcagaagacggcatgttgaaaaatgccgtagagaagatacttcttttccacctgttttcaactcatatcatcttgaatttcagggcacctttccatgctcctagtgcttgctatctgtttattattttccttcctgaataccctgaactccagcatgttctgctgtaattctggcctccctggcatcttggactcctgtttcctttgctctgtcatccccgcggtcagctcctgctgcgcagcttctcagctgaagtgcgtttggagtgcctggcgtgtcttgctggatctttgagtattgcctctggtttccttggttccttctgctgagttgctcagcgtctccactccccatttcttgtgtggcccttcctgcactcctctgattccttttgtcttccctggtttcttgctttggtttcgagtctccacagaacttttgcagctcttctgaagacctggaagctttttcatcttaattctcatctcatgacctcttttcccttctttgagagctagaacttcccatggtgaacttctctttccagaattccatgccttcttttccctcccacttacctgttgtccaggagaggtcagattgctgtgcatattggaggagaaccctttcttccctgggctcttcatctcacatgacatcaccacatcacctcgttccttggaccctcagtggtgtcactgctggatttttctttcctttggctggccttagggcacacccaggttgactagcgtagtcatggtatttagatccactcacattttcagtttctgtgtctgtctcttgcctgcttctgacttcgcccagagaaagcttctctttcacaagggttcttagatttatgttcactgagcaccttcttttctgaggcagtgttttaccaatatttattttcctagtcagtctcgccttacctttcttgttatgcatgtctttggtcctgacccattctctgagtctgtaaaatagaattgctgtataatttaattacatgaaatcctttagaatcttaacacatcttacacctgatttaatattttattgtatccaaattgaaccaaccctatgtgaatttgacagtgatttctcccagggatcctagtgtataaggaataggacttagtattttctattttttgatataccacataccagatactgattatgatggacatttaacccttttttctcattatgaaagaaagttaggaattatttcttccagtagcgccagtgtaacctgaaagcctttgaaagagtagtttttgtatagctatctgaaaggaatttctttccaaaatatttttccagtgctgacaacaaacacgcagacacaccctgcaaggtgagtgtacggcgccgcacagtggaggcatctgctgcagccgtcgatgtttgtgtctttggttgtacattatgagatcgtgacagggccagtaaccgtgtgttctctccttcaccttcccaaggtcacgctggatcttcagaacagcacggaaaagtttggagggtttctccgctcagccttggatgttctttctcagatactagagctggccacactgcaggacattgggaaggtttgtgtcttgttttttctccttgggttgtggctggcacacttgatgtgcgtcttctgggctgagttcatctaggatggagcctggttctccagggtgcctccgggagactcctccctgccccacgtgcttgcgtcacaggacccaagtctgactctgccttagccatgaagtttagggggaagtttctatttgtattctatttttgtctgttatcatgtattagcttagacccagtttagtttggaaaatcagtgggtttcaaaatgtgtttgtagagtcctttatttcttaacttgaccttttcaagtggaaaggggcaaaacagacgggtaagggggcggggcgggaggtgtgacttgctcttttgtgcctgaggaagtaacagagctggggttgacagtcatattctctgacacagatagtctctgacttatctcacagaaagtcagcggcagagcctgagttaaaagtctcgtagattttctttttcttttttttggtggctaatttcagttttatttatatttgtttatttatttattatactttaagttctgggttacatgtgcagaatgtgcagttttgttacataggtatacacgtgccatgatggtttgctgcacccatcaacccatcacctacattaggtatttctcctaatgttatccctcccccagtcccctcactccccatgggccccggtgtgtgatgttctcctccctgtgcccatgtgttctcattgttcaatttccacttgtgagtgagaacatgcggtgtttggttttctgatcttgtgatagtttgctgagaatgatggtttccagcatcatccatgtgcctgcaaaggacatgaactcatccttttttatggctgtatagtattccatggtgtatatgtgccacattttcttaatccagtctatcattgatggacattcgggttggttccaagtctttgctattgtgactagtgccacaataaacatacatgtgcatgtgtctttatcgtagaatgatttataatcctttgggtatatgcccagtaatgggattgctgggtcaaatggtatttctagttctagacctttgaggaatcgccagactgtcttccacaatagttgaactaatttacactcccaccaacagtgtaaaagtgttcctatttttccacaacctctccagcatctgttgtttcgtgactttttaacgatcgccatcctaactggcgtgagatggtatctcattgtgattttgatctgcatttctctaatgaccagtggtgatgagcattttttcgtatgtctgttggctgcataaatgtcttcttttgcgaagtgtctgttcatatcctttgtccattttttgatggggttgtttgcttttttttcgtaaatttgtttaagttctttgtagattctggatgttaatcttttgtcagatgggtagattgcaaaaattttatcccattctgtaggttgcctgttcactctgatgatagtttcttttgctatgcagaagctctttagtttaattagatcccgtttgtcaattttggcttttgttgccattgcttttggtgttttagacatgaagtctttgcctatgcctatgtcctgaatgttatggcccaggttttcttctaggatttttatggtcctaggtcttatgtttaagtctttgatccatcttgagttgatttttgtgtaaggtataaggaaggggtccagtttcagttttctgcatgtggctagccagttttcccaacaccatttattaaatagggaatcttttccccattgcttatgtgtgtcaggtttgtcaaagatcagatgattgtagatgtgtggtggtatttctgaggcctctgttctgttccattggtctatatatctgttttggtaccagtaccatgcagttttggttactgtagtgttgtagtatagtttgaagtcaggtagtgtgatgcctccagctttgttcttctagcccaggattgtcttggctatgcaggctcttttttggttccatatgaagtttaaaatagttttttccaattctgtgaagaaagtcagtgatagcttgatggggggatagcattgaatctataaattactttgggcagcaaggccattttcacgatattgattcgtcctatccatgaacatggaatgtttttctatttgtttgtgtcctctcttatttccttgagcagtggtttgtagttctccttgaagaggtccttcacatcccttgtaagttgtcttcctaggtgtttcattcccttagtagcatttgtgaatgggagttcactcatgatttggctctctgtttgtctgttattggtgtataggaatgcttgtgatttttgcacattgattttgtatcctgagactttgctgaagttgctaatcagcttaaggagattttgagctgaaccaatagggttttctaaatatacaatcatgtcatctgcaaacagggacagttttacttcctctcttcctatttgaataccctttattgctttctcttgcctgattgcgctggccagaacttccaatactatgttgaataggagtggtgagagagggcatccttgtcttgtgccggttttcgaagggaatgcttccagtttttgcccattcagtatgatattagctgtgggtttgtcataaatagctcttactatgttgagatacgttccatcgatacctagtttattgagagtttttagcatgaaaggctgttgaattttgtcaaaggccttttctgcatctgttgagataatcatatggtttttgttgttggttctgtttatgtgatggattacgtttattgatttgcgtatgttgaaccagccttgcattccagggatgaagctgacttgattgtggtggataagctttttgatgtgctgctggattcagtttgccagtattttattgaggattttcacatcgatgttcatcagggatattggcctaaaattctctttttttgttgtgtctctgccaggctttggtatcaggatgatgctggcctcataaaatgagttagggaggattctctctttttctattgattggaatagtttcagaaggaatggtaccatctcctctttgtacctctggtagaattcggctgtgaatccatcctggactttttttggttagtaggctattaactattgcctcaagtttagaacctgttatcagtctattcagagattcagcttttttctggtttagtcttgggagggtgtatgtgtccaggaatttatccatttcttctagattttctagtttatttgggtagagatgtttatagtattctctgatggtagtttgtatttctgtgggatcggtggtgatatcccctttatcgtttttattgagtctatttgattcttctctcttttcttctttattagtcttgctagcggtctacctattttattgatcttttcaaaaaaccagcacctggattcattgattttttttggagggttttttttcgtgtctctatctccttcagttctgctctgatcttagttattttttgtcttctgctagcttttgaatttgtttgctcttgcttttctagttcttttaattgtgatgttagggtgttaattttagatcttttctgctttctcttgtgggcatttagtgctataaatttccctctacacactgctttaaatgtgtcccagagattctggtatgttgtgtcttcgttctcattggtttccaagaaaatttttatttctgccttcatttcgttatttacccagtagtcattcaagagcaggttgttcagtttccatgtagttgtgtggttttgagtgagattctcaatcctgagttctaatttgattgcactgtggtctgacagacagtttgttgtgatttctgttcttttacatttgctgaggagtgttttacttccaactatgtggtcagttttagaataagtgcaatgtggtgctgagaagaatgtatgttctgttgatttggggtgcagagttctgtagatgtctattaggtccgcttggtccagtgctgagttcaagtcctggatatccttgttaattttctggctcattgatctgcctaatattgacagtggggtgttaaagtctcccactattaccgggtgggagtctctttgtaggtctctaagaacttgcttcatgaatctgggtgctcctgtattgggggcgtgtatatttaggatagttagctcttcttgttgaattgatccctttaccattatgtaatggccttctttgtctcctttgaactttgttgatttaaagtctgttttatcagagactaggattgcaatccctgctttttttttgctttccatttgcttgttagatcttcctccatccctttattttgagccaatgagtgtctttgcatgtgagatgggtctcctgaatacagcacaccaatgggtcttgactctttatccaatttgccagtctgtgtcttttaattggggcatttagcccatttacatttaaggttaatattgctatgtgtgaatttgatcctgtcattatgatcctagttggttattttgcccgttaactgatgcagtttcttcatagcgtcagtagtctttacaatttggcatgtttttgcagtggctggtactggttgttcctttccatgtttagtgcttccttcaggagctcttgtaaggcaggcctggtggtgacaaaatctctgcatttgcttgtctgtaaaggattttatttctcgttcacttatgaagcttagtttggctggatatgaaattctgggttgaaaatactttttttaaagaatgttgaatattggctcccactcttttctggcttgtaggatttctgcagagagatctgctgttagtctgatgggcttccctttgtgggtaacccgacctttctctctggctgccctttccttcatttcaatcttggtggatctgatgattatgtgtcttggggttgctcttctcgaggagtatctttgtggtgttctctgtatttcctgaatttgaatgttggtctgccttgctaggttggggaagttctcctggataatatcctgaagagtgttttctaacttggttctattctccccatcactttcaggtacaccaatcaaacgtagatttggtcttttcacatagtcccatatttcttggaggcttggttcatttcttttcactcttttttctctaatcttgtcttctcgctttatttcattaatttgatcttcaatcactgatatcctttcttctgcttgattgaatcggctgtcgaagcttgtgtatacttcacaaaattctcgttctgtggtttttagctccatcaggtcatttaagctcttctctacactggttattctagccattagtctaacatttttttcaaggtttttagcttccttgtgatgggttagaacatgctcctttagctcggagaagtttgttattaccgaccttctgaagcctacttctgtcaattcatcaaactcattctccatccagttttgttcccttgctggtgaggagttgtgatcctttggaggagaagaggtgttctggtttttggaattttcagcctttctgctatggtttctccccatcattgtggttttatctacctttggtctttgatgttggtgacctacggatggggttttggtgtgggtgtcctttttgttgatgttgatgctattcctttctgtttgttagttttccttctaacagacaggcccctcagctgcaggtctgttggagtttgctggaggtccactccaggccctgtttgcctgggcatcaccagcagaggctgcagaacagcaaatattgctgcctgatccttcctctggaaacatcgtcccagagcacgaaggtgtctgcctgtatgaggtgtttgttggcccctactgggaggtgtctcccagtcaggctacatgggggtcagggacccacttgaggcagtctgttcattatcggagcttgaatgccgtaccgggagaaccactgctctcttcagagctgtcaggcacgtatgtttaaatctggagaagctgtctgctgccttttgttcagatgtgcccttcccccagaggtggaatctagagaggcagtaggccttgctgagctgcagtgggctctgcccagttcgagcttccctgctgctttgtttacactgtgagcatagaaccacctactctagcctcagcagtggtggacacccctcccccagccaagctcctgcatcccaggtcgatttcagagtgctgcgctagcagtgagcaaggccccatgggcgtgggacccgctgagccaggcacaggagagaatctcctggtctgctggttgtgaagactgtgggaaaagtgcagtatttgggcaggagtgtactgctccttcaggtacagtcactcatggcttcctttggcttggaaagggaagtcccccgaccccttgtgcttcccaggtgaggcaacaccccgccctgcttcggcttgccctccgtgggctgcacccactgtccagcaagtcccagtgagatgaactaggtacctcagttggaaatgcagaaatcacctgtcttctgtgtcgatctcactgggagctgtagactggagctgttcctattcggccattttggaagcatcccttgttttttgaggtggagtcttgctctgtcgcccaggctgacgtgcatcggcacaatctcggcccactgcaacctttgcctcctggtttcaagcgattctcctacctcagcctccggagtagctgggattacaggcacctgccaccatgcctggctaattttttgtatttttagtggagatggggtttcaccacattggccaggctagtctcgaactcctgaccttgtgatccacccacctcagcctcctagagtgctgggatcacaggtgtcagccaccacgcccagccatattttcagatctccctctctttgccctaaaccactgtgcttaataagtagtttttagtggccagcagtctccatgtataacacattttagcaaaatggaaaatactatatgttttaaatttgaacgtgagattatactgaaataaaaatcatctaactgggattctttaaatagtaagattttcttttttgtatgtgggtttttttttaaccttattattatgactgtcatatatagaaatggctgtttttcagttacagtcagtgaatgtatcaaatgctgccttatccaaataataaaagtaaattattaataagtcacaatttaatgaagattgatgttagttgatctttatattcttgaaatcagccatatggttgtgtgtgtatgtatatatttttaaaggtacataaagataataagctcatctctgaaaatttttacatttggcataagaataactggataattaagcatcttattctctggcctgtgtctttacagttaaaggtagatttactcacctctccttttttgtttttctaagttcatcttttttgctgtttcaagacagaggcccattttagctttctcgcatatccttttgtttgtactttggaagcctcacctgcttaattgttgagtttttatccgtggtcttttagagggggatatgtagggtagaagctttcacaggttcttgtttgcacttggcccctgactgttttgaggaatctccctcactgactcacagcatggcaaggtttcagatctctttctgccacacagcagttctgaggcagctggaaagatatccagatgcttagattgtcaggccaggcttgagatatacaaactattgagccttatctgtgaccttgcttaggtgaaggcatcagagcccctgcaccaacatgcataggcctctgcatgtgtgcggggctgggtgttgaggtctgagcacaagtgtagctggagaggtgagcttgatgtggcgacgggtatgagcaggttttcttcagacttctgtgagtttacctagttccaggatttaaaggcacagagactttagaattaaaatagaatcattttctttttctaaatagcaacactaggaataaaaaataataattccacattcttgacaggtaatgttttttcttgtcttctaatccttatttattccatactcatttttatacataattgaaatgtattatgcattggatttttcttttgcattatattatagacgatttttcatgtaactccttactgttccattttatatgttttgtctggtttaagactttatctgcaaaccgggaaactgtctctacaaaaagaaaaacaaaaatagttggccgcagtggcatgcgtctgtggtcccagctactcggggctgaggtgggaggattgcttgagccttgggaggttgaggctgcaaagagccatgatcatgccattgcactccagcatgggtgacagactttatactgtctgttttgggtgatttgataatgatatgccctgatgtagtttttttatatcttgtgtttcttgtgcctgggtttattgaggttgggtctgtggcttcatagtatttttaaagtttggaaaattttaggccattctttctttctttctttcttttttttttttttgagacagtgtctcgctctgtcgcctgcgttggagtgcagtgacactatcttggctcactgcaagctctgcctcctgggttcacgccattctcctgcctcagcctcctgagtagctgggactacaggcgcctgccaccacgcctggctaattttttgtatttttagtagagacgaggtttcactgtgttagccaggatggtctcaatctcctgacctcgtgatctgcccgcctgggcctcccaaagtgctgggattacaggcgtgagccactgcacccagctaggccattatttcttcaaagattttttttctgccctgcctccctccttttttccctctcttaaaggggctgtgatttcctgaatgattgcttagtgttgtcccatagcttactgatgctcttttcagtgtttgattgttttatgtgttttctgttttgtatagtttctattattgtgttttcaagttctctgatcttttcttctacagtgtctactctgttgttaatctgttaatctgttgttaatcctgtccagcgtatttttttttttgtttttgaaacagtctcactctgttgcccaggctggagtttagtggtgcgatatcagctcactgcaacctccacctcccaggctcaagcaattcttctgcctcagcctcccgagtagctgggactataggcacgtgccaccacacctggctaatttgtgtatttttattagagatggggtttcaccatgttggccaaactggccttgaactcctgacctcaggtgattcatccgcctcggtctcccaaagtgttgggattataggcatgagccaccgtgtctggcccctgttcagtgtatatcactaattttgtttttatctctagaagtttgatttaggtcttttaaaaatgtctccctgtgtttctgtttagctttgtgaacacaattgtaataactgttttaatatccttctctgctagttctaagatcttctaataacttcccagttcttggtgtttctcattggttgattgatactcctcgttttgggttgtattttcctgcctctttgtatggctgccaattttttattggatgcccaaccttgtgaattttactttgttggatgctatatatttttgtgttcccatagatcttcttgagctttgttctgaggttagttgagttacatatagatggtttactcttttgggtcttgctttataatttgtcagatgggttggagcagtgcttagtttaggactaattttttttttggactaattattcctctttaggaataattaggtaccatgcttaggaggcaagaccatcctgagtactctacctaatgaaccagaaagtttgggttttccagtccgcctgctgagaacagtgactttctagccctgtgtgagcgctgagctctgctccttctaatcctttccaatgcttctttccctggcctcagggagttttctcacacacatatctctgctgagtactcgagagggaccttccccagatctccagagctctctctgtcttgttttctcttctctggtgctctgtcttatgaactgtggctgtcttggtctccttagattctcagcacctcttcaattcagagggttgcctgtccctcctccttgtgccacagcctaggaactctctcaaagcagcgagttggggcagccatagggctgacttagtctctcgtctcccagggatcactgtccttcattgctcatgtccagtgtcttgaggactctgggttttgtctgttttgttttttggtttgctttggttgtctcaggcaggagggtaaacccagtccctcaccctcattgtgctcagtagtggaagtctcactctattacattagatattagtatttgtagcagagccctggttccctggtacttggggagctcttgaaaggccagaaacagcatgctttctcaccttttccagggcttcagtttctggtgcacatcaagcattccatacacatttgttaaagtcctttgttagacaagtagtgattcacaggttctatttgtaattttttcagttaacatgtattgggtatctgctgggagctagtaaaaacaaaaagtggtgtgtgacaaattcaattctgacaagaacaaccttaaacacttagaatatactttgagcatatcagaattttaaaaatgtgtggcccttgagtatttgaaaccaacaagaatctattgcttattagtagaggatattttgttaaacaagtggagagagaggcattttcagtctaattggtgttggcttttagcagctgatggaaaccagttcgtgattagccaggcagtggtgaaacaggctgtgcattctgaatgcctaggtatctaggcattcagaatggtggcgctctttgagttagcatcttcttctttcttgattcttttttttttttttttgagatggactttcgctcttgttgcccaggtaacaactccagtgcaatggcgccatctcggctcactgtaacctctgcctccctggttcaagcgattctcctgcctcagcctctcaagtagctgggattacaggtgtgcgccaccacgcctggctaattttgtatttttggtagagatggggtttcactatattggtcaggctggtcttgaactcctgacctcaagtgatgcacctgcctcgatctcccaaaatgctgggattacaggcgtgagccaccactcccagccccttcttgattcttgaaaaggacattgggtgctgtacatctcgttatagatgttgataaaaatgcttgtgagaagagtaacattaaggtagttatttggtcatttttgcagattattttaagacaattctaggactgatttgtggtaaatcacacattgctgtatcatagttgtgttcactgaacatattcaggggctctacagatgcagggctcttagctgctttgcacacttctgaattcctgccctgcgaacaggactggatacctaatagacaacaggtacttgataacagtttattgaattaatgagtgaatgaacagatacataaatgcatgaaagaatggttgtaatgtatataacttggatttcaagactttttactgactgttcaaaataagaaattgaaaactttcctctgattttcctctactatttacacaatttaaatggaagttatcttgtaccttcaatttctgtctaggattcgtacaataacgggtcatctctgagtcgcttaatgtctcacttgtctttctacagtgtgttgaagagatcctaggatacctgaaatcctgctttagtcgagaaccaatgatggcaactgtttgtgttcaacaagtaagagcttcattcttttcctcttctgttaagacgttcgggtatgacagcaaaacgctgctactccttaagaggcaggcgctgttggcataatcagctgggaggattgtggggtccagcgcagcactttttggctcagtccatgattgagccaagaggccatccttcccttcactccccaggaggacgaggtctgtcactgtggagggcagaggacaccagaagctcctctgcaacctcgctagttaacttccagtccctcggagtttctgtttagaatgctcaatctcatttagaattgcaaggaaacccaaaacgcctatttaaggtacaaacagcacttcatacaatatctcatgaggtattaatagtgattcacaggaagaatttcacgctgtgagtctttgctaacatatccagttatttacagatggatttgatatttgtgtgggagattcttaaaagtgttgttcacgccacattgttgatgcctcatttttttcactgtagttgttgaagactctctttggcacaaacttggcctcccagtttgatggcttatcttccaaccccagcaagtcacaaggccgagcacagcgccttggctcctccagtgtgaggccaggcttgtaccactactgcttcatggccccgtacacccacttcacccaggccctcgctgacgccagcctgaggaacatggtgcaggcggagcaggagaacgacacctcggggtaacagttgtggcaagaatgctgtcgttggtggaagcacgaaagagcaagcaggaaatactttgtaaaagaataaaaacgaaaaatgttagcgaacatcttctaatagtctgctgtattcagagaactctaggagatatatatggttgatgcaaagatgatttaaggcatagcccggccttccaagaagtgtgtggccagtgagtgagatgggcttgggacttacacatctcagaggtgggggtagaggaggaggaacactgagtgggctgagaagcagccagctctcattgccaaagtgtgtcagcaaaccagaatgcagttcataatgtccccacccattcaaagcacaggacctgtagagtggtgtggcatgtgttggtggcacttttcaggcctgtaacaaggatgaaagaacagcttcatagcagcacagtagtgctggtgttcagaggtgtgtgaaggccatagaagcatcttggatatattaccttgtgttttgtcagctttatgactagaagtctcttttcacttaaatttgttttttttttttttgagacggagtcttgctctgtcgcccaggctggagtgcagtggtgcaatctcagctcactgcaagctctgcatcctgggttcatgccattctcctgcctcagcctcccgagtagctgggactacaggcgcctgccatcacgcctggctaacttttttttgtatttttagtagagacggggtttcaccatgttagccaggatggtctcgatctcctgacctcgtgatctgcccgtcccggcctcccaaagtgctgggattacaggcgtgagccaccgcgcccggcctcttttcacttaaatttatgtttgtgtttttaatgcctagtatacaggacttcttaaattgccttaagtatgaacaggtatttgagttgctaatctgtatagtagcaataatagaatcccttgtttttccttttataaatttagcgattaaatagctacaattaaaacactagagtcaggagtcaaggaaaatacccatgttccaggctgtatgttagtgatgtacttactatatattggagtttcaggagtaagtctgtttcaatgctttctgtaaccatttggggtattaataagcatgtgagtgtgtgcatgtttgggttaatttcatatatgtttcttagaagggatatcattgatgtaaatattttaaaggcttgtcctccaaaaaaatcatgtaatttcttctaaattactgatcttttaaatgaccttcacctttctctcaaatctcacttaagactgggctgagtagtcagtttcctgtagcagaaaaaagctcagacttgagtagccttctgcgagtgaggagacttgatggctgtcaggcagctgtaaactctaaatagagtgtcattatctgaagagggcgatgctgccacactgagtggcctttcaagttgtttctcaatctgacacgttctgatcgtgtgaatgtgaaattggtttgagcaggagtatatctgagtgcagaggagattatttaaagatattctcattctctgcttcccttttattcccatttggcagatggtttgatgtcctccagaaagtgtctacccagttgaagacaaacctcacgagtgtcacaaagaaccgtgcagataaggtaaatggtgccgtttgtggcatgtgaactcaggcgtgtcagtgctagagaggaaactggagctgagactttccaggtattttgcttgaagcttttagttgaaggcttacttatggattctttctttctttttttcttttttatagaatgctattcataatcacattcgtttgtttgaacctcttgttataaaagctttaaaacagtacacgactacaacatgtgtgcagttacagaagcaggttttagatttgctggcgcagctggttcagttacgggttaattactgtcttctggattcagatcaggtttgtcacttttatctttcatccatcatacctgttcctaatttagtacaaattaccctaaaagacactgaaatctactttaaagaaatgtggtctgcatgtttccctcatcagttgctgctgcttatctttttcatgcacctagctggtgcagaaggcctggggcatagccagcctcagcaagtcagcatccttgccccagctccctggactcaaggctaacctggggttggctgttagggatttccaaaggtttgtcccatccacttgcctcccctccaaaataagtttgaatttaaattgtgagatacaattaagatttattgtttggggaacatttttgcaaaatctagagttagtttaaacagattatcaattattaccataattgatcatctgcagtttcaagctatctaacaggttcacttacctctttaaaaaggaatggaatttagcaggacagtaactgagacccgtgctcctggagtccatgtgggagctgtgtggctctgcacaagcatttgcacgcttcccctcttgactgcattaccttcctcctatagttgctgtgggcaccagattctggctagtcctgtcccttcatgatgcacattttcctcaagattcgtcccagttaaatcactgcagatgaaactgccttttcatcgtcaaaatttaactgtcatttttgagccgtgatcttgggctactttcttatgtggggtaggaatatttgtgagttagaaatattacacttctctatttccttctagacgtaaatctgttaatcctgtcagcactgttactcacctgaaagggtctgtttccctaggagaactgagggcactcggtcaacactgattttccacagtgggtattggggtggtatctgcttgttttttttgttgttgttgtttgtttttttttgttttttttttgagatggagtctcgctctgtcacccaggctggagtgcaggggtgcgatctcggctcactgccagctccgcctcagaggttcacgccattctcctgcctcagcctcccgagtagctgggactacaggcacccaccactacgccaggctaattttttgtatttttagtagagacgaggtttcactgtgttagccaggatggtctccatctcctgacctcgtgatctgcccgcctcggcctcccaaagtgctgggatgacaggcgtgagccaccgcgcccggcctggggtctgcttttaatgaaggaggcatcaaggggtgggctttgcgttggcctgatgctttcatctttctttcacaaaacctgtccgaagaaaatccgtctaaatgggccattgctctcctcaggaaatagtcattgggaacttcttttcctttcctttgacactaggaggctgactggggagaagccctggtctatggctgtgggcagcaggggctgagaggagcaggctctcaggggggcacgggtaccccaagggaagccagagccctgatttgttccattctagtaagaacaaagactgctctggtttcatgtttgttctgattgcctttcatcaaccggtcccctttctcccagttcttaagattcagtacagtgacagttttatgaacaagaatagaacactagaacagacaaaccattgaactctatgctgataaagatttattgagctcctgctgtatgtttgcattctgcccagaggctctgagaaaaccaggccatatgctccatgctttatccatggaagctccccgtcaggttgggaaagctgacagctgcagggaatacagtgtgacacaaaactggctcccatgcagcccttacgtgtcgcctctcagatggttgggggacgaaggtcgactcctttgggtatcttattactaaaccagtttcagggaatctgtgccaccctatctgccattaacgtgaacagatgagtccccaaggtgtaattttgggtattgtctgatgtctcttggaatttattatttgtttttccaatgagatttcacctcagggtatagtaaagttgttgaggggattcctggatgtgttctgcaattatctaggctgatttcagaatagagttatgcttatagtcaaatttatcagctgtcaagaattttatttaaaatttatgcagataagcaggaggaaaagaagcctggtttttacattttaatcctattattgatgtgaaattttattttccttcctgtaggtgtttattggctttgtattgaaacagtttgaatacattgaagtgggccagttcaggtaatagcattttattattttagatttttttcttcttcttgtgtacttacatgtaatttaggttattaagtgaatgtttaaactactgttaggcatttttgctgttttctttaaatggaaatctgactaacatactgtgcatttttgcttctcttaaaaattaatgtatatctcaagacttgtttggaagtagttatgtatctgaaaattccatatgttgtcagtattcattgcacatttcaaagcatttaattgtgttgacagatggtggaatgaaatcttgtggtggagcactagtttttaaatcttcttagagaaagcagttttatataatgttgtctttagtaattattatgcatttgtattctctgcagctttttcttgctagatgttgaggttttaatacttcttgctagtccattacaggtttataattattaaaagttaaaattcttttagtacctaaaatgcttaataaacattgtaattaggaaaatttagtgcagaaggaaagtgttcccagattccctggggtctggaaacatagtgtttattctaattacatgacacctccactgtgttttggggcaagttactgtttctcttttgagtttcaatttcttcaagagcaaagaggcagaggagagctaggaagatcgtagctgctgtgcccctgtgccgtcgggtgccttctacctgctgcctccgaacctttacacatgtccctgctctgcgcgagggcacagatgggatgcactgtggcaggggtggggttagagtagatcacggacacctgttagcttgatgtgtgcttgctgtcaaggttgaatcatgaattattttatgttgcttatattgatatgtatcttaattttaaaagaaaggtctaaatggatgtttttgtttttagggaatcagaggcaatcattccaaacatctttttcttcttggtattactatcttatgaacgctatcattcaaaacagatcattggaattcctaaaatcattcagctctgtgatggcatcatggccagtggaaggaaggctgtgacacatggtaacgggacacacctttcactgtcgtcttcggtgtcgtgatgtgcttggcagtgttcgttttcatatacccactttgaacgttgtcagtggcagccatgtgcttctcaggctctgcatgtgtgtctgtgtatgtgaaggtactggttagagacgtttcaaaagagaagagagcatattctttactctcagcaatttgtaatcttctcagggaaaaaaattcaagaaacagtaagataacctaaggtacagatagattctgaatataaagttcctgttcattcacatgaaacgctaaaagttcttcacttgatcttagccaaaaggccaagaagcgatgcaacactaaaaattcttaaatcgaacttgccgtgaattaaattttgatctctcatccagtggtattggagatatagtttgacttgggttcagggctttctgttttgcctgatgattttgctggagcttaaataaggaacccaggagatggccagctgtgcaagcccccagcctgtggaaggagctagtgtggttttatgaatgagttgcaaatctttctttgagctttttgaactgatcttccagcattgccctattgacccctccctgactcctttgctggaatctgtaggcttttgaactttgacagggacacatcctaagacccttgcaaactcccagatgtgagaatggcactactacttagagtcttttcgactcagcgtgtgtgcagaagagcatcaaccgggctgtgttgcgaggcagggccttggctgacctctcagtgtttacatagctaagccagttagtgtttgccacggcctcacaagggcttcagattcacacagccaaagtatagattattaaaggcataggtgtttggtttcctggacttggagggtctttggacagaaaatcagtaggcaaccacacccagtactttgtgctgggaagcttggtcatctgtgagagggtcagagagtatacccatgcgtgcatgccaccgaagggtcagtgagtattcctgtgtgtgcatgtctcagggccggagagagtatgtgtcactgagaggtcagagtgtttgtgtgtgtgtcaaagagggttgcattgtgcccttcactgaggggtcagagggtgcctcgcgtgtgtgtgtgtgtacgtgtgtgtgtgtcactgaggggtcagagtgtgcctgtgtgtgtgcttgtgtgtgcgtacatgtcactgaggggtcagagtgtgcctctgtgtgtgtgctcatgtgtgtgcatacgtgtcactgaggggtcagagtgtgcctctgtgtgtgctcatttgtgagcgtatgtgtcactgagggggtcagagtgtgcctctgtgtgtgtgctcatgtgtgagcgtatgtgtcactgagggggtcagagtgtgcctctgtgtgtgtgctcatgtgtgagcgtatgtgtcactgaggggtcagtgttcctatgtgctcatgacattgagggtcagagtgtgcctgtgtgccaatgaaaggcatttcttatatttttttatatgtggtcatagtagaccagttaatttattttgactcctgtgttagaccaaaataagacttgggggaaagtcccttatctatctaatgacagagtgagtttacttaaaaaagcataataatccagtggctttgactaaatgtattatgtggaagtctttattgtcttttcagatgaatcaagtagattattcttgagaccaggaatgttgctgttttggttatttggaaagttttatcattttcaaattgacttttgaatttgagtcaccttttttcagaagtggtgttaaattataggagccctaggttttttttctttttttagaagtcatcacaaaatgatcagtgttcagaggaagagctttgaccttccacatggtataatgattgataaccttaattcatctcttaccataaaccaagtatgtgtaagggttttctttatttcttgaaagcattttgtagatgttgagagcagttttccaaatgtaatttccatgaaatgcctgataagggtacccttttgtccccacagccataccggctctgcagcccatagtccacgacctctttgtattaagaggaacaaataaagctgatgcaggaaaagagcttgaaacccaaaaagaggtggtggtgtcaatgttactgagactcatccagtaccatcaggtaagaggaatgtatgttggaactgtcgtggatactttattgacccgtgcagatggaaggaagtgccatgtggtaacgctcactgttaactgtgttactttgaaccaggtttgggctttctggggcctgggtagatgccggtgcagggggatggggagggaggcggggggtgggggggtgtggtggagttggggaggtgcagtggcaggaggtgttgttggtgtgtatcctttttttttttttgagatggagtctctctccgtcgcccaggctggagtgtggtggcacgatcttggctcattgcaagctccacctcccgggtttaagcaattctcctgcctccacctcccgagtagctgggattacaggcatgcaccaccatgcccagcaaatttttttttttgtatttttagtagagatggggtttcaccatgatggccaagctgtttcgaactcctgacctcaagtgatcctcctgccttggcctcccaaagtgctaggattacaggcgtgagccaccatgcccagcctggtgtttatctttaaagtgggcacagccacaggagttcacctgactcctggtctgagagtcacgagatcgttcaagatagtgaggccctcttttccaaaacgaggaccaaaaatcaattgacagtgttggtcaagatggtagaaaccttaaaatgatagaaatctcaactctgaaataaaaactttatttgtatatttatttaccactattttgacatagggctaaggtctttttctttgagctgatttctggttttgttttcttaaagtggcataagaattcaaagacattttgaggaaggctgagtgcagaaatctctctttttaaatgacttctcctttcttttaacttgcactgttgtctagccctcacttattttgtcaattctttttagctgtttgtctttgaatcttcataaagccatagcttttctcataagaagcagcactttctttgttcattcatattttaatgaacccctgtagtatttaattaaatacttaatgcctaattaaatcacataattgcaatgcaaaagtacatgtatcataaagaggtctgaaaatgagcaactggcaagcaggtggtggcaggcagagctgcttgggtgggtgggtgtcatggagaggagttcatcagccacatgttcagtgagctctggatatgtctgtttagaaatgatcactaataaacttgtgctcaaccatgtatacctctgggaagcaggtgctcttcagtagattgcctctgcagagaacacagaattgaagtgaatgtccacaaaggcaatgagccacctgcagaatagtttagtcaaggctgtgtttgaagtttgccaaagattaatatacatttgattttcatgttgtgccttttctctgattgtgaaatattacaaattctatacaaataacaatgatggcaaatcctcctgagcaaagtgtgcaccttgtatgtgccctagaggaacttgtgtttcgttctgattcccctacatttctcatgtcatagagtgggggttgcattagtgtccccctgtcctcgctgggatcacatctgtttggatcctagagtcttccagctgaactgggacaagtataacagacggacacgtaggggtggaaaggcgtctcttggcagcagactttctaattgtgcacgctcttataggtgttggagatgttcattcttgtcctgcagcagtgccacaaggagaatgaagacaagtggaagcgactgtctcgacagatagctgacatcatcctcccaatgttagccaaacagcaggtttgtccccgcagccttggcttgttgttgcatagtgatggtagcttaaggtccttgtgaaaggtgggtggctggaatcagctcttccttcagtcctaatctgtgccttgatagcagttctccgtgctagtcatgggacagctgacttcatttcttctcacaatgccatctcaggttggtattgcccacctactttacaggggggatcccacagctccgagaggttatggaggtgatcaggcagcacacagctttagagtgctggggtgagggcgggccaaggctaactctaaagcccgaacccttacctcctacactgcctcctgcattctggtcaacccagtgttttatttggtggttagatttttgtttttgttaccttactgcttgtaatttagcagttttcctttcctttcccttcctttcctttccgacagggtctcactctgtcacccaggctagagtgcagtcgtgtaatctcactgcaacaacctctgcctcccaggttcaaccaattctcccacctcagcctcctgagtagcaaggaccacaggtgtgcaccactacgcctggctagttttttgtatttttagtagagatgaggtctcgctgtgttgcccaggctggttttaaactcctgggcgcaagtgatccaccaaccttggcctgccaaagtgctggcattacaggtgtgagccacctcgcctggcctattcatcactaatcagaatttctatgatcaaatgacatgaatcattgtttccacaactgcagtggaaggaaatggcctggcagtgccagtttcagaagcagcctgcccccagtcaggcacaggccactgtgcccccagtgtagcagcacctctgtagctcacagagaagggtggtggggacctccttgaggcagctctgccagaaaatctcatgagctgcctggcacagcttgaggttgccttttaagtggactcagcaaatacatgtttgttcatcttgattatacacaataaacaactactctgtatagtacgagtagtccgtggtttttggcatttgatttaaacttagaggcatgtgatattgatgttactgccttcatgactgcacccccattctgatttcataatggaatgttatcttgagaccagttagacaacaggacagggatcttggcttctggtgagattgacagcagttttagtgtggtcagggtctccctgcctacagatggttttagaatggtgccctggaagctttatcccattcttttctgtgcgtaatctgagtagagtggagatcgaaggcctgaatacatagtaaatacctgacttaatatctgccgcaatggaaattgtgtgatacaacatttatgaaacgcttagtgcagcacctgccaggtagctcaccacaggtgcatgttgcattcagaagtagtgctagatactatcctgttactggcagtgcatacatcagtgatcaaagcagattaaagaaagaccccctgccttcttggagtgaagattttgttgggatgcgggtaaggggacagacaatagaaaagcaagtgagtgaagtctataccatggcggctgatcaggaacaccgtacagaagaatccaggagggaagagagttaggtggtgtctgcggtgggagtggcattgttcagctggtgatgagaagaagctttggtgatctggtgacatttgagtgaatttgcagaaaggaaagatacaagcctaggagatacctggggaaggaacattccaggcagagcaaatagcagtgcaaaggccctggcggggggcggacatgctgttagggtacaagcaatgagggtggaggagtggggcagccatggggagggaagggagtgaggcctggtggggtgaggccagtgtggaggagccttgagagggtttgcgctgatgtggtgtaggttttagcaggatcattcttattcctgagttgagaatagccttgagggggaggtgagggcagagcagggccacccatgtgagacccggcactggagtggaatggcccaagtcagcatcccttggcagcatgaaagcaaaaccagcaaggtttgctggtggcttagatgtggcatgtgagagagagcagggctttgggggtgatttcagggtgaggacagggtggctgtggacaaggtagggcagacattgggggcagcaggaggtcagagcctgtctggatgtagcagttgagaccccataggtgcctaatgaggtgaggccagcatcaggtgtatgagcctggagttgtcgagagactgtggggcagggggtcagcatctgagatgtccactcacagtggacccagactggctggagaggaggaggagcttgaataccgagcctgctgagtcccagctccaaggtcaggtaggtgaggggagccagtgctggggcagggggagtaggcaggtgtggggttcctaaagccaagattttttttaaggcattttgtgcaggagggcgacatctgctgtcagcaccttgggaacttggcccaggtttggcagcaccgagggcactgatgagtgcttttggaggagcaaagggagccaaaccctaatgggaatgtgttcctgaaaggacaggagagagacttgggaaaaggttttacttgaagagggaacggagaaatagggcagtagccagaggaggagaggagtcggcaatgggttaagttggcagaaatgaaggcctgtttacgcactgagggcagaagcaacagggaggatcagttcatgacacaggagacacaaatcgccgttgtggtgttcacagacatgggttaggattggctgcatggatgacagagcactgtgggttctcccagagttgctggggaggaggcagagttggtgagcacaggcgagggtccaggatgcaggaatcctggagctcaagtcagttgttcccttgttgtaagatgtggccagtgttgtgagcttcacatctgtgccttgaaaaacaccacatctgtttgcagagttgtttactatgtatacacactcagtagaaacaaaaattggaaacagtcagtgcccaccatcaataagtaatggttgaacacactgtggtataagcttagactattttagcttgggctattttgcatgattaaaaatgttctggccaggtgtggtggctcatgcctgtaatcccagcactttgggaggccaaggcaggcagattgcttgagctcaggagtttgagaccagcctgggcaacatggtgaaaccctgtctctactagaaatacaaaaagtagctgggtgtggtggtgtgcgcctgtagtcctggctaactcaggaggctgaggtgggaggatcacttgagcccattcgtgcgccactgcactcctggggcacagagtgagactctgttagaaagagagagagagaaagaagagagagggagggaggaaggaaggaaggaaataaatggaagaaatggaagggaggaaggggagggaggaaggaagaaaggaagttcagccagttgccttgggagttctccattgcactgggttaagtgagaagagcagagacgtttatgatttttcaaaacaactaaaacaaaacctctgtgggtgagggggcaaggatatggctataggaacatggggcagattaagaaagggatatacacacaccacttagcatttgttacaactgttgtgggagggatggagtgcagaaaaagaaaaaaaaaagtgcacaccatcccatgtatgtgtatacaaagggacgcttggaagactggtccccaaaatgttggtaatgattgtgtcagggtgctgcagtgctagttgattttttttcacacttttgtatatttgagtcttttacagaaagcatttattatttatgtaataaaaatctaaatgacaagatttctgttatgggaaaaatgtagctatacagtgttgttgtaaaaatgtttgcttggttcaccactgaacttaaaatgcttttaaatgagggaaggtgacgatgagatgattatgatgatttgcccttgagttacatagctggtgtacaggaagctgtcgtttcttttggcttacgtagaaatgtttgtggtgtctaattccacagatgcacattgactctcatgaagcccttggagtgttaaatacattatttgagattttggccccttcctccctccgtccggtagacatgcttttacggagtatgttcgtcactccaaacacaatggtgagtctctcgcctggctcagcagatgaatctggacggcttgttcaggctctgattactgggaccacccccagaatgtctgagtcagtcagtttgggtagggcttcttgagagtttgcttttttttttttttttttttttggtgtgggggtggtgcggaacagagtctcactctgtcgcccaggctggagtacagtgtcatgatctcggctcactgcaagctctgccttccagcttcacaccattctcctgcctcagcctcccgagttgctgggactacaagcgcccaccaccacgcccggctaatttttttgtatttttagtagagatggggtttcaccgtgttagccaggatggtcttgatctcctgacctcgtgacccgcccatctcagcctcccaaagtgctgggattacaggcgtgagccaccgcacccggcctttttattttttttggagatggagccttgctctgtcacccaggctggagtacagtggcgctacctcgactcactgcaacctccgcctcccgggttcaagcaattttcctgcctcagcctcccgagtagctgggactacaggtgcgtgccactgtgcccggctaattttttgtatttttagtagagacggggtttcactgtgttagccaggatggtcgcgatctcctgaccttgtgatccgcccgcctcggcctcccaaagtgttgggattacaggtggctctcgcaccaagccaagagtttgcatttttagcaaattcccaggtgaaactaatgcctgcttttctgggagcacactttgggactcagtgatagagaggtttattggtaggatagtaaaataggagttattttctttcacaaaattggcaattgggggaaatttaatcttccttttttcttcagctgtgacttatgtattatgtttattttaggcgtccgtgagcactgttcaactgtggatatcgggaattctggccattttgagggttctgatttcccagtcaactgaagatattgttctttctcgtattcaggagctctccttctctccgtatttaatctcctgtacagtaattaataggttaagagatggggacagtacttcaacgctagaagaacacagtgaagggaaacaaataaagaatttgccagaagaaacattttcaaggtatgctttctatctgagcctataactaacccatgccttttgggaagtcacgtgatgtttcacagtcagtaagtctggaataatacctggtcttgcttcacttctgagttgggtaaagaagtctgtatcagtgtaattttctaatccgtcctgcattatctatggctcttggttcatacctgtcttgaagttctgtcatgttctgtctcttgtcctcagtagagatgctacagcagtggctcgcctcaggcagggcagggcagtggggtggctgtcctgggggcaggcagtaggggcacgctgacgtcagggaagttgaaacccaagagaagccagtaaaagtgagtctcagattgtcaccatgtgctggcagttttacacgctgtcagtaataaaagtcttctccctgcagggcagcctgcctccaataaatacgtgtagtatcaaatcctgtcttccctcataaattgtttggaagctccccaaggacagtgatgaggcactcgtaagtgcttgctgcctagatgggtccctctccacctttgctagattctgagcattcactgagttagagctgcttctgcaaatgtgctgcttctgctaagtggctgtgacttcatgcagccttcacttggtttgtcatcagtggagatgccctgtgttgtcgaaggagataagcccagtaagcctgctgggcaccttttggtttgcaggttcagcaggcagcccatggctttccctgtgtcgcattgaagcagctggctaaaattgatgatacattaaattcctgtgacagatgatcagcttgtatttgtgtaatggtgtacagttcacaaagcttaaaaaaatgctacctgccatttcatcctcagtgaggaaggtgatacacagagagaccaagtgactgtgtccacggcgacggcgctctgcatttcactttagcggttaatgtactctacctatatttttactttatatttaccatatatcttttcatgtatacttggcgtaagtgctttatagtagtcacctaattcactgtcatcttttttgtttcttggaaggtttctattacaactggttggtattcttttagaagacattgttacaaaacagctgaaggtggaaatgagtgagcagcaacatactttctattgccaggaactaggcacactgctaatgtgtctgatccacatcttcaagtctggtaggtgaatcacattagtcttcctggagtgtctcgttccccattctgcactatacactctcagagtgtaggagctgtgctgcccggtagaaactctgccttgcccagtgtgccagttgaaaatatttgttgctgtaagagtacacctgataccatgtgacccagcagttccactcttgggtatatacccaaaagaatggaaagcagggtggtgaaaagatatttgcatgccagcattcatagcagcattattcacgatagctaaaatgtggaaccaactgaagtgtccctcgatggatgaatggataagcaaaatctggtgtatatttacagtggaatattattcagccttaaaaaaaggacattctgacacatgctacaacatgggtgacccttaaggacattatgctaaatgaaataagccagtcacaaaaggacaaatactatgtgattccacttacatgagggacctggagtagttaattcatagatatagaaagtagaatggtggttgccaggggctgcaggggaggggagttatttttacaagatgaagagagttattctagaaatgaatggtggtgatggttgtataacattatgaatgtacttaatgctactgaactgtacagttaaaaatagttaagaggaccaggtgtcatggctcatgcctgaaatccaagcactttgagaggccaaggcaggaggattgcttgagccaaggagtttgagaccagcctcagcaacatggtaggaccccatctgtacaaacaaactagccggggatagtggtgtgcatgtggtcccagctactcaggagactgaggctggaggatcgcttgagcccaggaggttaagtctctagtgagatgtgttcatgccactgcactccagcctcggctatagagtaagaccctgcctcaaaaaaacaaaacaaaacaagacaagagccaaaaatggttaagatgggccaatcacagtggcttatgcctgtaatcccaacactttgggaggtcaaggtaaaaggatcacttgaagccaggagcttgggaccagcctgagcaacatatcgagacccctatctctacaaagaaaatcaaaaactagctagatatggtgggcacatgcctgtagtcccagctacttgggaggctgaggtgggaggatctcttgagctcaggagttcgaggctgcagggagctattattgcactccagcctgggctacagaatgataccctgcctcttattaaaaaaaaatccaaaaaaaaaaaaaagtaaacctgagagcttcctcctcctgtgttaaatttggaggccaagatgtttttgttacttttacaaatgatcaaggacggtgaaggttgggcatggtagctcacacctgaaatcccagcactttgggaggctgaggcggggtgatcgcttgagcttgagaccagcctggacaacatagcaagagaccccatctccacaaaaataaaaaaataaaaaaaaatagccaggagtagtggcatgagcctgagcccaggaggtcaagctgtagtgagccatgatcatgccactgcactccagcctgggcgagatcgagaccatgtctctagagaaagaaaatgacaaggacagtgaacccaagaaagtcataagatgccagctgtgcagcaagcatggaaagcagccagtccaaattaggacagtgtgttttccaagaagaacgatcgtttgtaatgagaatgctttgctttaaataaatgactaaatagctagaagcctagttctaggggataggcacgtctttcttctctcaagaaaatagaaaggcaattctaatttctagtaacagcaaacagcattaagtcatggtccaaatatgaggcaaaccaaaatgtggcttgattgttcagcagttgatctgttggaagcccttgatattaaaaaggttctcctttaagcggcttaggagtcacgatcaaagacctatagaaagagatgccatccttctaggatccttggctctcttgggaactagattcagatagtcataatgtaaatactgcttgagctttctttctttctttctttctttctttttttttttgagacagagtttcactcttgttgcccatcctggagtgcaatggtgccatctcggctcaccgcaacctctgcctcccaggttcaagcaattctcctgcctcagcctcccgagtagctgggattacgggcatgcaccaccacgcctggctaattttttgtatttttagtagagacagggtttctccatgttgaggctggtctcgaactcctgacctcaggtgatccacccgcctcggcctcccaaagtgctgggattacaggtgtgagccaccgcacccggcccgagctttcatttttgaaatcaatgtatgactgaaacactgaagacttactgacttaattatggtttcagaacagaatgaaaatgtcttcggttctgatgaatataaaaggaaaactaaccaagttaatttggcaagtagatggtagagatagaggtggggagtggaaggggaactaaaatcttcacctagcattgttgggattatatggttacatcatctgaagttgacagaccaaaatatagaggcttcagaggtctccaaatagaactaaacatgtaattcagattgttaggaggtagtataaatgagctaaatctcatctttattacggtagagttaatgggtgatgtctaaagttgtctgaagtctataaatcatgacaaattatgatgtggtgattgtattcaacagtctttcagttgcagggataaaaccccagtttaaactagagtaagagaaagaatgtgttggtttaagctcctggaaagtgcaggcaagggtagttggtaggactgcatctagtgttgtaattctgtggtctgcattgtatatttatgcatctcagctctgctttcttcttttcatttatataatttttaaattttattttaaagatagggtctcactttgtcgcctaggctgaagtgcagtggcatgaagtgcagtgcgaggctcactctagcctcgaactcctgggctctagagttcttcctgcctcagccttctaagtagctgagacaataggcatgtaccaacatgcctggataggttttaaaatttttttgtagaaatggaagtcttgctgtgttgcccaggcgggtctttaactcttagcttcaggcgatcctcctgcctctgcctcccaaaatgctgaggttataggtgtcacccaccacgcccagtctcatctctgcttcctgtgttagttttgttctctggtgggctgttttcacatgaccgaagatgacctctagcaggctgtgttctcagcccctcaagtaggcctatgtgattggccttgcatgagtaatatgggtgaccataaacccctgaatgctctggtccacatgggccaaatgggagactggacagcattccattgatgaggaggtggggctggtctccgggagtaagggagaggagcacatgcagtaactgatggtctgctgcaagggatagcagcacagcagttagaattttggaggtaactaccagaactgaaaacagaaatgataacaagtagttgccttaaaaagggatgggagcagggtgcttttgtgatcaaagctcctttctcttactggatttttgtacacattttgcatacatatcttagagtaaaagatagcattttcagccttggtccatttgaggatactcttggcgtggcccgcctccatgctagcaggctctggttgtgccaagttcagttgagcatcctggctcttgcctgcacggaacttccagtcagtgcgtcagtatcacaagtcttgatatttcctatgaagaagaacagtagtgcagtgacagacgaaatgggtgggcaggcagaggcaggatttctgagggagagaagtagctagctttttgcagagaagagttccggcacccaagagagcagctgagagtacaggcaggcaggcaggatgccggtagggcccggccgcacggcgccacagaatcctggagaaaggggcctcttcatggcctctgcattcagctgctgtcaccctccgcacaggccatggccaaaatttaattttcatagtggactctagtttttgagccttacttgctattattgaaataattttcttgtttctttttaaagatcttcggattatgcttcactgaccactgtaataagtttaaagttgagaaaatatggcttgttaatgaatgataggtcaattttagtatgttggtcattttaatattttgccaccagttggtttggatttgatgccaggaggagacagcctcatttctaaggactagtcttgcctttgtgggataagggtggtgtgttctgtgtccttctacatgtccgagcgatctctgtgcagctcaaatgtggtcactgtcttattgcgctgatttcctctccttccatctcacaattgaggcaaaatattgttactgttgaagtgttgtccaataggacttccagcagagacaggatgtctgcactgtctaatttagttgcctttagccacatgtggtgttctgtacctgaaatgtggctggtctgattggatagcttaatttataattttatttaattttaattaacttaaatttaaacagctctgtgtggatagtggctcctgtatgagacagtgcaggtctgttgagaagcagctttactggtgggagtggagggcttggagagggcacgtgggtttcctgctggtatcttttgaccttatttaatctgcccaacatttgcaagtaagttgtgtgtgtgtgtatatataaatgtgtgtttctgtcttcttgtttcctttgactgcatttatttgaaagacactaggtggcagaattactgtatttgattggtttcaagataagagttgaaataattcatctcgtgtttttatataagtaaggtgtgtttagcatgtaaaattggtaatatgtattcacgtactgcttaaacaaaggctatgaattccacccataaaccgaaaatgaagacctttaaatttgtccatttcaggcgtgggtacttcttaaataatacctggttcaggaactagtcagaatggcacccttgactttttgtttcctgcttttcctcttgttgggagaggagggtattcatcccaaagtggtttgcctatttcacattccatctaggataagcagaatagccaagaaagatagctgtcctcctgtttacaacatttggggtaaccagcatccctctcttttggtccaagatagactggtttagaaacagatgatggcaccagaggcccaggaggtggaaacatcagctttgtttgttgtccatgtggctgaattagagctgtctggccttgtagcctcaacacggccttccagctttgctcaccgtgattttcaaggacacatcttgtgctcttccctgcctgccatccagactatacccagtcagggtggcaggagctgctgccccttcctccctgagtcctggtcgtgggtggtggagatgtgccatgacgctcacggaggcatgctcaccccttcctctgtggcagaggggatggctgcacgacagctcttccctgtcctttccaaagcgtctgtggttccactttttggggcaaagcaggaatactggaagagagagaaagtggtcctttctatagtaataaagttgacattgattcaagttcatgcttggggaaaggacagggctactaacaattataatgctgggagcaatggaattttctcatgggtatgtggtaggtttaattttaattatcccagttaattcttagaactgctctgtgaagtatttcccgctttgtgcttaagttctaaaagatcctgtgccaaaaccaagaatgaaaacccaagcattctttcttgcccatcgatctttctctcatcaggccacttcttgggttgatagtggtgagtgtagccgctgccactttcagaatacccaccatgggccccagtcactgtgtggcgtggagaagagatggttctctctgtgtcatagctgaacaagcccagcccagagaggtttctgccctaggagctctcgatggtggaattgggatgcgatcccacatcctgcctgttttgaaaacagcattctttatttccaattcctgcttccattgttccttttaatatttctttgtttagctcacaaaaacacggcttgcggagctgctgcgtgcagctgtagctgtttctctgggtgcagcctgcatccgccttcctgcccgcctcctttcctgcactgccatcgtggtctccgggcacttggtccctttctcttcccctgagtccctttggctcccctgtgccacccttgtgatccacaggctctgccttctttctgtctcagactgctgctcatcactactcgggaccctaggaagggaggttccaccgagaagcatcttctcatctcagccacgttctcagtgccactgttgtctttgttaggtaatggtagctactgtaacaaataaaccaacatttccatggcttcacaccagagaaggttgtttcttggttttatgacaatgtattgagggtgttcttggttcacggatggttttcctccatgtgggaattcggggacccaggctcctttccttcttttggttctgttctccaggccttcacatcctctgtgtctggttggggacaaggagagggaaggtaaagaaggctttgtggccttggataagtgacaggcatgcctttgctggtgttctctcgtggtgacaggtcacagccccaccctgtaaaaggggactgagagacgtcgtcctgctgcttcccagcagcagcactgtggtctctgatgtgttttctgtgaggataaaaacaggtgattccaggatgaggaaagtcagggaaacccttggaaggaggggaccaggcgggtgtcaccatgggattagtggtggcttcagaatgagctgcagcgagtgccatgccttctaaagcttttgctattctgatatgcccacaccatgcccagcaggtgtctgccttgctctccgcagagagagtgatgaatccttctcatgagcctctgtccagttgttcctccctccacctggaagggaccctgggttcctcataacatcccagcggaacaggggaccttctatcctgtccccaagttcatcctcatcctcctgccggcttcctggcccctcttatgtctgcttcctgacgccacatccttctggattctctggaattgaattttgcctttgatgcttatttaaaaatatccattgcaggccaggtgtggtggctcacacctgtaatcctgtgcactttgggaagccaaggtgggcagattgcttgagcccaggagtttgagattagcctgagcaacatgttgaaatcctgtttctatagaaaatacaaaaattagctgggcatggtggcgcacacctatactcccagctactcaggaacctgagacaggaggatcaattgagccccggaggccaaagctacagtgggctgtgatcgtgccactgtactccagtctggtcaaacagagtgagaccctgtctgaaaaaaaaaaaaaaatccattgcatacttcaccgtagcgaaacatgtatgtcttacctttcctttcctgcctgtagctgctcttttacacttaacagccacactaagccagccttaaatgaaaaacaaaccagcacttcctgtgccctcctgcttccttcatgaggggtccctccctctgtgtacactccattctcattgcccatggtggtttgtttccctcttgtttctcaagccatggcagcctgcctcttgccctctttactaaaaaggcctttgcagaggctgcctgtgttctttctttctaggtctctctcatcctaggccctccagcttgattctgtggagctgccctcttgtcactcagtagcttgtggggtcttctctgtctagccacttaattgattgtgttcctcgagttgctgtccatggtctctcgttactgttttctctgtgtttctgcctctctccttggccttggtaggtccatcccctttgtgaccttggctgttgctctcatggacaactttctcttgctggtccttgtagtcctggcatccagcttctcgacacgggacttgtcctgccagtacctcagacttgcacttaaaattgaactagcaccactgtcactctccagggcctcttcttgttaattagatcattagggatgttcagaatcccagcatcatagtatgttcctcctcccgctaccccaggaaccctaaccttacctcctcctctctatctactaggaggtggccctcagagtccgtctcatcttccacctgaacttccctaataggctccagcagctgccaccccgggggctgagtacttcctccatgccttgtgcagtgctgagccctttacctgggttctcctgtttgctccttattacagccctgcgaacagatactgctcttaattccatcttacacctaaggaagctgaggccccaggtaaggtgcatccaaggtcacccaggtagtagacagtagagccacgatctgaaccaggcagtctgattcagagcctgtgttgacactcagccacctagaacacagcttggattgtgggtttctattacctgttcaaaacccctacatcccgggtctgtccctgcacgtgctctgtggcctggctgcatcttccttgaaggcagtgcatgcctcttcactcagggggcccatgcaggaacagagggccccacagaaggatgaggccagtgcagaatgggctggaggggacaatgctgaccaggaagcaagtgtagagaaatcccaggaaacctggaggagccagagacaaggcattagaactcctcgtcgtgacctggtctgcattctctgagtgtgctgcttctgttagctcgcttccttggtctcaggttatagtttaaggcattgtggagccctaaaaagcctgtactctgtttttacctgttttaggaccctttcactttggggatgtgttgattttttttttttttttttttttttttttgagatagagtctcgctccattgcccaggctagagtgcagtggcacgatcttggccactgctgcccctgcctcctgggttcaagcaattcttgtgctcccgcctcccaaatacctgggattacaggcacccgccaccacactcggccaatttttgtatttttagtggagacagggttttaccatgttggtcaggctggtctcgaactcctgacctcaagtgatctgcccaccttggcctcccaaagtgctgtgattataggcgtgagccaccacacccggcctgaaatttaaatcagaaataaaattttgatcccaacagtgatgccaggcagcccagatctgggggagagggtggccttggccagctgggcctttctctgtttcccaagtcttgctgcctctccctgctgggctttgcagcctgtgcatgtctctgtgcctttgaccttgtttatccaaaggagaggatagaatgaagtcatgattcctggagccctgagaaggatgctgtggagaaatttgccggtagaatctagctgagtgtgttgctgaggtgccagcattgtgtgtggggaggctgaccgcttggcctgcctaggcccaggatgctccatggccgggcacagaggccacttggctgtcaggtgtcaggagcctgcagagggcacacagagcctggaccgcaggggggtcctgctttctcacctggcctccttcagcatttctgtccctcagtccttagcaagcccaggagctgttgagtttggcaggtgccgagtgctgttcctgcctgtgtagctgtggctcagtcctgtgggggccccgctgtggcccgagtgcagtgattcgaggcgctgagtgttccctgactccttctccaggagctgtgttcagactttcgcagctcttggcttggagctcctggagggcttggcattgccgaccaatgtggaggtcgacagtgagagaggaggaatgctagctttcttgaccagtccattaaataagtgggatattggccaggcacggcggctcacgccttaatcccagcactttgggaggctgaggcgggtggatcacgagctcaggagttcaagaccagcctggccaacatggtgaaaccccctctatactaaaaatacaaatattagctgggcgtggtggcaggcgcctgtaatcctagctacttgggaggctgaggcaggagaacagcttgaaaccggaaggtggagtttgcagtgagccaagattgcgccactgcactccaacctgggcaacaagagcaaaactctatctcaaaaaaaaaaaaaaaagtaggatatctgtttctgcttagaaaaatcagaattttctaaatgccaggtgttctgaatacgtaagtatgggagacgactcagcctgtttcatttttatgtaaaatcttcgcgtagccatgtggcactggaccgagatgaaagcaaagacatttctccttaactttgtttctaggaatgttccggagaatcacagcagctgccactaggctgttccgcagtgatggctgtggcggcagtttctacaccctggacagcttgaacttgcgggctcgttccatgatcaccacccacccggccctggtgctgctctggtgtcagatactgctgcttgtcaaccacaccgactaccgctggtgggcagaagtgcagcagaccccgaagtaggttcataatgccccacagcccagggcgccagcccagcaccctgtcctgagactcccagtaacctgagctttggccaccgttaaagcattttcattttccattttttgtgagggcttgtgaaatttctgctgcatattaatattcctttcatggacagcatattattgggacaaacatgcggtccagctaaaggcattcaaaatagcagttgctttctaaatgcgattttctttggcaggttctttgacaccattgcatcttgtgggatatgcttgtcatgctctgtggctcctactaagttctagtccttaaattggttccatagccagacatgttgcaatgtcttaacctcattataaagtaaatgtggttctggttatccttagataatgaagtaacagtgtagcaaatttcaaaacctcttggaaatgttattttaccattcaaaaaggcttactaaggttctcgttatgggtggccctctttttgcaaaaggttttcaggcttaagctccatttctaggtgctccaacactccattatttgtatatgtatggaaataaaagctgtgaccacccccaaccctggcccccgcccagctgaatcctcagcacagtatttctggaaggctcaagatcccacgctggggaaaagaagttctggagacaaaagagggcaggtgctgccgtgcctctctgctcagtatggatactggaccttgtgctgccagggctcccagtagggccagttcatggcactcagctggaaagtccactgttgggaggcattcttaaccatccactctgtgccgtatgtagtggggtctggtcattctgttggaggagacagaccagtgacgacatttgaaatgcttggtggatgtcttaggcctgttacgatgactgagcactgtgggggcaggagacagaaagtcagtgtctcctagttctgtgctgctttaacgtgcatagaaatcagctgcggattcagcagatcactccttttctgacagatgggcctgcttactctgatgttatatcagaaagctctgaatctgggaattgtgtcccctgaattggagtaacagaaatgcttagatgatgagtgtttaaaagaaataaaccaaaggtaaatttagtttggaattcagcaagcgtcttcattcagccctctgagggcaaactacagctttttgtaaatgtaggtaaattctgtgactgtttcgtgaccccctctgatccagttttcctttataaccttctgtattgttccttctattatcctgaaataacattaatagattaggctgggcgtggtggctcatgcctataatcccagcaccttgggaagccaaggcgggcagatcacctgaggccaggacttcgagaccagcctggccaacatgatgaaatgctgtctctactgaaaataacaaaaattagccgagcatggtgacaggtgcctgtagtccctgctactcagaaggctgaggcgggagaatcgcttgaacctaggaggaaaaggttgcagtgagctgagatcgcgccactgcactctagcctgggtgacagagtgagactccatctcaaaaaaaaaaaaaaaaaaaaaaaattaatggatcaatggatttttaacctaataattaaatttcaaaaaatatcgttctttaatggtaatgtaaaggtaaaattaagataatatgtaacaagcatgtgagtgtctaaggtgtccccgtggtggaaggaaaaaataaatccccataagtgtccaagatgcccatagagagcagagctgttctggtttaaacccctgctcttagcactgtgtttttccagctgtgggtggtgggggatgagtatctttttatttccatgagatgagaaaaatgaattactagaagtgtgaaatacaaaacacagctgctctttttttagccatagactcagcagccataaaattgctgtatccagttgcagaaattcctgctgcttactcttgaccctctctcggtttgtgtgcatctcctctcaggctggctcccagatgggagctggctccaggcgacactgggtgctctgctccaggaggtccttatgtgggtcctgccctagcctagcccctctcttatggactctgtcactgtgggtttatgattcactctcaatctgtcttacctcttggtgaactgttagagtcctgcctatactttggcgcttgtgggtgtgttgtggtacacatgatgtgttggtcacttcccagctcatcttgttctgagtcaccctagatttgggacattcattcgccaccagtaccgggcggtgtatggcctgagatttgggggggcttgtgctgctacaaattggggctgaatttgagttgacagtggaccttctttatgtctactgctcatatttgaattgcaaatactgcctcttctctttcagaggctcattaccctatagctgtattattgcaaagtgcacaattacagcttgagtgtaagtcacactgcgctggcaggacggcccactgagaaagggcacgtttcctgttcgttagttttcacattgacacataatttacaatacagtaaaatgtacttttctatcaactgtagtcagtaacagcccccctcccccaaccacatcaagatatagaggagtgctgtcacttcaaacagttccctcttcctctgccacatcctgcccctccccaggtctaaccaccaatccgtgctctgtccctctgttcagcccattgcagaaggccatagaaatagaatctataggctaggtgtggtggctcatgcctgtaatcccagtattttgagaggctgaagtgggaggatgacttgaggctgggagttcaagactagcctgggctgcctagcaagaccccatctccagaaaaaaaaaatttaaaaattacaatcacgtccctgtagttcagctgcttgggaggctgaggcaggaggatcacttgagctcaggagttagaggttacagtgagctatgatcgtgccactgtgctccagcctaggtgacacagcaagacgttgtctctggggaaaaaagaaagaaacggaaccacgcggtgtgcagccttctgagtctggcccctttcggtgagcagtgtctaaagttctgtcgcgtgttgcccacgcgtcggtggctcgctccttgcaactgctgagcattgtatggctaggctgtagtttgttttcacttcaccagttgggaaacagagaaaaggcactttttaaaaagtttaaatctgtagaattttggtttttaccagttctcttctaaatcctgagggattacaggaaaagttgttgtatttcagaatattcttagcttgatgtgacctctgtccccgttaaggccctttgccgcaatgggaaggacgtcgctcggtcagaccctgaaggtcagaggggcagtttgggagtgtgtcaacattttaactgtatggactagagccaagagtctcaaggtttataattcccacgtattcaaaaagaaaaaaacaataaagtgagaagtcagtgtagagtgaaataacctgtgttagtggggaagaagtgtttttaaacaggatttccataacgtataacatcaacatgtttagagtggtgatgtttcattgggaaacgaacagtaaaacatgaaagcagggaggttttcattctggcagttggcaactttcacggcagatggagaatttcaaaagcaattgctcaattatcaaacatagccagtgtgagttctgaaataaaggtgctgattgaatgtgcagctttatggtggattttgctattcaggcaagcattttaattttctgcctgttaaattctgttttctttagtttttcatatgtggtttattgtagcttaggaatagataactgagagtatatattacacatacaacattctgatatggcaatatttaaaacaacttgtctgttttagaactagaattaaacataatcatcttcagtattttgcaaataagctcactgccatccagaaacattgtcaatgcatctgttgctccttctagaagacacagtctgtccagcacaaagttacttagtccccagatgtctggagaagaggaggattctgacttggcagccaaacttggaatgtgcaatagagaaatagtacgaagaggggctctcattctcttctgtgattatgtcgtaagtttgaaatgcctgtaaacggggttgagggaggtggggaccaggagaacatcctgtgtagatgacacttgcatggaccctctggaacccagaccgcccggtgtcctgccaagctccatcgaaactaaatctagaatgaatgtttacttctgctgtgacatataattggagaccaggcctggccttccagtcactggattctaagttggactgtgagagtttttgcagctgactcatttatcaaatgcccggctattggctcacgcctacatgatgctgggtatgtttgttaatttgagggaagcaatggaataataataactaatgatttaaaaaacaaagtaagtgcattgactgtagtggggttctgattttaaatttttttaaaaattaataccaggagcagtggcttatgcctaaattccagcaactcgagaggctgaggtaggaagatcacttgagcccaggagtttgagacaagcctgggctatggtgtgagacacccatctctaaaaaaataaaaaataaaaaattatccaagtgtggtggctcgtgcctgtaatcacagctctttgagaagctgagggcggaggatggcttgagcctgggagttcgagaccagcctggcaacacagagaaaccctgcctctaccaaaaaaagaaagagaggaagaaagaaaaattagcctggcgtggtggtgcatgcctgtggtcccagccacctgagagactgagaagggaggattgcttgagcccagaagtttgaggctgcagtgagctgtgactgtgtcactgcactccggcctgggtgacaaggcgagacccctgctctaaaataatttttttaagttaatttgtagaaaaggtgttagatgttctttgtcacattttatgatggattcctgtttaaatgccgttctctttaaagaaaaaaaaataacttgtgggagtttttaaccataaaactagcatcacatatttaccatggagaatttacaaaaaaacaaataaacggaggaaaataaaacctcctgtaatcatactactcagagataacttgctgttagattttggtctagatttaatactttttctatatttatattaaaaatatttaaaacatatgcatttctttgtcacaaacatggtatcttatagatactactgtcacatagcaaaacagtgttaaatattctgaatcagaaaaggaagccgactctccaactgaaagaggtgttatcctagagactttttctggtgatgacaatttattaatagtcactttttgctttactttctctattgaagtagtttttctattttgttctacttttaaggataatataatttataatgctgtttttcacagaaatataagaaaaaagatactaattttataagttaataaagtttgatcatcccaaatccaaaaatctgaaatccaaaatgctccaaattctgaagctttttgagtgctgacattatgttcaaaggaaatgttcattggaaggtttcagattttcggatttagggagctcaacaaataagtataatgcacatatttcaaaacctgaaaaaaatcctaaattcagaatacttctgatcccaaacatttcagataagggttattcaacctgtactgtcagatgatcccaaatgaaaaatattaatcgttaaccaaatatcaaggaattgatcacattttacagtttctgcctaggattatgaatcaagatgaaaaggctctgcatgtttaaaaatatatatttttattttcttataaatcttaaatatctacacttaagatttatttgatatgtgggatccattcatattttggattcaacagttctgtcaaaactgtggcagtgataggggattctttttttcccactgaactatcacaaaattggaaaaagagtaattggagaaccccactggcttagccggcccgaagcccgggagagggcaggcagtgctgtggatggggtcatcccagcgcaacgctgcccctgctacctgcggatctcgctgaggcctgcctttgtcctttgacccttggccatttgttagtgtctctgagagctggactgctgtaccctacttccccagggggcctaacttcacacagcctctgccgcagtgcgtggttggaggtgacggccttggtaaatcgagtttcctacctcctcaattatttgtgctcatacactgtatatttttagtgaggtttatatttgggatgtgttttctccttcttaccctttctggcctttctatggcattaatacctggtctcttcttgtgtacttgaaaatgaatctctcatcatatttttccttagtgtcagaacctccatgactccgagcacttaacgtggctcattgtaaatcacattcaagatctgatcagcctttcccacgagcctccagtacaggacttcatcagtgccgttcatcggaactctgctgccagcggcctgttcatccaggcaattcagtctcgttgtgaaaacctttcaactgtacgtcttcatcctgccgactattgccagttgcagttttccctgccttaaaaatggagtattgaaatttttaactttaatttctgatttgcaaaatagtcatcttttgttcttttccttcttgctgttagccaaccatgctgaagaaaactcttcagtgcttggaggggatccatctcagccagtcgggagctgtgctcacgctgtatgtggacaggcttctgtgcacccctttccgtgtgctggctcgcatggtcgacatccttgcttgtcgccgggtagaaatgcttctggctgcaaatttacaggtattgggaagagaaaccctgatattgatttatattgaaaatttagcaggccaagcaaaacaggtggctggctttttcctccgtaagtatggtcttgacatggtcaccgatagaaacatggaaacatctgcaaacttgccgttactcgtgtgtccgatctgactgtttcttgtatttttttctagtctgcccttactaggatgaactgtacacatcagttcatcctttttaaatgagcatgaggttattttgggttgttaggtgttacaaacacactaatgtgtttttgtctattagagcagcatggcccagttgccaatggaagaactcaacagaatccaggaataccttcagagcagcgggctcgctcagaggtaatgctggaaacacaggtcgtccttgtgttaggacaacccaggatataaaggatatagatttgtacgggaataaattcacaggacaagaaatcgatgtgccttataggtgggtttactgcagaagtgccataatagaaccttcctacttttaaaacaaccagatctcactttctaaagagtaaaggatgaccggcaggatcacgtctgtgacgtgagtggaggcagtttgcactcctggtggctgtttgagaggtagcatttagaatgcctgtattcactgtcctgtgatgagtgggaaaataggttatcaggtttatcttagcaaaatcaaagcatgtcatctaattgctaaacaagagttggcaaatctgagagacattactcaatccttggcatgcaggacttacatctgcatcctgttgccattttatgtcttcaaagcatttaatcatttagttgtgtttgcaaagtctttgagaagcctttgtcagaaatccctacatctcctatgtgagtgtatttccatgactgcagaataagttaaacttttacctttttccttcccttgcggggcggggtggggggcagggattgtgtgtgtgagagggagagagagacagcagagaaggagaatataattatcatgctgtgtactttgagctgaaactgcaaaaaaggaaaaacacacaaaaattattatgcttttcagtctttagagtaccttgtctattatgcttttcagtctttagagtaccttgttgatggtgtttttaaatgggattgggcacaattaggtggacagtttgggatgatttttcagtctgtagggccaagctcttttgtaatttgcattatgaagttgtcactctcatagcagatggcgggagataaactattattactttttgaccctagacttagtcttcagtccagatgagggagattaaaagattataaatatcttgtgccagatgaggtgattttattttgaaatgaccatgaattcctatcagttgtcttactgggatatttgatagtggaatttgtgcatttgagtcttagatgatctgttttacatttattaagaaagcctttattagcttttatactgtgtattgcctgttgcagtgtttgagtataaatgaaatttctggaaaatattaatggagtacaaactgtgatacttaaaagtaaactagggcctgcatttgtatcatgacctgtttgagtattgatgagaagatagctgtgaagaaaaaggtttaaacaagtgtattttcctttaagaagccactaatagtgcatctccttagagtgtatatttctagaatcctagtgtgcagagtttagactaagactaaaaaaaaaaaaaaacaaattatactgtaatttcatttttatttgtattttagacaccaaaggctctattccctgctggacaggtttcgtctctccaccatgcaagactcacttagtccctctcctccagtctcttcccacccgctggacggggatgggcacgtgtcactggaaacagtgagtccggacaaagtaagtgtccagcgtgtctgcatgggaggcacagggcgctgagtgcctctgtcacctgtggcagatacagagagtgcagaggaggtgccgtggacccaaggagttctggcgctcggctcggctcagtgaagctgtggttagagacgtggggggccatcaaggtctgagggagccaagcagtgctgatgtgggacccttttggtaggagtgtggggtgagtagttagtgggtgaatcaaggaatagtcggccgtggcctgcaggcccctgactgcacaggccttcaagcacatgtcaatgccgttagcctccctccatctcctcataccttctggccacctgtgagttgcactgccactgccagccattctggtatgttgtcagcacctccactgctcatacctcatggttagggaccacctggagccttggtagagccttggtagagccttggtactctactttcctggacaaagttcagcttatgaatatgaatttagatttcaaaaaccagcagcccaagtataagaaagcgaaggttcagtcctgccttcttaggctctattcgctaagcacctgccctgccctggttgctggggagagatgagtaaagcagacaacccaggagaggatggcaaaggggccgctaacccttagtggtttagctatatttggaaggcctattggaagttcaccaggtgaagggggaggctgtgagggtgcccaggcaggtaacagaagtccaaaggggaaaacctgtggtgtggtgagccgtatagccacagcctgccggccggcagccctctcagcctagtgcggtgttcccaagcactggcctaggcctgtagctccagggatgtgaagtccccttgaacgccgcccatcatgttccccttatccatttttttcttcccaggactggtacgttcatcttgtcaaatcccagtgttggaccaggtcagattctgcactgctggaaggtgcagagctggtgaatcggattcctgctgaagatatgaatgccttcatgatgaactcggtacggggggagcagtggaggcaaggaatcctcagcttttcttgtgacttccaagtgggatttgtctcatcatcatgtgacccacttgttgacaacacatgttggggactccagtctgggcagggacgggatgtcggagagactccactctgaatggggccgggaagtggggaggactccatttcagatggggtcgggacatgggggttatgctgatcgagacagaaaagcacattgtttcagccacattagaatccacggaggtgttgttttgaaatccagctggccccaaggctgggtgtatggtttgggatgagaactatctggcctccactggaggaacaaacacaggatgttatcatctaagctccatggccaagacagaatggaagtcaaggttgcgtatttgccgtagacttcaacacagtgtcgtaatgcgtgacgtcaataacttgtttctagtgtcttggaagttgatctttagtcgtaaaagagacccttggatgcagcgagatttcctctactcacacctctgttagatgtagtgaggttcttcaccccccaaccccagatgtcagagggcaccctgcgcagagctaggaggccatgcaaagccttggtgtccctgtccctcacccgtgggcaggtcctgtgagcagtgggggggccacctcttgggtatggtgcagccatggcccaagcagggcttcttctcagacctactaggacgggagaaacctcctggtgctttagccctgcgttgatatgcagcaaatgggagggaagtgggcacctgggaggacaaatgcctgtagaggccgggagtgacggcaggtgttcatgaaaagagaccttgtggggagggcaacacaacagtgtgttctgatgtactgaagagctcaactgaaaacaacaggagaattagcccaaaatccatttactaaaattgtttatctttttttttttttttgagacaaagtctcgctgttgtcccccaggctggagtgcaatggcgctatcttggctcactgcaacctccgcctcctgggttcatacgattctcctgcctcagcctcccaaatagctggtattaacaggcatgcaccaccacgcccggctaatttttgtatttttagtagagacgggatttcaccatgttggccaggctggtctcaaactcctgacctcaggtgatccgcccacctcggcctcccaaagtgctgggattataggcctgagccaccacgcccggcctaaaattgtttatcttaagattcatgcagtgaaagctaacttactgagtgataaatttgcttagtgatctgtttattaggttttccaaatttgctaattgggctttgaacagctgtaaaagttctgactgtaaaagaaagcttcaacttttggcattcatgatgcttttctgagtattaaactaagatagatgttttacctgaaggatcggccaccaatctttaaatggctaaacaaaagggttgctaaaacataatccaaattgacataagaaataccatttttccaaccaaaattttggcattcatatggctacttttacgtatttcagctgcatttgaacatctttttcaaactttagggtggttggtgtatcactgaggtcttggatgacactttagctttgattttgtttttatgaattaaaattgtcataccaaaatttttatttcaagcaaatccaagagcataaaaaattaaaatattacttaaaatactaagagagaacagatatatattttactaagcatatgttgaatgaaattgttcaaatatttataacaggcatagagtagaattttcttaaaaatatttttgatggtataccaatttgtattttctcagaaacatttgccttattcttttttctgttgtgtttttcttacctgattgaaagctcataatctgttgttattgtttgttaacctttaatgctctgatttcaggagttcaacctaagcctgctagctccatgcttaagcctagggatgagtgaaatttctggtggccagaagagtgccctttttgaagcagcccgtgaggtgactctggcccgtgtgagcggcaccgtgcagcagctccctgctgtccatcatgtcttccagcccgagctgcctgcagagccggcggcctactggagcaagttgaatgatctgtttggtaattaaaattaaaatttatcttatttttaaaaagcattccagggccagtatagtactttgcaccaagtaaatgtacaataaaggcagtggatctaatacattgaaagcgtttacagaggtagctaaagagcagcacgggtgtcctcggctcagaatttcttcctgtgtgtttgccactttgccattcattgacatggtcatggacatagggctctaagcccttgaggaaggctgggccagacctcaggggagatgcagccccaaaccacgtgcagtcctgtggacggatgtgtagatgtgccactgaggaacaatgtcttgagctttcatcagattctcagagaattgcttgactgcctttcgaagttgatgcatctgtgctcacgtttgcacccacccacgaggtccttctgtttcaggggatgctgcactgtatcagtccctgcccactctggcccgggccctggcacagtacctggtggtggtctccaaactgcccagtcatttgcaccttcctcctgagaaagagaaggacattgtgaaattcgtggtggcaacccttgaggtaagaggcagctcgggagctcagtgttgctgtggggagggggcatggggctgacactgaagagggtaaagcagttttatttgaaaagcaagatctctgaccagtccagtcacttttccatctcagcctggcagtaagtcttgtcaccgtcaagttattgtagccatccttcaccctcacctcgccactcctcatggtggcctgtgaggtcagccaggtccccttctcatctgcacctaccatgttaggtggatcctaattttagagacatgaaaaataatcatctggaagtactttatgtcttaagttggcctggacatgtcagccaaggaatacttacttggtttgtgttagtgcttgtaattcgcccccagaatgtgtacacgttctggatgcattaaagtctggcctgtatccttaaagggccatcgctgtgctgcctgccctcagcaaggacacactttgcagacccacagaggctccgcctccacctcacaccaaagaaagggaggagtccaaagggcatcagtgccattactcacaaaatgataaatacacccttattctgaaccacgtggagtcatatggtttgtgatccctgtccttcaggtttcagcttagtggggaagtgggaaagtcagcgtgtgatcacagcacagggtgattgctgctgattatattatgtgcctgctgtatgcaggatgaaatactttatatgcgtcatcttatttgactctcacaaccccctgtgagataggctctgttactcccatttgacaggtgaggaaagcaaggcttagagaatttcagtgacttgcccaggtcctctgagctaggaagtagccattctggcatttgaacccaaggcctgctatccctagaacccacgctctcaaattcaacctatgacagaggcaagccctggtgctgtgggagccccaaggaagagcctctggcctggtggccacgtagcccaggagagatttctacaggagcccacagcgctgaaggagagagaggcagcagagtaagggggctttgtggcagagaggggactggcactttggggaataggtgggtcaggactgaatgtaatggagccatgtcagagctgtccttctggaagggcaagggcacctggacgcgctgcccctcagtgctttggacggttccacaactgtgattcacacggcttccccaaacgaaggtacacgagtgggcattctgtgactcggtacttccctttaggccctgtcctggcatttgatccatgagcagatcccgctgagtctggatctccaggcagggctggactgctgctgcctggccctgcagctgcctggcctctggagcgtggtctcctccacagagtttgtgacccacgcctgctccctcatctactgtgtgcacttcatcctggaggccggtgagtccccgtccatgaacggtgggttcctatcatagttcctgtctgcttcaccatgtttttattttgtgctgcctgtttgccaggtactaagctaggaattggggatggagaggtagataaaatatgcatcaggaagggctgggccccatctcttactctccaatatattggagtctacactggaatttaactggaatttgcttttttagtcattttatttagattttgaagtttcagctttcatcaaaaatacctctaaactttatgtctctgtgatctttggtcttagctgttttatgtatttagtcttatatgatcataagattaataacattacattcagaagattatttgttttctgtcagagttaaaatgtttgtttttatactgcattgtaatattaacgtactgtaaaataaaagtggcttgttcttttcaaggaacagtatcctcaacaagggtcattagccacaatttttaaaaaattggacgtcatagtttacatgttagagggcgttttgaagctttgtatttttaaattaaatgttatagagtgatgttttcatgtttcataattgttttcatctgtgcatttgtagccaacttgaaaacaaagatccagggattactacttaaaagccagacttcttggaggttatagtgatgattttgatagtatcttgagccgtctcataataacctcagggtgagagatggccaacaggagacagtcgagggacttagaaatctgaatgaaatctgaagttcaaatcttcagacatataccactaaccaagagattggtacctcagtctagtattgtctgtttgtctaaaattggttctaaggaatctaggctagtctgtctatccctttcaacttttgtgaggctgcacaaatgtaaaatgttgaataaaaagcactgatggaagtgtgtagaaattcttctctttgttctgttgtaattttagttgcagtgcagcctggagagcagcttcttagtccagaaagaaggacaaataccccaaaagccatcagcgaggaggaggaggaagtagatccaaacacacagagtaagtctcaggacccatttttttcttacatgttgttcctccaggacttaaaaatcattcacagagacgtgcaccgcggtgagtgtggactcctggaagcgcaccgtagctccgctgtgtcctgctgctcctccctagctgtcagggaggctgtagtccattgctttgccagctcttttgtttccgagtgaacaccttatccgtacacatgcggctgtctctgaccctacagaccagctgggatgccactgggggagcgctcccttccccccgcacttcccacactctgcagttattctgagatccttgagggcagggaacaggtttgtcttctttgtgttctcagaaattaatgctcggcctctggtcagcaagcaacaaccttttgttgagtgataatgaataaataaatgtttcccacatgagtattcagtaacctcagtgtcaggttcagccatctgttttggtggatatttaaaagaaaattccgcttttcctacagaaaaaaaaaaaaatccaaatcccagtgatttaagccagttatagacttagacatatactacggcttttcatgcactttcctcccaattctagagtaggtattttactaggaaaatggtggcagtgcctgttgggaggaagattctttggccaagtgtcttttgttcttgccagggcccctaggctgctggggtgcttcagcttctttagcccagtgtctggtggggaatggcccctgttgcctgtcccacagaggtgggggtgcctcacctggagcctgtccacacattttacacagcacgcttacctggagcatcaggcatcttttccatgctctgtggctcaggaaacacgccttttcaatcatgagtgcaccagtgcttttgggctttttctccccgcttttgtgcaatcctggttgtggatggagttttcctgtctttagtcttctgcatagtacttttctcttctggttcccggttcaaggttttgtaattagagaatgacccagaagcaatggcattttaatgcacagccaaggacttctctgaatttgtatctcaaacctctgtgggtccttcaggcttcagtttgtgatttcatgatttcttgttgctacctaaggaatatgaaaacacccacctccctactctgcatcttccagccgagtggcacctcaggctgtggatcctgtgcttctgtggtgaggataagaatagtgccaaccgtgtggattgaaatcaatcagttaatccctccatgtaaagcacctggaacggatgacagtcttgttatgaatactcaacaaatgctatcatgatttttagttagatttccattgctttaaaacagttgagacatcttggcggtttgagttagagcaacgggccctgaagtgggttctgtttgggtgaagatgattatgcttattccccatggccctctttaggcaagagtgggaagctttctttgtttttttaatcacctcgataggacgttacttcttaaaggtcatccaataaatattaataggccgggcgcggtggctcacgcctgtaatcccagcactttgggaggccgaggcgggcggatcacgaggtcaggagatcgagaccatcccagctaaaacggtgaaaccccgtctctactaaaaatacaaaaaattagccgggcgtagtggcgggcgcctgtagtcccagctacttgggaggctgaggcaggagaatggcgtgaacccgggaggcggagcttgcagtgagccgagatcccgccactgcactccagcctgggcgacagagcaagactccgtctcaaaaaaaaaaaaaaatattaataaagccaactcgttagcgtggggcttaattgcttaagtccaatgagaagtccttctctatcctaggaagttgcccaaactgtagaatctcgtggcctgtgggtaatagccacgtaatacacactcactgcctcaacaaatcatattttagtaggtatgatattctagactcaagacaccattctgtggatcttcccaagggtgtgaagtgtccacagcgtctgccttgggagtttccatgcccaccagaaccatgccccaagcccctcaagcactctgacctaggaaagccagtgaagcaaggatgacaacatggccctttgatactagctgagggacagacacaggtcctgggagaccagagaaagacgaggggcagaggaggtgtcctaaaggaagtctgaggctgaggagccacaggatggcttccagctgtcacaggctgctgctggccttatcacagagagtgggccagagggctgggaaccaaggccagagctcaggttcaggaccattccagcaatcccagcagaaaatggggagaattgtatggtataggcggatatgaaggtagaatctgcaggccttcagtggccaactcagagtctaagtggattccacagttacagcttgagcagctggttgtaggtcatgctttctacactgggcatataggatgtgttttttaaaaagtcctctcttaaccgttgcttgtttagatcctaagtatatcactgcagcctgtgagatggtggcagaaatggtggagtctctgcagtcggtgttggccttgggtcataaaaggaatagcggcgtgccggcgtttctcacgccattgctaaggaacatcatcatcagcctggcccgcctgccccttgtcaacagctacacacgtgtgcccccactggtgagtctgctcgttccttgcagaagaccaagtacggtgaaaggcaccggtaggccctgggctgggcacacgtgagagggcgggacagaatccccgcagcccagaggctgcctgctgtggttctggtgcccactgtggttctggtgccaggctgctttcctcaggcaccacgtgtggaggtcgctagtagaaatactgggttttctaaaatgaactgaggccctacatccctaagagattagtgttagacctgattctagagcaactagaccactttgcttaatagcagaccagaaaccacaccccctcgagtgagtgagattttcctttggagataattcatgtttttctacacagttttgcagttgtcttcagaattggtttaaagtaggtgttattgccaggcgcagtagctcatgcctgtaatcccagcactttgggaagccaaggtgggcggatcacttgaggtcaggatttcgagaccagcctggccaacatggtgaaaccccatctctactaaaaatataaaaattagccaggtgtggtggtgtacgcctgtaatcccagctactcaggagactgagacaggagaatcgcttgaacccaggaggcgaaggttgcagtaagccgagatcgcgccactgcactctagcctgggcaacagagcaagactccgtctcaaaaaaaaaaaaggtaggtgttattgatcagaacccttgtttcagataacatgaggagcttagcttgaggagagtgagggttgatggagggggactgacttctgcccagtgaaatggcatcatctcccaccagcccgctgaaataagatgatggggcctgttccttagggcctgcagcatcctcaggcaggaaagaaaggccgacctggcagggtgtgagccagcaggtgtaggtcagggagaatggagccaggtcccagggaagaggcttgtggctgcctgagaagggtgcgtgcctgcctgtgtgtgtgtgtgcacgtgtgtgtatgtatgctggagagtctagggaggcttgctccaaggacgcagtattgtttgatcctgagagataaggattctgccgcagggaatgaaggtattccagatggcgggcttattccgaagaagaggccagtgcctggcggtgctggaagcagttgcagaacagggagttgtaggctttcctgggaagagagcagcaggggtgctggagaagcaggccacacttgctgcatggggttgctctcggccccactcttggtgcacagcgagtcactgtgggttcattagcatctggttatgagacagtaactgctcctttggaggggctcgtggagaccatgcaggagggcacggtcttgaggtcatgccgtccagagcacacctgaggataggccaggacgggctgcacgctgtaggtaaaattcctccagcaagctcttcactggcattgaggagttccctgagtgcggtcatctggaaggcagctgtaacaggcactgcagtctctccctgggtgggtaccagagaggagcataggggagcataaccgatttaaagagagggctttcctgtggtgaggtaagagattagctggtcattatcatagagccccctctgcctttgtgcagatgggctgtgggaatcctggggttccgttgggtcctttgtcacctcactgaaggcatgtaagctgagctggccagaccgtgagctgatcctgccacttgaacagcatcaagcctgcctctggattcttctgtgcatggcacttgtctgagcacctcacgcacagagaactggacttcagagtttacagaaataagctgtatggttcattttcatgcctgcttgccaataaacatatctgagctgaacctcattgaacgcctgcctttattctagcacagcacctgctgtttgtgggcgaggggtgctgtctctaactcctgcctgcttctcccagcactccctgagtggggtgtgccagcagcctcaggatgaggacaggaagtgggagggcagagcagatttgggagggccacttgatggggaaggaagtcccaggaagcagttggagctgttttctgggggagaaggtgccagctctgggacagtgttggggtagtgaggagggagcccagtggagagaagtcgggcttcctgcttcctcacagtatgtctgtcctgactcaactcggatgatgtcacttccttttcatcttctcaggtgtggaagcttggatggtcacccaaaccgggaggggattttggcacagcattccctgagatccccgtggagttcctccaggaaaaggaagtctttaaggagttcatctaccgcatcaacacactaggtactcttggggcctctccttcaggtcaccattgtcggacatctaccgggaggaaatccagagcccccagtactgggatcttctcatttgactccagaaaagatttaagcatgataataatacaaacctatgtgaatacattttgcagtgttggcaaaactccttttatactgagaaaatagatcccagttcctgtgttttgtggcttgaatcccagctttgtgtattccgggcttgtttgaagtcaggaaaggttcatgtgtagtggacaacgtgagaccaaattctgccttagattttgcatttaggctaaacagtggcagcacttgtctcagaatgttttcttgtgttcaccagtctgatcctgttgtgtctcagtggtccattttctcatatgggaacaagcagacgggagcagatggagtcaggtttcttggcactcgccttccccagagcctagaggcagcatggggagaaagcaggcttggggctcagacagtcctggtctgcttccagccctcctacctgagcagcgcagggcaagtccgtctaacctctagagaccctcagttttgtcatatgtaaaatgggggtcgtgtctatttcatagaattgttgcagatttagaaattacatttctaaacaaatgttaccccttatttctaaataagtgtctaaatgaataagtcaccacttttgcccctatttgatggcaagaggtgtgatcttgtggtgggactgtaatcagtcagttctcagtgactgtgccctgctgtggtgtttcctggaatgttcctgtcttgtcctagaaagtctggcaggggcaccctgactccactgtccagtcctctccccagtccctcgggcttctgcagatttgaggcttgtttggatcccagaaggttgtggcaggagacaccttgcctctactttcccctttataattcaatgtccaaagagagccctgagcaggtacctcacgccagctgcctcacggagctcctcctcttcctggctgtgaggatcggtatcagtggcctcctgctctctcccccttgcctaacacgagcacctttgcttacttgggtgcccttgctcttgaactgcccatcggacgtgcgtgacccaagactgtgccgcagtccttgccttgtctgtgctcattttctttgttcatttttttccctgtaacgtaaattgttatatttgtctgtatctgtgtctgaatcagtcctgcacgctctccttctctctgtctcttgttctttctttaccccgtttatcacggggaccccgatgtccattgctctagttctcctgtcctaagcaccccatcccgtctctctggccttaccacaagtggcgtggctgcctcagacatcatgatggggacatgaagcacagctgtcagaaacaactgttcgttagatacactcgaatgcagctcatcaatagggatggagggtctgtcggatgtattttcactgaatccccgttcctaccttgatacactctttttaatctattcttctagacaggtcagaggaaccattactttgacttttaaatttttagcagctttattgaggtagaattcacatactacagatttcacccactctaagcggacagcttggtggccattagttttatccacagagttgtgcagccagctgcacagtctcagggctggactccagggaagattttagcccatttagtgagtggggcagaagtggccctggccctgcacgaggttgcctgcatgggcgtccctgccctgtccctgtgtctgctccactgggggttgaccaggctgccagggccgacttgggcctgtgccacctgcctctcatgtgtctcggacagtgcagccgatgtctatacttcggtttcctcaatgatgaaatggaggggatagtgttccccgcatcatagaactgtgtgaggtttaagggactcactgcccttggcgtggagccttctccaggggccgtgctgtgtcggcgtagctgtcagctctccgttacaggcttgagaagggttgacactctctcatgtaacatttatatttctaggctggaccagtcgtactcagtttgaagaaacttgggccaccctccttggtgtcctggtgacgcagcccctcgtgatggagcaggaggagagcccaccagaagtaaggccacaccctgtgctggttggcacatgggcagttatggccgcttgcaggcctttggtggggaataaaataaggcagcaagctggtgttctttttttctcttaccttatttttgaaagagtagctgaatggtgtcttgactgatattccagagcagggacaaagcctgctgaggtctgggggctgcgattaccaatggctggaatgcattttattacggtgcattccatgttaaggatcaatacgattgtgccctttctggaaaatatcttttagtttatcaatattcagaggagtgtaggttgaattaaaatgaaaaggcactttataaaggccatgagtagtacctggtttcatttttctaatgtcttgcagagattttatcaggcttcttgaagtgttcacgtacattacgctaacacgatattaataataactgtgctctggtacagcggagccagcagaatgggaagttgtggaatgcaggcccttgattctgatagaaggtgtggtttgaactcacagaaatgacagtttggagggtagacatatgtcacaagtcatcaagattgtctttaaattcatgcatagaagctaacagggtgtcataagcaaggcctgtaaaatgtatgagggaattcaaagataatttattaaaaagtaattcatgtttggagttttgtgcccaaaggagtccttgatttgaaaaatgggcttttgcccatcagattgtttcagggcccgtgtgtgcggaggccctgccttgtgccccgtgagctcagcctgacagaaatcctttggtagcacttaaggctcctcttcctcccattgaggcagggaagactctgggttctgcaggcagaggtggttgtgggtgtcttgctgctcttgttgacatgtgggctctccttccaggaagacacagagaggacccagatcaacgtcctggccgtgcaggccatcacctcactggtgctcagtgcaatgactgtgcctgtggccggcaacccagctgtaagctgcttggagcagcagccccggaacaagcctctgaaagctctcgacaccaggtttgcttgagttcccacgtgtctctgggacatagcaggtgctggggacagtgggttccccgctgaagcgtccagcagcttcaaccaggccgttttccttcattgctagaattgaaaacaccgtccgtgtggcctgtgcaggagatgcagacccaaaggtggcctcctggtcagtgagaagctggaaacgtgacaggaactgacgtggggttattgagcatttaggggaagacgttagcagagcaggaatgagcaggcaactagtagaacacccacttaagggctcacggacaggtgctcacttaggaagtgagtttcatttggtattacaccaggttcctttaggcaaagcggagggaaagttctggtgtttttcacttgtaagattttgaaggaaacaaaacactctttaccttttttctaaaatgtaggtttgggaggaagctgagcattatcagagggattgtggagcaagagattcaagcaatggtttcaaagagagagaatattgccacccatcatttatatcaggcatgggatcctgtcccttctctgtctccggctactacaggtacctgagggaaagggtgcgggggagcggttgtacttgggctagaatgagagaagactggcatgctcaccacaccagtgatgcgggaagacctgagtgtggtctgagttggaggctgtggtgctaaatacgctgcccctttcataagcaggagtcttagtcaggcccagggaggaagtaaaatctggaaatgaatgagaagcattctctcctgccagtcaagaaatgagaagcgaaagaattctcacgggctgtaagaccagcaggatttaaaagttgaattagttgcttatgttaagaactcaaccaagttcatctacacaagctgaatctccagcttttcctaagaaaccatgtgtggcagtggctgcagggcagggcacagctgggcctgagcaccccgctccctgcacctctcccctccctgggccctgcctgtcactgcccactctcccaccaagccttccggttgtgtgcctgccctatcacaggcatcggagcttgtcacctggtttaaaagaagagagttgtgtggggatttgggatgcacgtttttcactcaaaagtattttagcgtagagctctgtgattccgtagctatttaggagtttaagcaccttgaaggctttaattgcagaaagttctatgtggacgtgcaatgtgttatacgcagtgtctatgagactcaaatgtttattagggcgttgaagtaaactgagcacttggagggccatggatccagccttcaaggagctcataagtcaggaggacccaggagcaatgacctgtcatagaaggcagaaaagaggggcacagaggtgggtgggaggcatacacaggcagctcctggagctccaaggggagcaagtgcttccagggaagggggcgtggaggcccctttggaggaggcaagttgatctggggtctggcagagggttagctggggacatttagcgggaggctggtgcccgggaattggggggatgcccagcagaaagacatgaggaggctggcctggggcgtgggggggtgtgaaaggttaagtgggggcattatcctgctcccgctcctgccggctgtatctggtcagcctgggcaccgaggtggggttctggaaggcactgttcaccaaaatgcttatctgggtcccccagagagcttgcctgcctggactgtcggctcgcctgcaactgctgactcctaagcttttgcagctcagcccacaaccagttcctattcacagaggtgggagctgaggggtgacaagtgactgctgcagtcttatttgtcatagagaaaaagtgacagagtccagcttgcccactggccctgccagcttaactggttataaagtgacaaatccccaagacccacagggctctgcacaacctgggccctcctgccagtggcggcgagggcaggtggctcacggctgggtgcctgtctgggcaggagctgggctggtatggggtgggcctgcggccctgcccccctgtgcagatcaagactcagggtgctggtgttcacaggtgccctcatcagccacgagaagctgctgctacagatcaaccccgagcgggagctggggagcatgagctacaaactcggccaggtcagtctcgcgcccccgccgcctggcctctgtccgtttctgtcctcagactttggcgcttgacacacccaggagaaaagctcagtgcactttttaaatgaaaggaagttttccttttttttaaaaaaaaatttaatgttcattgtttttatctgttttattcctaggtcccgcaagcagaggaagcattagttttgtttttatttatgttctgtattccagaaagtagttaagagacctcacatgtagcgatagagatgtgtgtaagagacagtgagagggcgtgacttggacttaagcaaggaccgtgagacacaaaaaggggggtgaggacagagtggagtcagctgaaatgctcaggaggaagtagacgccatgaagggccatggtatggggggccgcaggcgtggccgtgagtgtccctggggccagctcttggggggctccctgagtgtccctgtccctgtggccagttctgggtgggagccccgtgtgcaggcagacagctcggccacttcctagcaggtcacattggtctgtgcttctgtttcctcctcagataagtgaagggattcaagggtctgggtgtggtggctaacacctgtaatctataacattttaggaggctgaggcaggaggcttacctgagctcaggaggttgaggctgcagtgagccatgattgcaccactgcactccagcctgggcaacagaccagtactctgtcccttaaaaaaaaatgtaaacagaaacgtagggccatttgcatatgatggcacatggcgtggagccctacaggtgtatgctgggcggggcccggctgtgctggccgacttgcacctttccctccaccccggtgctgtgtctttcgctcaccgggttcctgatttagtgaaagcagttgtgcaggacagttctctttgtagcttttgtttctgtggaaatgggtcagaatatggtgtttagaaacacttatgagctctgagagtttcctcttctgagttcctggcctgcagccttcacagcagaaaccctgtgatgtcacaagcctgtttctgttccctgctctctgcctgtactgtcctgttttgtgcctgccggtttcagtgacaggaagcagggagctactggaccagcctgtatttttctagacatagttggaaaaagaagtcccactcttctgtcctttcacctttgacagatgtttccaccccaagataagtgaaaatgaccaataggatgcactgtatttttcatgaaagtgtttctgaagggcaggctgagagtgagaggcctggggctcactgggtgcctctggccttgtcctgggcccagggacactggtctgtgcccgaggtattccctatccccccaaccccgctgcatttggccacatccttcaatgtttgcgttgtgtccagcgtccgcaaaccaactgtcatgggatcatactggggctgaagtacggtcccacccctgccctgtctggggctgaagtacagtgccacccctgccctgtctggggctgaaggacagtgccacccctgccctgtctggggctgaagtacagtgccacccctgccctgtctggggctgaaggacagtgccaccccttccctgtctggggctgaaggacagtgccacccctgccctgtctggggctgaaggacagtgccacccctgccctgtctggggctgaaggacagtgccacccctgccctgtctggggctgaaggacagtgccacccctgccctgtctggggctgaaggacagtgccacccctgccctgtctggggctgaaggacagtgccacccctgccctgtctggggctgaaggacagtgccacccctgccctgtctggggctgaaggacagtgccacccctgccctgtctggggctgaaggacagtgccacccctgccctgtctggggctgaaggacagtgccacccctgccctgtctggggctgaaggacagtgccacccctgccctgtctggggctgaaggacagtgccacccctgccctgtctggggctgaaggacagtgccacccctgccctgtctggggctgaaggacagtgccacccctgccctgtctgggatgtttagcccctagatgccactggactgagccgctacttgcttttgggaaagaggggtgggggttaggggtctgggcgaggggagtgcaggggctcctccttggcctgagagctgttcatacagactcctcgcccactccctgcagggtgctgggtcccaggggggaaatggcccttggtgccaagaacgtgagttggggctagtgccagtgatgatggagaacagctttttatgggcacacagcccacagcactgtgccaagtgctcgaggcttcccgagaaccaggcagaaaggaggacagtcgaggtgtgctgactgcgtggtggctgcgtgatctagagcgcgggtcacaaaggcgcgagggagctctggccttgggtttaccgcaatgactgccagtgcgggagactggaaaaggaatctcacgtattggttccgtgttttggggactccattcagatgtcacttaggagtgaaagcatcccttcgtagagcctctttctgtgtcaccctcctcagctgctcctggggttgactggcccctgattcatgcctttagcatgtgctggagcttcccagcagctgtccagcccctgccccaccctctctgtgggctcccttgcccgtaacctggggtgtctgaacgacccttgctaaggggcagactgttagacggtaggcatgtgctgagtcccagtggccacacccacccaccaggagcctggcactgtggccgcagcactgagcagtgccccgtttctgtggcaggtgtccatacactccgtgtggctggggaacagcatcacacccctgagggaggaggaatgggacgaggaagaggaggaggaggccgacgcccctgcaccttcgtcaccacccacgtctccagtcaactccaggttttccaatggcctttttctttttaacagaaatttgaaatttcttatcagtcatttgatttgtttgaggtgcttcttgaaatgagcctctcatctcatgtacttggaaaatacccatctcgcatattccacaggaaacaccgggctggagttgacatccactcctgttcgcagtttttgcttgagttgtacagccgctggatcctgccgtccagctcagccaggaggaccccggccatcctgatcagtgaggtggtcagatccgtaagtgagccttcccattcccctcacacctgcacgtgccacacgcaccacacacgccacacaccccacacacacacaccgcccacacacatgccacttgcacacacacccctcatgcatgcaacacacacacaggccacacgcaccatagacaccacacacacatgccacatgcacacacatacacggcatgcaccatacacacaacacacacagcacacatgccacacacacacgccacaccacatgcaccacacacatgccacatgcacacacactccacatgcatgcaccacacacacacacacacaccacacacaccacatgcaccacaccacacaggttacatgcacacaacacacacatgccacgtgcacacaccccacacaccacatgtatgtgccacacacagcacacaaccacacacatgcaccacacacatgccacatgtgcatgcaccagacacatggcacacactacacacacgccacgtgcacacaccccacacacatgtacgcaccacacacatgccacacacacatgcaccacacacatgccacatgtacacacatgtatatacacaccccacaccacacacacaccacttgcacaccacgcacacacaccacatgcgcacacacacaccacatacgccacatgtacacaccatacacacaccatacatgcaccacgtgtaccacgcacccacacagacacagcacacgcatacaccacacacacacgcacacatgcgtcccgcacagtaatgtctcttgggtgtaagaacacgacttgccagtagtagcgttctggatgcgttgcctggattctaacagcgcgattctccccttgccctcctggttttccacatctccagcttctagtggtctcagacttgttcaccgagcgcaaccagtttgagctgatgtatgtgacgctgacagaactgcgaagggtgcacccttcagaagacgagatcctcgctcagtacctggtgcctgccacctgcaaggcagctgccgtccttgggatggtaagtgacaggtggcacagaggtttctgtgctgaagccacgggggcccatctgccttgggacctggtgttggccagaggtgccgggtgcggctgcctccttccaagagttgacccgaaccggactccacggcccacgtgagctgcagtgcttctcagatggagggggttcagcgacggtcagtgccattcacaggtcactgtgatgtgggttgtggcggccaagccatggtttggggtcccgtatccctgggcttatgacatcattgtagtagcccatccccacagaaccacggtgtgtggtggcgctgaggcatcgtagatggtggaaatgctactggcttccccatgctctgccctgaggcctgactgcctcactccccttctcagttatgttccaggccccccgagcttcctggctggacagcttctctcctgggggccgttttgtcacagtgaccctgtgtttctagtcccaaatctgggtgctatagtctctttttagcgtggtggttgtcttagtcttttttggctgctaccacaagttaccttagactgggtaatttataaacagtggaaatttacttctcaccgttctgggggctggaagttttcatggtcaaggtgccagcagatttggtgtgtgatgagggctgctctctgcttcatagatggcatcttctggctgggtcctcacggtggaaggagtgaacaagctccctcaggccttttagaagggccccaatccacaagggctctcccatcatgacctcatcacctcccaaggccccaccttcttgtactgtggcactgcaaattaggtgtcagtgtaggagtttcaggagggatagaaacattcagaccatcccagcggtcaagtgttcatcctcttgagttcctccttattctgcttctggtttatcaggattcagccagtgcagcatggtacctgtattctgtggcacatcaccacatggtatttgccaagtatccatcacctgcacacgtgaaatcattgcccgtgggtcccgacatctggcgaagcatattcaaggatggcagaactgtcagagctggcacctctggttccttgtcatgtggcattacctagtaatccattttatgatagcaatggaaactcatttcttcaacaaacacctgagtggctgccgtgtgccagccgtctggggcccttggtgagaatggcatggtggtgcccatcagggcctgcctagcccgtgctctggacgggctcctgtgtgtcaggaacgacaatgctgtcatgacggtgaatgatttttttttttgccatcactccagccgctaacatttgcggagctcttcctcccgcacccccacctgacaaggccaagggtgaccttggccccaccctaggcggccaaggtcagaggttagctggcttgtctgggtcacacaaaatgcagcagaggttgaggtgagcacatgtccgtgacctggagcctgactccctctctgcgagtcttgactgctcttgcctagactctgtcctccccgagcccaaacgccagtcatcttcccttgtgggtgtccttcagcctggtgccatgctggtgactcagcagccgtccagggagtggaaacaattgagtgtgtgggttccctgtgtgggcatctctcttcacggcgaacaccctctgggtgttgcccacacgatgtcaaagcggctcttggaaggggtccttctcctttgtgggaagtttcagctgctgggctaacttgaattgtaactgtggttttgtgctcaggcccagatccccctaggcaagtgttgtgccatcagtaatcaaatgagaaataatcattttgaaaagcagatcctaaggcaggatggtcatggacactcactcccagctctttgtgcactcatgctttctggaagatggccatcctctgtgaaggttttcagcgcgtcatgcttggtacccacgtatccagagcatgtcgttttgaggtatttgcccaccgttgtgaaatccgtgccacccgagagcaggtcctgatgtggggctttcagaagtgggacctggggccgtacgcagtccttagggaggggccgtgtggcgttgtgcgtgtgaggggatagcacagggtgaggtgggggcccaagaaggaagtgacccacaaagaacagcctcctcttttggtccttgttcctgggatggctgggagtggcttctgtgtcgtccggccatttcccctgcggagaggctcctaccactgccgagaacctcatcattccacaaaaacaagaggccgcctggccatccagcgctccatgggaattctgtgtccccatagtcttgggctgaaggagggtgacattccttgctgacttctgcaggggtctcctcactgttaaagagcagattgaaagtgaagaacgtgggctaagtgtttaggtcgatatttaaccctgctaggttttggatactaagtgaaattgaggccattttggttgaagttgacagaaaccactatcagggatccccaagactaccccaggcttttctagaaagactctcagctaagatgtgttatggtaaaagcacacaaaacaaaatcagcaaagaaaattagcaagggcagaggcccatggggcgatgtcccgaggacaccaggcttgagcttccagaatcctctcccagcggggtcgtgcaggacgcacttaactccccgcacagtgagccgtgacagcgcgtgtgcagtgtcgtcgccaggaaagcacactagagactcggtgccagggtttttactgggggctgggcacatgggcaccctctgcctgcctcgtgcccagactctggactcccggagggaaggcaagttctcagcaccaaccctggtgcccacacaagcagctgagcacagggagcccctcctcagtgaggatggtgggcaccgtcccaacaccagccaggggccagccttgcacacaggcctctcaggatggtctccggcctgctgtgtagtctcttctgcacacaagcgtgagggcagcgcccccgcctcggctgtggggaggagccactgggacgtgagctctggtggcatgcagcagcttttgtctgtgtgtgcctaggacaaggccgtggcggagcctgtcagccgcctgctggagagcacgctcaggagcagccacctgcccagcagggttggagccctgcacggcgtcctctatgtgctggagtgcgacctgctggacgacactgccaagcagctcatcccggtcatcagcgactatctcctctccaacctgaaagggatcgcccagtgagtgggagcctggctggggctggggcgggggtctcagaatgagctgtgaaggaagcagcatcaccctctccaagtgcccaggctcctggccagatggcaggccaggtatcagtgggaacccaggtgggtgccatggctgaggtcagtgagacgcaagagcacaggtgcgtcctagaggcttcctcgggcacctccagcgagctggagctctcgcctctgctgctgtctcatgtggcgcttagcacactctcccacgtgcccattcctgactctgctctcgaggccatcggctctcattctctgctcccagaaccctgttattacccaggctagcctcctctctgcaccttccccgccctggcccagtacctccctcttgtttccactgtgattccgacctcaccttatcttaaagctgctggacggcaggttctgtacacacgtgtccttgacaaagcacggctggtgccgcaacccctcagcgagcaagtcaagctcttcacagcgatgtcttacaagcgcagagggctctgtgacaccctggtctcaccgccactcttccaaagtcgcagaggctttagcagagatgggcccagcctctctgagtcataggcttctgcacacgggagctgtctttagagggagggtggaatttcatcagccacccacatgggggagttgagggcaagaattaggagcaaagatgggaaggggtctgggaggaatggccagtgatcccctttgacaagtgggcaggaaacgggggctaggtcaaagttgagtggaagacctggagggagacgggaaggtctctgtaggcacagttcagacaggagggaggtgtgagccagggcacatgccggtggccgtctggcaggatttgggacatgctggagcagggacagcggctcatcaggggccattgccctcatccaggccagagtgtcacaagcccgtggggaggcccttctcgcctgtcatccttgctgggcagtgggtgctgtgctagcaggacaggcggacggctggcaactgtctctgcatccctggagcctggcatagggccaagtcacacggggcacaggcctgcaaatcaggcacatatgttggtgcagtgacgtgattttggggggcagccccagaacaggccccagacacaggccaaagccctgcctgtgctggtgtgttgggctgttctatggctcttgctgtgggcatggaggactcagggaaggagagttgaggtggtccaggagttgcgtttgggatgcagagagcttgtggcatccaggtagaaatggtgcgtggggctgacctcagcaccatgggcagaggggccgtgtcacgtgcctccgaggtggaggtgggaccacgtggtgacagatatacgcatcactgggcacgtttttgtgggtgttggggggcatcgtattggctcctctgttcacagtggccactcattcagtccctggctaccaggtcctcactgtgccatggggaaggccggcgctgtcgggggatcacagaaggcagcacgtcatgatggcatgtgccatgaaggaaaagcacagggcactcaggaagtagaggggactggcctggggtgtgggaatctagggcctcgttgagggacagagagaggaagtgtgtggtggccagcatggaggtggccacaggggaggctgagttaggccgagagggcagggcgttggggaggtagacgggctcagccactcagggagtggtcaagcagaggctgaagggtcaggccaggttgcaggggcctgggggagccactcagggtaggcgctcccgggagcccgcctggcccatagctctacactcccgcgtggggccggacatgctgtgaagccctctccacgttggatgggggtggctgagcctggatgctgtctcccgttttcagctgcgtgaacattcacagccagcagcacgtactggtcatgtgtgccactgcgttttacctcattgagaactatcctctggacgtagggccggaattttcagcatcaataatacaggtgagtgggccctggctgtcttcctctgcacacggggagtgggcttcccttctcttttccttgcaggatcataccagtgggccagttttgacttggtcgggaggaggcatgaacacctgagactgtgcagcgattctttgacacagaggcctttctccctgtgcagatgtgtggggtgatgctgtctggaagtgaggagtccaccccctccatcatttaccactgtgccctcagaggcctggagcgcctcctgctctctgagcagctctcccgcctggatgcagaatcgctggtcaagctgagtgtggacagagtgaacgtgcacagcccgcaccgggccatggcggctctgggcctgatgctcacctgcatgtacacaggtgagcatgtacacggtgcccataaggccagcccaagtcctgttcaagggaggcaggagcatgctcactcaagggacctcgactaggtgccctctgatttcacacttctggtgttgccccaagccggccccatcaccttgcaagaaaggctctggagcccccagggctggagtacctggtcagggttgaccgtccctgtggtcactcatcccatgtggctgagctgggctgggtcctgggcaagcaaggggctgatatcacctgctttcagatctccagggactcactggacccctgtgtacaaagcactgtctacagagcctattgggttgtatagaggtaaccttcgtactgaacacttttgttacaggaaaggagaaagtcagtccgggtagaacttcagaccctaatcctgcagcccccgacagcgagtcagtgattgttgctatggagcgggtatctgttctttttgataggtaagaagcgaagccccatccctcagccgttagcttccctagaactttggcctgaagctgtgcttttgtgtgtgtctgctgatcccctggcgctgttgctggagtcctgccagtgattccccaccacagcctgaccatgggctgccttggctcagggttccactggcgagctggtggtccttggaccccagcactcaggtgtagcgttgaccagttccaaggttgtcccagtgcctgcccatctctcctgagggctcagggacagtacctggcagttgggggtgtggcagggggcaggaatgaccagcctctgggagggtggggcagaagcctgtacagtgaggaggagctggctcagcctggctgcctatcgtgagaggggagcccacggggctgtgggaggggggccgtggtgcctgtgagcagggtgaggagcagcggcaggaggatgaaggtggaacccacacatgcatctttgagacccgtgtggtcagtggcttctgccccccaccaccccccactgctgtgcgtgcatagaattggcttccctcacctgctctggaagtgggttaggagcttggtagggctttttctcaaggacaagggcccctgatttgctctcaggcctcagtcctggcgacatggtggatctggagccttgttgcactgccttgcctgtgctctccaatcagggtggccagtggggagccatttggcttttctcaagagcatactcaggtggaccttgctccactgtttgaccagatgaggcattctgaacagccaagcctgtgctggtctgttttcatgttgatttttttttttcttttctttttgagatggagtttttcccttgtcacccaggctggagtgcaatggtgtgatctcggctcactgcaacctccgcctcccgggttcaagtgattctcctgcctcagcctccctagtagctgggattacaggcacacaccaccatgcccagctaatttttgtgtttttagtagagacggggtttcaccgtgttggctgggctggtctcgaactcctgaactcaagtgatccaccctccttggcctcccaaagtgctgggattgcaggcgtgagccactgcgcccggcccccatgtcgatttttaaatgcacctctgcatcgttcttcagtccccatatgctcactgagcaccactgcgactggcagacgggcacagggaggcgccacgaccagtcctggccttcaaggggcttgtggtctagtgggcccaatgctaggtggcgagtgctccaaagagtgtggtgcacgccttccgcttgaccgctctccagacgccacagggaggcacctcgcagctgaccacagatttctctctgtggagcagtgtcttcagagcggctgccatgccactgctgggcgagggtctgcgggcgggtagagccaggagcacctgtgaggaagtgcactgccattttcgtagctgcttcccgtgtgtctcagttacacacggctggcatgtgtgcactgatgagacgggaacgtgatggttgcttttcagcactgaaagggatactgctcagggggcgtgtttcaggatctggttagggaagaagcagcgagagcacagatggggccctgtgtggtaacaagaaaaaagtcctggttgacaacagtgccacgaagcgttagaacacatagggatgtttgtggagcatttgcatgtggaaagcagcaaaaacataatgggaacgggttcttttgttatgatttttaaaaatctcttttgtaacatccttcccgctgcgccgtttctgcatattcctttatgtagctttcaaactcctcttaggagttctggtccctacagggcgtgggagcccaggctttacgtagctttcaaactcctcttaggagttctggtccctacagggtgtgggagcccagggcctgtgccgagcagcctgcctccacgagctagacagaggaagggctggggttttgcctttttagtctcaaaattcgtactccagttgcttaggctctgactttccccacttggaaagtccctcacggccgagggtccctcccagccctgatttcacatcggcattttccccagtattagagccaaggccctccgcgggcaggtggggcagctgtgggagctggtgccagtctctgacctgcgtccctcctcccaggatcaggaaaggctttccttgtgaagccagagtggtggccaggatcctgccccagtttctagacgacttcttcccaccccaggacatcatgaacaaagtcatcggagagtttctgtccaaccagcagccatacccccagttcatggccaccgtggtgtataaggtgaggttgcatgtgggatggggatggagtgggaaagcctggaggtggagttgcctccgacttcccagcagattcgccagcagagcccagctcctccgctttaaagcagcaatgcctctggcccccaccccacccccgccacccaggcgcagcaggtgcttcccgtccccccagccctgacactcaggcacctgcttgctccttgcaggtgtttcagactctgcacagcaccgggcagtcgtccatggtccgggactgggtcatgctgtccctctccaacttcacgcagagggccccggtcgccatggccacgtggagcctctcctgcttctttgtcagcgcgtccaccagcccgtgggtcgcggcgatgtatcctctctgggtccctggtgctggccccgtttcccttgtcaacaccgaggctcatgtttcatgataaggttttgaaacctaacctttgcaaaaaccccacagatgccagggtgacaggccctcagccccagggaagtaaaatgctgacaggggtacagaaaggagcacgtccagacatttgctgaccagggcctctcagaggggccggtgtatggcaggagggtcgcagctgaggggcctttctgtggagggcctgggtgaggggagcgagggtgggcggtggtctctgcagacgtcccgcccactcgcgggctctgtgtggctgggcttctcctgacactgcttctcattagctttggtcattgtgcctcgatcgccctctcggggaaaggcttaagtaaagatccagttcccacccccagatgctggctgccaggagtttccctttccacagcccttccccaagacagaccacaagagcctccaagcagcacagttgtcctggtgctgacagcacagccttgcccggcgtgcctggcacggctctgccctcactgcattggagcagggctagtggaggccagcggaagcaccggccaccagcgctgcacaggagccaggccaggtgagtgctgccgagtgggtgccctgcctgcagggcatccagccagccaagggttgcaggaatggaggtggaggcgctgatgcagctggaggcatccaggtggcccttccggggctctgctcgctctccaggctccctggacccctttgtagactgtttcaggagaggaactcccaggtgaggacagggaggcagcattcccctcatttgccggcctttttccttaactcctgcaccagcctcccacatgtcatcagcaggatgggcaagctggagcaggtggacgtgaaccttttctgcctggtcgccacagacttctacagacaccagatagaggaggagctcgaccgcagggccttccagtctgtgcttgaggtggttgcagccccaggaagcccatatcaccggctgctgacttgtttacgaaatgtccacaaggtcaccacctgctgagcgccatggtgggagagactgtgaggcggcagctggggccggagcctttggaagtctgcgcccttgtgccctgcctccaccgagccagcttggtccctatgggcttccgcacatgccgcgggcggccaggcaacgtgcgtgtctctgccatgtggcagaagtgctctttgtggcagtggccaggcagggagtgtctgcagtcctggtggggctgagcctgaggccttccagaaagcaggagcagctgtgctgcaccccatgtgggtgaccaggtcctttctcctgatagtcacctgctggttgttgccaggttgcagctgctcttgcatctgggccagaagtcctccctcctgcaggctggctgttggcccctctgctgtcctgcagtagaaggtgccgtgagcaggctttgggaacactggcctgggtctccctggtggggtgtgcatgccacgccccgtgtctggatgcacagatgccatggcctgtgctgggccagtggctgggggtgctagacacccggcaccattctcccttctctcttttcttctcaggatttaaaatttaattatatcagtaaagagattaattttaacgtaactctttctatgcccgtgtaaagtatgtgaatcgcaaggcctgtgctgcatgcgacagcgtccggggtggtggacagggcccccggccacgctccctctcctgtagccactggcatagccctcctgagcacccgctgacatttccgttgtacatgttcctgtttatgcattcacaaggtgactgggatgtagagaggcgttagtgggcaggtggccacagcaggactgaggacaggcccccattatcctaggggtgcgctcacctgcagcccctcctcctcgggcacagacgactgtcgttctccacccaccagtcagggacagcagcctccctgtcactcagctgagaaggccagccctccctggctgtgagcagcctccactgtgtccagagacatgggcctcccactcctgttccttgctagccctggggtggcgtctgcctaggagctggctggcaggtgttgggacctgctgctccatggatgcatgccctaagagtgtcactgagctgtgttttgtctgagcctctctcggtcaacagcaaagcttggtgtcttggcactgttagtgacagagcccagcatcccttctgcccccgttccagctgacatcttgcacggtgaccccttttagtcaggagagtgcagatctgtgctcatcggagactgccccacggccctgtcagagccgccactcctatccccaggccaggtccctggaccagcctcctgtttgcaggcccagaggagccaagtcattaaaatggaagtggattctggatggccgggctgctgctgatgtaggagctggatttgggagctctgcttgccgactggctgtgagacgaggcaggggctctgcttcctcagccctagaggcgagccaggcaaggttggcgactgtcatgtggcttggtttggtcatgcccgtcgatgttttgggtattgaatgtggtaagtggaggaaatgttggaactctgtgcaggtgctgccttgagacccccaagcttccacctgtccctctcctatgtggcagctggggagcagctgagatgtggacttgtatgctgcccacatacgtgagggggagctgaaagggagcccctcctctgagcagcctctgccaggcctgtatgaggcttttcccaccagctcccaacagaggcctcccccagccaggaccacctcgtcctcgtggcggggcagcaggagcggtagaaaggggtccgatgtttgaggaggcccttaagggaagctactgaattataacacgtaagaaaatcaccattccgtattggttgggggctcctgtttctcatcctagctttttcctggaaagcccgctagaaggtttgggaacgaggggaaagttctcagaactgttggctgctccccacccgcctcccgcctcccccgcaggttatgtcagcagctctgagacagcagtatcacaggccagatgttgttcctggctagatgtttacatttgtaagaaataacactgtgaatgtaaaacagagccattcccttggaatgcatatcgctgggctcaacatagagtttgtcttcctcttgtttacgacgtgatctaaaccagtccttagcaaggggctcagaacaccccgctctggcagtaggtgtcccccacccccaaagacctgcctgtgtgctccggagatgaatatgagctcattagtaaaaatgacttcacccacgcatatacataaagtatccatgcatgtgcatatagacacatctataattttacacacacacctctcaagacggagatgcatggcctctaagagtgcccgtgtcggttcttcctggaagttgactttccttagacccgccaggtcaagttagccgcgtgacggacatccaggcgtgggacgtggtcagggcagggctcattcattgcccactaggatcccactggcgaagatggtctccatatcagctctctgcagaagggaggaagactttatcatgttcctaaaaatctgtggcaagcacccatcgtattatccaaattttgttgcaaatgtgattaatttggttgtcaagttttgggggtgggctgtggggagattgcttttgttttcctgctggtaatatcgggaaagattttaatgaaaccagggtagaattgtttggcaatgcactgaagcgtgtttctttcccaaaatgtgcctcccttccgctgcgggcccagctgagtctatgtaggtgatgtttccagctgccaagtgctctttgttactgtccaccctcatttctgccagcgcatgtgtcctttcaaggggaaaatgtgaagctgaaccccctccagacacccagaatgtagcatctgagaaggccctgtgccctaaaggacacccctcgcccccatcttcatggagggggtcatttcagagccctcggagccaatgaacagctcctcctcttggagctgagatgagccccacgtggagctcgggacggatagtagacagcaataactcggtgtgtggccgcctggcaggtggaacttcctcccgttgcggggtggagtgaggttagttctgtgtgtctggtgggtggagtcaggcttctcttgctacctgtgagcatccttcccagcagacatcctcatcgggctttgtccctcccccgcttcctccctctgcggggaggacccgggaccacagctgctggccagggtagacttggagctgtcctccagaggggtcacgtgtaggagtgagaagaaggaagatcttgagagctgctgagggaccttggagagctcaggatggctcagacgaggacactcgcttgccgggcctgggcctcctgggaaggagggagctgctcagaatgccgcatgacaactgaaggcaacctggaaggttcaggggccgctcttcccccatgtgcctgtcacgctctggtgcagtcaaaggaacgccttcccctcagttgtttctaagagcagagtctcccgctgcaatctgggtggtaactgccagccttggaggatcgtggccaacgtggacctgcctacggagggtgggctctgacccaagtggggcctccttgtccaggtctcactgctttgcaccgtggtcagagggactgtcagctgagcttgagctcccctggagccagcagggctgtgatgggcgagtcccggagccccacccagacctgaatgcttctgagagcaaagggaaggactgacgagagatgtatatttaattttttaactgctgcaaacattgtacatccaaattaaaggaaaaaaatggaaaccatcagttgttgctgtgtgaggcttgctttgcttcatgagaacctagaccttgctgagctggagtcttaggaagcagtctcctaagtgcttctccagcaggggcagaaactgtcccaccagctaacatctggcattatggagggtcccccaggcagctgccagcagggacaggccccgtgttttctgtagccagggatgaggaagtggccccagggcatgggcctggctgggtgcttctgcaagggccttcccaaaccacagtacaggtggtcttcctgccctgcagatgggagctgtgggagctgctggagctgctggagccttcatggtcaagtgacatcataagcttatatgacatacacaagcctcaggacttggcccatggcactgaagcaggtcatcaggcccagcacagagactagagctgtgttctcacagggcccaccacccttccacctccttggccattgacacctgcgtccctggcccagctgctcccaggtaacccccaaagcagctggcacatcccacctctggtgtggccggggctgctgtgtgtccgcagggcctgccccgtctattctagcttgtttgtcctgtctgaaccagcgcctactccaagaagcctctgctcagcccagcggggatgcttctaagctccggacgagcctctcggaagccttggtgattggtggtgtagtcatcttgggatgcagatgtcttaccaacctgcaagaacaaaaaccctgtggcttcctctggtgcagggtatttagtcaatgtttgctgaggtcccgtctggttctggctaattggcaggggtcgtccacccattctttccctgctctgctgtctgtgccaggagagacgggggccagtcggccaaggggccagctcctgctgcctgctcctcttgggcacgtgcgggggccccctttctctgagcagggatagggatcagtctgccggagggatgtggtggacaggcctaaagcatttggggcggggcatgccacttgagctccctaaatctgtctcctcataggtgacaccgctccagggccccccagtggcctctcctttcagagctacctaaattctggtcacttcagagaaatggagcacccccttctccctggtccaggtgtggacagcctggcacactgagcacacctggcatggctggtaatttcagaaagaagaggggccggggtccagtgggaagcagcggtgaacccctcgtgagtgggctttgcagtccctccccatgccacggcagagctgccctcaacacagccttcctcttcctcatcggagagcacaccctgtccccttgccgagctgtgccctgtgccttcggtggtatttgattttggctgctactggctttgttgggatctggaagtcgcttcccctgcgtggtgcgtggagcactgtaagtcagatgagggaagtagccagggtgaggtgagtaccgggtggagccgccactgaagggactgggtaggggggccttgcctctacatgatgtgacacagccaaccgaggacagaggaagccccgttcctgggggtgtggggtgcacccctcagggaagcctgcagtggggcctgaggaaaggcatcctccgcgagcccacgagtctggtccatgagcaccgtgacagtgtctgtgggtagaggtggacccggccttgtgtcatcaccaggacctcttttgggaaaccatgtggacatcgcttgcgggtcccccaggctctgcagccccagcagcctggctgccttttgggcaagtggcttgagccacagaggacccagtcctgttgcagccacatcctctgggggggcccgccagtgtggccggctttctccaccctacaccaggcctccaggtgtcctggtcgggggtgtctgggccctgggtgggccctgtggacctgtgaggtcagggtcagggcatcactggaggcagagggctgaagttgtgggtctgggttccccttgt

SEQ ID NO: 760 - DNA, 73809 bp, Homo sapiens
aagaaaaaaaattacctccctttggtctcctaaatggtggctaaaaagttactcacctagacacagtatattcttcaccatctgagcagtaaatcttacagagaggtgcaagctctgttagaaactgtgccccctgtgtaatgagacggaagaagtaatcagttgatggacatttccactttcctttgagaagtagcccttaggtgtataacaggatgtattcctggaactggtgttttaaatcagttacttcagtatataaaaaccattcattaatttcagaacctatatgaatataagtacctactgtgtgccaggtgccatcctaggtctagggaaaaaagctaagacacatgataaatgggaatttacagactgataatatattttatcaactgtaaatgaaaaagctacatataaccaggtataaagatttcaaaagtgtgggaaaatccatcaacaagaaacaatataaaattcaacatgacacagtatgacagcaatattgtataaagttagtttcattaagatttctacctcattttaatattagaacttaatagataaaggaacttatttaccagggtcaatcactaagactttttgaagaagggatattgttctttcccccccccccctttgtaattccccagtgtgttagtaagggatattttttctagttaagaaaaacaaaaacaaaaacatgcactttgaggaaaatgtggaaaacaaaagttttaagcagcaaaataaaaataattgacccatgagtcaatactacattttgatgtgtatgtatttgaatgtcatggcatggttattgtttcatgtactccactagatggatatacctggggaggctctcacaagtatctacagggaggctcatgagagccagtgcaggcatgtttcatgtgttgccctcttttctcccatgaatttttcctgtagtggacataggcatttcaggttaagatgctattctttatgacccctttatttaccactcaaaacatttttagatggcattcagatattactatattggcttcactcctccgcacgtgggttcttcattttaaaatactagagtcattgtgactttctgcttttggaaggaaggggaaggcttgtgttaaaagagcagacacaaaagagctaggtctgtgccaaaacagcagaaatgttttgatgcctttttgtcacctcctttgggagaatgattggcagttctgagatccagtgaaaacttactgtagtgggttcaatatgcaggtccctctctgttcttcacttgtaacaggagtgttacttttttttttttttttttttgagacagggtcttgttctgtcatccaggctggagtgcagtgctgccatcatggctcactgcagccttgactcctgtgctcaagcaatcctcttacctcagcctcctgggtaactgggactataggcacatgccaccatgcccagctaattaaaaaaaaattttttttttttggtagaaatgaggtcttgttatgttgcctaggtttgtcacaaattcctggcctcaagtgatcttcccgcctcggcttcccaaagtgctgggattacaggcatgagcaactgtacctgccttaagtgttactattttggacagagatttatcattgaaacttcagaagtcttaagtgttattgtaacttgtagactatcgtttaagagaggtgcatgcttttctaagtccactagtttcttgagtgaggaaaaatcagtaattgtaaagcacaataaatcagtaattattaggggacttcaggcctacaaaggggggtttgaataagggtctcctagaatagtgagagcaattagcagaaactcttagtatgaactcagtaaatgaacgacttaaatcatccacagaaactttcccaaccagtgggtttgttaagacattttaacatgtcactaaattctccttggcatgatactcttttaataatctgtccattttgcctagagttacagagggtagagatagcattctatataaccgagtgttgtgtgcaggtacagggggtgggtacatgagtattacattgacaatgctttaggaatggaaaaacagtaaggagcaaatatattttctcgtattcatgtttttgtttttgtttttttgagacggagtcttggtcttgctctgccgctcaggctggagtgcagtggtgcgatctcagctcactgcaacctccgcctcccaggttcaagccattctcctgcctcagcctcccgagtggctgggattacaggtgcccactactgtgcctggctaatttttgtatttttatagagatgggttttcaccccgttggccaggctagtctcaaactcctgacctcatgatccacccaccttggtctcccaaaatgctgagattataggcgtgagccattgtgaccggcccatgtttttctttttttttttctaactcccttgggaattttttttctgtttaatttacatgtggaaatatatggtaaagaagagttagtcacctaaattttacagaactcgacatactagtttaatacaactagaagggacaaaatatcttgttatattgctattagagttctcctttcaaaggcctgccttccccctcctccatcctgggcattatagggatagtagcacagaacctaatataacagatactacacctcctgagatacctaatttgggggagctgagaatttctttaggtgaaagtatacctaaaattagcacctcaaactgctagagaagtatgctaagcatatgctactggattctaaggttcattggatctgtcattaccatgaatatagaggatgtaagtagataatcacagaattacaggaacatacccgcttaaatttcccagagaccttgttctgaagtctgctacagttggtactgatctgataggaaatgcttttaattgtttttccactttgaagaactggatgagattctgccaatgtgatgacacatattctacaaggagaaaaagttgatcctgtgtgattgcttggaataatttttcctcccataactcctattggaacaagaatgtatgaactggtatttgtttagtcaaactatcatcttccccctttttcctttggctactattggggcataactgtagaatagagaatacaataataaaagagaaaacaagattgaatttctttcccaggaaagggaagagtaccagaggtctttaggtaggtagcactggggtagaagacaaagaaataaggcatgcctgtgtatacgagataccatacatgtctctaccgtagccctttctgtgggctctgaacagttcagtagttgggcacagactggccacttcaagtagcagctgatgatgtggtcctccatttggatgtttgagtaatcaaatttatatgttcagagtggccaggcactggaatactcattcttgccaaacaaactcctataataataccatttcaacacagtagaagataattaatgcatgtttgtttagtgaacatttgttcaatccaagaccacaagaccataccaggctacaataccaggaaaaaaaaatttttgataatttaaaattcccaatttgcttaccggttagagtgctgtagtatacagtggtcctcacaaaattttcctttgacatctagaagaatacatgagtctgttggtggctgaaatcaatatttactaccactatgtggtactttctttgggtcatatagttgataatgaagactggacacatacatgctgcatgctgatcacgggtatcccttcattactcaaaaagacatacctaaaggtttcctagaaagtatttaaagagatctggcccagatagaataatttattcaacattaaggtaattaactccttgctccatcttactttacactcacttcaaaatgagtacacgtagtatttttgctaggaaaatgcaattagcatcccgttctttatgatatatattttttgttggtggtttccaggactgtcctgatgttggtgcaagtccgacattctgggaaacccctcagtcatgggtgaactaggacaggttggtcaccctatgtttggccaacagaaaatatgctacaatatatattttttaaactgagtataaccattatcactgaatgaaaggaagaaaggagagtccccaacgatgctcccaccactggttctgcttacacaaaacagtacaaaaagaatacctacttctaagtggcagatggcgtctcttaaggtaaatgtatagattcttcttctttctaaatgtctctaatctaacccaccctcttctcgccatccctactgcctctaccttagtttcgatctgatcatttaaataattttatgtatcgctactccctgtgagagtgagcccctcaatccctccaggcacttaaggactgttgcaacctagccctccgcctacctttggggcctccgtttagagtactcatcttactgcgagcaacaccctagagctcgcactgcaatcgccggccccagaatgcgccctgaagtatttcaggccaccaggtctttgcaaatgccattccctggggctagacggaacacagaagtccagtgccttctgacgtggggacggagagccagggagagcgcgcgtggcttatgatctgtcaacatagtctacacagcattaggccagtgcggccaaggagggatcaacatcactccgcacttacccggtttgtaccagcgagtgaagtatcgatccacgagcgaaggcaccaccggctccgcggcttcgggctcggtagccatggcgacctccggcgccgccacccccgccctccgggaccccagcgcttcctccgcgcagcccggactgggcgtgctcttccggcgcacagcgcgtgtcgtgcgcacgcgcgctgctctcaggtccgcaggttccacccccccccccgccccccccaattacagtgctttggggttcgacatcaaaacagagatcaaatacaaaagtttgggcagatgggcaagagggcagagggacaggggacgcggccaatgtagctcctctacctctacggtgccaggcctacaaagaaggccggccgccgtaagtgaccagaagcgggcccggcctcgccccctccgcctggtgacgtcactcccgcgccgcactcccagtgctgcggctgcctagttgacgcacccattgagtcgctggcttctttgcagcgcttcagcgttttcccctggagggcgcctccatccttggaggcctagtgccgtcggagagagagcgggagccgcggacagagacgcgtgcgcaattcggagccgactctgggtgcggactgtgggagctgactctgggtagccggctgcgcgtggctggggaggcgaggccggacgcacctctgtttgggggtcctcaggtaagcgatccatccagggtaggggcacgggagtggacctctccgccggcggtgtccgggtgaaggagacccggagcctcctctgcctgctgcgggccggggactggagtgcgggctgcaccacctctttcctagagccttaaattctttttgcagccttgccacctgctccatcgggggcgctgggaggcgcgacagcccagggatgcctgctgcccctccagccggacttaacccagcctcttgattgcttgcagggggttgataataacgctgaaagcgagagtattaattcacgatggaaggcggcggttaatagaggctcgggtgctgtggtgcgggtcctttctcgcgtgtgagactttttcgtggaggtggtgtcctctgtgcttctccatctaacgtggtgttttacgtggctttctctcccgttaacgatgatctccgtggagacagtggctgagtaatcttcagatcccagtacttagcaagtgctcagtcggtgttggatgtaggccacaaaccggatcgtaaagaattcaactgtatattgacagccacggaactaatcaatgaatagatccgtatgaagagtaagcaaaaaggcagcaaagacagtttttcagcttggggacatagagtagaaatggtctgtccccaaatagtgggaactgtcatttgggggaagaatagcaagttctttgctttccaggtcgcatttgatgtgcatgtgagacatgcttgtgattctatcaggaggttgaaaatgtgggtttagtggtaagtttgggctaattcagtcagggctaggcatttaggcctaatcagcgtattggtgatctacctggtatatgtaatcatgcatgtgatgtctagccaagaggtggatagtcgaaggagcaagggaagaaaatgaagcagttatcaggaaattaagagagaatccacgattgacctttggtgtggagggatctttagcacatttaagaactgcgaagagtttgaatcagtggaggcaggaaggttggaggttgcagatgtccaagaaagagtactaataggcctaggtcctgtggcaatatggaggatattcctttcctagcctggaaagaagtggagggaagtcttcctccgagaagataagggaataaggctgatgggtgtgaaatttcagagaaactagttttgaggcgtttttatgatgtttaaagatgaaaaacgcagccaggcacggtggctcaggcctgtaatcccagcactttgggaggcagaggcgggtggatcacttgaggttaggagttcaagaacagcctggccaacatggtgaaaccctgtctctactaaaaatacaaaaattaactgggcatggtgccgggcgcctgtaatcccagctactccggaggctgaggcaggagaatcgcttgaacccgggaggcagatgttgcggtgagccgagatcgcgccattgcaccccagcctgggcaataagagcgaaactccgtctcaaaaaacaaaaaaacctgcatgatatgttagaggttcaagtaatttctagcagttcttgaatataattgtcaccaaaacttactaaaatcattgtcttcctcacttccatcatatataaacttacctttctcttatcccacattatatattatataattcctatgacacttgacattatcttctgtgtactattaggattgattcatctttattctttctatgtcatacatatgtggggtgccaagatgagagaagtctccttggattaaagtgacaataagaccggtgtggtccttgtaattgctacccctaacataagttagggacttacaatcataagccttaaagggatctgaatataaataactagcacagtaacatttttttcccctacttaggtaatgttatgcatttaagcaagcctgattttgccagaccaaagtagatgtcttgtttagcactcttttctcacgttttatattgtcctgggaaaagcctggccagaagaacaaagttactggaagtagttatgtcaggtcatcagggtccttgaaatgttggtcatcattttgaagtaaattgttgtcatgtcccagtattttctcttcccctttagaacagtaaatgcttttctatctttgatttcagtttttttatgaatgtataaaaccagtttataaatgaatagacctggtgaatattaaagtcatttcagattctcttcaactgccagtatataaaaatggattttcaaatagtgctaatcagtgggatacccttttgtttttcctcatgattttataaagatgtcctaatatgcaaaaataaaatgtttccccattcatttgttctttcaactttcccaaaggaataactgatattacatcttttttgaagaaaacattctaaagttgagaatcttgcctctcctaaaaagaacataaaataggtttcagaattcctaatttgtagaccataactgtatagagtgggtcaggttgctgctataatccatacatgggtgtgtactcagagaggtaagttttttcttttcttggttattctgattctgactaccacttcttcaccccctgaatcatttcatttaaataaatatggtcatttatcactattaagctatttatttttctcttagagattaatgattcatcaagggatagttgtacttgtctcgtgggaatcacttcatcatgcgaaatctgaaattatttcggaccctggagttcagggatattcaaggtccagggaatcctcagtgcttctctctccgaactgaacaggggacggtgctcattggttcagaacatggcctgatagaagtagaccctgtctcaagagaagtaagttactgatgtagaatgccagcatgtgggtatgacccttgatttctcttcttccaaatttctttccccacatggtctttctttatatcttattgaatttatatcctcccaaataaacatcttttgcttcatatatatgccatgttagacatagcttaaatcgtaatccttctttaactctgctgctattttaacctaagtcagtagaactctgaccttactttttgagtgtgtgccgtactttttaccctctttgtcatgcaaattctgtttataagagtggttttttttttttttttttttgagacggagtctcgctctgtcacccaggctggagtgcagtggtgtgatcgtggctcactgcaagctccgcctccccgggttcacaccattctcctgcctcagcctcccgagaagctgggactacaggcgcccgccaccgcgcccggctaattttttgtatttttagtagatgtgcggtttcaccgtgttagccaggatggtcttgatctcctgacctcgtgatccgcctgcctcagcgcccggccaagagtggtttttaattgggaatgaacacgaaagttgcccatggagctttctaaaagtttgagcccacatctcatgtcaactaaatcagaatctttagtgttggctcctaactatatgtactttaaaaacctctgtgggttggttttgatatggtcccttgattatgttcttctactaatacattttaggcagttacatcctttagtgccttttccccatactatagaaatcttagaaaagcatagctattagcatcatattttagtggacaattttaaagagaccaggcttattgtttttgtttttgtgtttgtttggcaaaaaggtcacattacctatttttcttgttagagatgacagagtagtgatatttctcaaatgaaagtttggattttcatctagaaaaaatatttttgaaagcttttatgtaataaaagaagcattaaaaagtatttctggaaatgttatcaattattcttgaaagtagactgggttaatttgcttgtgtttactttggtgaaaggtgaaaaatgaagtttctttggtggcagaaggctttctcccagaggatggaagtggccgcattgttggtgttcaggacttgctggatcaggagtctgtgtgtgtggccacagcctctggagacgtcatactctgcagtctcagcacacaacaggtaagtggaagactccagtgaggggggagtctcaagcatcctcaaataggttacttgctatttgtggaagttttcaaatcagtagccataatagttacacttttgctaattaatttttgcattatatatttctttatttaaaaaattgttaacatggctttatctatatgttaagattcttctaaaactgagttttgtctgctgcatctattaatcagagtgatcagaatgttccaaatgagaatatatttttttaaaagttaaaactggctattcttatgtggtgtagatcacctcttatcagaccctcatcttgagttgcaacctttgtttctcaatttaggaagtctttgtttatctgacttagattttctgttatgaatgttgattggctaaatttagagtccctgaagtctaggcactaaagtaaatacattgtcattacctgcacatgtgatgactgccagtagagctagacttcaagcaattgcttctttctctactttagtgtatagttgagtttctgatttctatcctcaccttcttaacagcaagggtttcaaattacacttggctgattctttaaatcttcttccattacttcattagttgtgatctccttaacattgattatgtcacagaagttagagtattactaatagtaggataatgatagcagcttacatttattaactatcatgtgcctggcactttttaaagtgcttttcatgcaaatttatttaatcttcaccatgaccttatgcagtaggttgttgtttcctattcttcagaagaggcagttaaggcacagagtgcttaagtaattagaccagggtcacacagtaatcaaatggggtttgaccctagcagtctaaatctggcacctctgctcttaaccattccatttagtacaatcataaacctttacttgcagttcatggtgggaaatatcaaacttgtcatatacagcttgtttttttttcgtatttgaaagatagatgcttttactttccaaacattttgtagcattgtttcctggttactgagctcttccagtctatttatcttcatttaatggtgctgattctgccctttagtggcttctcaattgtctgaaaggtagagcccactattgtgccttataagcccctttcactatctgttccccacattcctttttagcctcatccccccattgttcctgtgtgtacgtaaaccttatgttttagttgcagctgatttttaactgctcttttttctggctttgtgcctctacactgtgttttcttcctggtctctctttcctgtccttattaccactctttgaaacacgtcagaaaaactttttctggactttgggccacttgtcattccctgtgctgagacgcattttgctttccagagatcttggtcattgctgttatcctctgtagggtcttcttttatctccctcgtgagacagctctgggaagaaaaagatatttatttctaatccctgtgcctaataacaggtctattctcttgatatccattactgaagaaatgtttgttgagtaagttcttgttttaatttttaaatataaatttttaatttttatgagtacatagtaggtacatatatttatgggctacatgagatgttctgatacaggcatgcagtgcaaaataaccacatcatggagaataggatatccatcccatcaagcgtttatcctttgtgttacaaacaatccaattacagtcttttagttattttaaaatgtgcaattactgttgactgtagttaccttgttgtgctatcaaatagcaggtcttatttattctatttttttttgtacctattaaccatcccaacttccctcagcccctcactacccttcccagcctctggtaaccatccttgtactctctgtgtccgtgagttcaattgttttgatttttagatcgcacaaataagtgagaacatgtgatgtttgtctttttgtgtctggtttatttcacttaatgtaatcatctccagttccatctatgttgttgcagatgacaggatcttattctttttttatggctgaatagtactccattgtgtatagtaccacaatttctttatccagtcatccattgatggacacttaggttgcttccaaatcttagctattgtgaacagagctgcaacaaacatgagagtgcagatatctcttccatatactgatgtcttttcgttttgtttttttaattgttttgattgaagttgcagtcagtttttactgagatgctagtgtttgaatctctcttttcaattttctctgtctcagctggagtgtgttgggagtgtagccagtggtatctctgttatgagttggagtcctgaccaagagctggtgcttcttgccacaggtaagcttgttactggtgcctcactggcttttttaaaacattattccagatgtcttacaggcttcatcagctttaggctgcttgaatttcaaaaaatttctttgaaccagtataataccaattatgaaccagtataataccaattatgtatgtgtgtgtgtatatatatataaaacgtagagtgatttttttttggtgactgaagttttgcctcttagtctatcattataaaaagttgtttcatgtaactttttaagtctttgggagtaagaaacaaagtcataaaacttggggaggctgctaagtccccagttagagttaaaaatgtcagcaatatgtattttaacttattctaagagttgctgtatggacacattctaaaagcccttcttgggttctgttgctgtttttcccctttaagtctcatcattccagatgagtttagtaaaccagctccactgatgacatttatatttagaggtatcttggggacaaggagtgttgaagttagtggaggagggctttgtggacttttaagttcaactgtacacacattaatagctgagcataagcaccaggtgacttatctagggaaagctttttggggttttttgtcattgttgtttttttaagtcaaagcattttggatgaattctgtctgctctgttcagactaactccagctccttagcttacagtgccataggtacttaggaatggcaaatttgttacatgaaaacaaaatcatttttgtttgtgtttctctaaggtcaacagaccctgattatgatgacaaaagattttgagccaatcctggagcagcagatccatcaggatgattttggtgaaagtaagtatagctttgtgcaatattttgtgacctacgtttcttcccatttttgaccatttccttgtgcactaatagccatgtcattaggccaaagaactgtgaaagttaaacccccagctattaaatgtctattagcccagttccttcagcccatcccaaatcttaaaaggcctactgatgcctctccaggtctgagggtttaaggtcacttagatagttattacccaaaccctaggaaagtcttaggctgggctttcagtgaaagggactgtacaaggtagtatttctgggatacagttttagggagaagaaaagaagaaagatggaatagaaggctggtttttgttactacgattagatccaatctgcatttccatgggaacaatcagattattttcttgctaaaatctagccaaggtcatctgggcattaaggctgtgggggtattgaagggcagtgcaggagaagagagacgcttattaagcataagctttggccatcttgaagtcacaaagtagctggcctgattgaagagggatggggaagaagatgttccaacttctgttatggtctaacttcctgccttcttgctccatcaactctgagaaatcatttagacaacttctacccatttatttacaaataatgtatttgttcagaaataattttggagggctgggcacagtggctcatgcctgtaatcccagcacttttggaggatgaggcaggaggattgcttgagcccaggagtttgatactagcctaggcaacgtagggagacccagcatctacaaagaatttaaaaattagctgggcttggtggtatcagcacagtaatgacatgatgtgcaggtactggggtagcataagggaaggaaacgagtaactagagagggatgatttatttcccctaggaggccaacttgagctgagtctcagctgaattggtgttgggtaggtgagggataagggtggggagtagtcagctgaattggtattgggcaggtgagggataagggtttggagtagtcagctgaattggtattgggtaggtgagggataagggtggggaacagtccaagcaagtgaatgtgtccatttcaagtgtccatttcaagggagggttatttcatagaaacattgtgggttactcagggaactgtgagtaattcagcattgctgaagtggcagaatgtgagtgtagaatgaaataaatggaacagatttgattgagtttgtagtagggaatatggacattgagttatagttgatcagccattacaagttttgatgataagaggtttaaagagatttatttaatagaaagatggctcgtgatggcatatttttgttgtttttgtgtgtggagagggaagagatgagaggcagggtgatcaggtaggaggttgctacaggaatccagatgaaagataaggaaggtttgtgtggggctagaagcaggaatcattcaggaaaaaacttgattcacaatgaggatgggagtacattttttagaattagctgggaaacttttttagaatatatgtgcatgattccccttctgccctaggccagtttgagaaataccaatttagaaagtgaaataaataggctttgcgtatgtaaggtgaataagaaaaagttgagcaggactccagccagaacctcaggtgttgggaataaagatgccagtaacagggaagatggagaagtgctggtctgtaaggggtgggtggtgagatctgttttggatttgttgaaggaccatatgtgattgccatgtggagtatgcaaatataaggctgaagctcaggagaggccagagctatggactgagagtagtgggtatgtaggaaattctgacagttttgggaacagatggactgtctcagggagcagatgctgtacaggaagagtctagaatccagggtggaactctggggcatccagctttgaggacagtcagagagagagtaacagcacacagtatactttgggatgggaaagtgctctgggcctggtgtttcccactgactttttcacacaaatcctaatgcagtaaatcaaaggaaatgtaggccaagttaagatcttaggtctcagaaatgtgtttctcagtacaaaaaaaaaaaaatcattctatggagtgatgaatatttttcctctatcctggggtcagtagacttgttctgaaaagggctaggtcatgaatatgttcagctttgcaggctgtatgatctgtgttgcagctgctcaattctaatgttgaggtgtgaaagttatacatgatacataagcacatctatgttccagtaaacgtttgtttgtaaaagcagatgtaggctgtagttttgcaaatccctgctgtaaccgcatcatttcttgtcttccattggaaaagttctctttcttcattccttggtccttaatctttctgtggaaacttgcagatagaagcctgggggtttgcaccaggatagtcactaccatttgtacgcagcagcaattgaggtactgtagcacttggatgtgagcagacaggaaatggtcatatggacccataatttataggaattgcaaacagccctgcttcatcagaatcagaatcaatggcaggaggaaagtattgggtcctggattaggtgatgttttcaggaccatctttattgtgcttcttgcaaatggatcctacctccaggaacagaagggttgtgttgtttcagcaactctgcctaatagtttatataagagaagtgttacgatctagaaagaaccccagtcagcctggaaggcagaagacctgtgttctaacttttggctccaccattagggagggtctcaatctctaagtctatgtgaggagctgttttgtgacctgcagcccctctatcaccagtgagagcttgcaatcagaattttattcccagttctcatcttggggttttatgttccggacatattttgtaaactctttatgtttcattcttcttacttataaggtgagggtgagatcgctgacttgtgtcatcaaagaaacttggaatatgtaagatggcagtaaaatgctttccaaaataaggaagggcatttcaaattcttcaaagtcactgctgcatataatatgaaatgggttttgtttgtttgttttgagatgggggtctcgctgtgttacccaggctagagagtgcagtagtacaatcagggctcactgcagccttgaactcctgggttcaagtgatcctcctactttagtctcttgagtagctgggaccacaggtgtgtgccatcatgtccagcttattttgtatactttttgtagagatgggtgtctccctatgttgcccaggctggtctcgaactcctggactcaagtgatcctcctgcctcagcctcccaaagtgttgggactataggcatgagccaccatgcccagcctgaaacataggtttctcaaatattgactgctggtcaatttattgagaggcgttagaggacctgagtaattgccaatgactaacttcatgaagaatagcagtgaaactgtttttgtttcatttcatgtggcttattagttgtcttgccaattgttctgtaggcaagtttatcactgttggatggggtaggaaggagacacagttccatggatcagaaggcagacaagcagcttttcagatgcaaatggtaagtttggtttgatggataaaaagccttgactggaacaaatgtaagtttgccacccaccaggaactctttggtgtccacttagatgccagtaatgaacagttctcttctgctttagtaaaactgcctagaaccttcaggaaatgaatccctctagaaagatcctttttttccttgttattgccaagttgctttgtgatttattttcatagtagcaaataattataaccaatattcatcacccagtttaaaaaataaaacatcacagacaaaggaaaccccctgtgtatcccgtcccgatgtccctccccttcctctccagagagagctgccatccttcattcacatgcatgttctcatacttttcccatatatgtgtatattagatatttttctttttctgttggatgaaactctttgttttccttacttctggattggaaaattctgaagaccatataatgatgtcttgatgactcaaggcaggactttttaatcttctaatgtaggcggggcggcccctgaaggcagaggtgtgtggacacaagaagagtgcagactcttggggcacctggggaagtagtgtccgtgtcacattaaattcatttaaactcttatattttattttaatttatacaatatgaatattttttaaaactatgaattgaaaagtattacccttgagtaaaattaatgccccaagaagatgtgccatatttaccctctggcacactaccaagtacccccaggggcattacagatctctgttagaaaagtacagattacattatcctcataacatttagaagctatgagaccttggcagggaagtttcctaatgtttctgagcctcagtattctctgtaaagtggacaacataatgtctccttacaagggttgagatgggcaggtaatagcatatataaaacagctatcatagcatcagcacagtgtaggcactcaaatggtagttgctgcttttgttttagtagacaaataatttttgaaactttttaaagcgtagtttttatttcaaaacaactttattgtgagtaaaatatgcatagtgggtctaatttaacattctgaaagctattgacttattagaacagtaaaggattattagagggcagaaacatggagtaagtactctgagacacaaccttgcttctttgggggtgatccactacaactgcccagctttggacaagtggttttcatgtccccctgatttttaagtgattttttttttttttggcaggacttaaaaggtatccttgactaaacaggaacttgaccaagtaaatagttggtgcaatttgaatattctttcttgctataagcaacaagtaaattatggtacagctttctaagaccatatcttttcgatttaaaaatagcactttactcatacatgttatgacatgggtaaacctcataaagattatgctaagtgaaagaagccagtcataaaagatcacatataatatgatcccatttgtatgaagtgcccagaaggggcaaatccacagaggcagaaagtagagtagtggttgggtagggctgtggggtggggtggggaaggggtgactgctaatggatatggggtttcttttggggatgatgaaaatgctcaaaatttagattatggtgatggctattcaactttgtaaatatactttaaaaacattgattcttaccactgagtttaaacaaccaaaaaaaaatcccaaggtgcattgaattgtgtacttcaaatgggtgaaccttaataatatgtaaattatatcccagtaaaggtgttaaaaaatagtactttaaaggaatctatggtagttttgaaaataaggcagttttccatactttgttaaactctggagaagatgacactttactactggtacctgctagagtaagacttatctagtattaacaaaattagggtttattaatggtataggatgatccaggtaatgggggaaaaaaaccgagcatcctgttatctaatgtactatccagtaaactactctagctttttttcatgaactttttctaaaggctttctagggcctcgtcttggtttgaaagttcacagctacccttcagaaaagaaaacaaaaatccatggagtaggcagatacaagtactcatgtgagcataatttactttgattttttaagttgtgttattctagccctcagcctgttccctgcctgggctctcctagtgcccagtaacactgattcaagaggttgcatttagctgggcacagtggctgatgcctgcaatcccagcactttgggaggccaagttgggcagatcacctgaggtcaggagttcaagaccagcatgtccaacatggtgaaatcctatctctactaaaaatacaaaaattagccaggcatggtggcagatgcctgtaatctcagctacttgagaagctaaggtagtagaatcacttgtacctgggaggcagaggttgcggtgagccaagattgtgccactgcactccagcctgggccataaagcaagactccgtctcaaaaaaaaaaaaaaaaaaattgggtgagagggaggaattgaggaggataccaagggttgggcctgaacaaatggaagcataattatatgtagaaatttctatgagctactcttctagaatagatgactcaataataccctgcttgccatctacgttttctgtccttaattatttccagttctatttcatataatgcctatttcaggccttaacccttcagtaaaggaggtttggtttctataccctaggacagtttcattgagaataaattttgttaggctacctatgtattccctactgtgcagactacagtacagtactagcagaattcttaggctgttactagaatatgatgatgaatgcccgggtggtcatctgtctcccacccggtagagttggcttcaggattgagatacacgtggccctggaggagacgtttcttcccgtcatgctgcagaatgagaacatttccatgttttcgtcattgtctgctgctgcctttaccacctctgtggctcctccctattcaccttgttcacatcttaactcatctgtgccctgttgtgaagcttacacaatatgtaaacaaaactctaccctgttggacaaatggaacacttgtttccttgttgtagttacctgataggttccttagctcattatattcaggatctagatctgtagctcttttcctcttttgctgttctcagaggccactttttttttttttaatgccgaaaggaggattttgtttgttttacatttttttcttctttttgatgatttctgcgttctaagaaccaacccttggatggtttctgattctagaggcaggctttcaaagtagcttaaacctcttaaaaaacatctgtatctagtggtctgaggcttgtttgattctgggatacttaaggtcccccagtaatattggtgtttgttcccctttttagcatgagtctgctttgccctgggatgaccatagaccacaagttacctggcggggggatggacagttttttgctgtgagtgttgtttgcccagaaacaggtatggaaatatattgcagttaaacaacaataaaaaatttttatcttattaaaattaaggaaaattttctttcttttgctttgagtagggtattaattatacatatgaggcaaggatgtgctgctttaaatgtgaaatgaggttagagttaagaattagaagagtcctttgaggccatttggtccatcctcctacctggtggacacaaatttgtaacaaaattaatctaattggctatgtaaaaccatggcagtttttatttgtaaggaaggtgtttgaatagttctgaattgacaacttttatcataatgttttaagtgtgtatgtgtgtttgactccactcccgcacaggggctcggaaggtcagagtgtggaaccgagagtttgctttgcagtcaaccagtgagcctgtggcaggactgggaccagccctggcttggaagtgagtgggagaagaaaccttagagaaattcttggaaccagagtagaggtggtggtacacatggatacagatgatacagatgtttgtgtaacacaaaaggatttttacgtttcttcatttggttataaggctgtatctatctttgtttcttcttttttttttttcttattccctgaagtctgaattcaactcgaatagtagattttacgcttcttcacagatttcattgttccaaggccgcatatattttgcattcctaactcttaaaaggctgtggttttaaggcagggtatatatgaagccattgtacagagcagaaaatggtgtttagaagggaaggcccagtttgcaaggctctgtggggcaaatggtgcttttgtggaaattagggaaagagcctccttccttggcacaaaattcctacagcagaggatctgcttgccaaggagcatgcaggctggattcagaccctgctctttccttccattctcctccttggcccagtacccttgtgcaggttacaatttgcctgtcatatgtggctgcctgattttagatagaagatgtatctcctctgtttcggtgatatctgttgtatgtagacctcttgtttcccaccagtatctgaatggtattatatgatagagcagaagagaaatgtatttgaattaaaaccctagagacaaatatgaataagatgaggcaattaagatgttttcaacatttggtgaagtcttaaaaaagacctactggagcatagaatatttgctgaagttgtataatggaaggagaaatagattttgatttttaggacattatacctggaatggtttagataacttattatttttaaagtcatccaaatgcaatgtaaatatgtaaggttttgtgggcaaatggagcctctgtgtaaaacaggaaaaggcactctttcctctgggcaagtacagtcccacagtgggatgaaccgctcgccgagagacaagggacacatgggatttaaaacttccttggataaagatattcattaattcgttcattcattcattcatgtttgctggaaaaaaaactcttctggattttatctattctttagttaggtgagctttcgatattgtaacactctgagtttgctttaagaccctcaggcagtttgattgcatctacacaagataaacccaaccagcaggatattgtgttttttgagaaaaatggactccttcatggacactttacacttcccttccttaaagatgaggttaaggtaagtgcctgagtttgtttcaccctcgaatgtagaggactttccatagctatagagggaattttttttttttttttttgagatggagtttcattcttgttgcccaggttggagtgcgatagtgcaatctcggttcactgcaacctccgcctcctaggttcaagtgattctcctgcctcagcctcccgagtagctgggattacaggcttgcgccaccacagccagctaattttgtatttttagtagagacggggtttctccgtgttggtcaggctggtctcaaacccctgacctcaggtgatccacccgcctctgcctcccaaagtgctgggattacaggcgtgagccaccacgcctggcctatagaggggatttatatttgatatggatatataaatagtagctttagagtaaatagtaataaaaatggtggcttcctagaactgatttttatttaataaaatattgtttttccagtgattttgcaaataatagcatttgtcccccaccttagataaaacagaagtaggaaataaaaatgctagtttttattgtttattttgacaaaagcataatttttccagtaatgaagatgtttttcatttataacatttaaatcttaagtggtttgtataccattaagattcttgctgaagtgagaacacatcaaatggtatctctgtgtaaaattttaaacatcctaagttgagagacgagtttaatgaactcccatgtaactattactcactttcagtagataccaacattttgcaaaactattttcatcggtccgcaactctttggcctatacatatatatacttacatatatttttatttcctggagttttaattctagaaatcatattttcaatatttatttataacagttaaggacatttttctttacataaccataattctattattacatcttatctctgtgttgtctaacacccagtccatattccagtttctctgattgtctaaaaatgtcaccttgtatttggttaagtttcttaagtctcttttaatctttaagcataatgtatttcttttttttaagtcctctacataataatgacatattttacagatttgtttaatgcctctgtaggttagtgatttacagctagggatgagctcaggtagtgggattatttgatttgagagaggaaatacagctattataaagatttggaagtaaatccataactgaaagccaatgacagatcttttttcccttctaggtaaatgacttgctctggaatgcagattcctctgtgcttgcagtctggctggaagaccttcagagagaagaaagctccattccgaaaacctgtggtaagacagctgtagtaccccagccttctgccccataaaacgtagttgaaagtagacaggtatgggatttccttcatcccttctacttagtcccttagtagaatcaaagatgctgaagtgggtaggtggaaatgggggtggttaggttttgattgattgtggatttcagtcatgtattggttggggttctctagagaaacaaataatacatatatataattcgtccctcagtattctcgggggattagttctaggattgcccatggacgccaaaatccacacatggtcaagtcctgcagtcaaccctgcagaacactcagatatgaaaagtcagccttttgtatacttgggttttgcattcctcaagtaccatatttttgatgtgcgtttggttgcgggtatagaatccacaatatgaagggccgactgtattcattgaaaaaaatacgaatataaatggacctgtgtagttcaagcctgtgttgttcaagggtcagctgtacttacatagagagacggtgagagagggaatagggtggggcgggagggagagagagtaatagagtgtggatagatttactttaaaagattagctaatgtaggggatggcaagtttgaaatttgtgggggcaggttggcaggctggaaattcaggtaagaattgatgttgctgtcttgagtatgaaatctgtagggcaggctggaaacttagggaggatttctgttacagccttaaggcagaatttcttcttttctgcgaagcctcagtttttgcttttaaggtcttcagctgaatgaatgggaccttcccacattatggggaataatctgctttccttatagtcagccgattataaatattaatcacatctacagaataccttcacagcaacatctggagtttagcagatagctgggtgccatagcctagccaacttgacacaataaaattaactgttgtaagtcatcacgtgctttccctagtgcatggtattaccacagaaaaaacactaaccaaaggaattctgtggacgtgaaagaagatttagattaagcgtaaaagtaagaatatttttatagcttttaaaatgtataagtgtgtggttttaagtattaaataatacttgaaaatgttagaaaataagatgagaaaaaaatctcatagttctaccacttcgtaataatcactattcaaattttcttgtcttctaggtttttcatgtatatatctcagtatagctatcatcttgtttttgttaaaagtgtagtaggtatgggccaggtgcggtggctcatgcactttgggggcccagcactttgggaggccgaggcgggcggatcacgaggtcaggagatcgagaccatcctggctaacacggtgtaaccccatctctactaaaaatacaaaaaattagctgggcgtggtggcaggcgcctgtagtcccagctactcaggaggctgaggcaggagaatggtgtgaacctggaggaggcggagcttgcagtgaatggagatcgtgccactgcactccagccttggcgacagagtgagactgtctcaaaacaaaacaaaaaaaagtgtaggtgtgatacatctgcatcattttaaattgctgtataatactcgtttattctcgttcattaaatctcatgctgttagacatttacagttttgtcatttctcattattgtaaacagcaatgcatggtacatttttgttcataaatctttttacttgattattttctaagtagctttcaaactctttaatcagtagaaccccccccccctttttttttttttttggagacggagtctctctctttcccccaggctggagtgcagtggcccgatctcggtcactgcaagctctgcctcccgggttcactccattttcctgcctcagcttcccgagtagctgggtctacaggcgcccgccaccaagcctggctaattttttgtatttttggtagaggcagggtttcaccgcgttagccaggatggtctcgatctccatctcgtgatctgcccgtctcggcctcccaaagtgctgggattacaggcgtgagccaccgtgcccggcctcagtagaacccttttaactgcaatgttaagaaactcattattcattcaacacaatagttcttaaccctggccacacctttagaaaaaaaatgatattcaggcttcatctcaagagttcagttcagtgtgttggaatggagattatacgtaagtatttaattaaaaaccaaaagcccccaagtgattttaaacagccgcagttgagaaccaccgattaaccagtgtgtcaagggatggcactgtgatatgctgagcataaaaatattgcacaggatgaaaccctgtctctactaaaaatgcaaaaattagtccggcgtggtggtgcgcgcctgtagtcctagctactcgggaggctgagacaagggaatcgcttgaactgggaggcagaggttgccgtgagccgagattgagccactgcactccagcatgggtgacagagtgagactccatctcaaaaacatgtatatatatatatacacacacacacacattgcacaagaacagccacaacatctgtgctcacagaacatcagcatgtggtctaacttcaaagtgttgtaataatgcggtttgagactaggttatgtttgctgtgatcactaagttaagcattagtgagcaaggagattgagaaaatccttaatataaataatatttcttaatataactataattcctaatataactaaggtcttaatttatatgtcatctgtttagtaaaggttggttttggcatgattaagtcttgcttgcttaatagatgttggaaggataatttcatgcttatcttctttggacagctgaatcaggattaatacccagatagccttgaacataagtgcttgcaaagcacctgaaagaaaataagcatcttaagcccaatacaacacaatgatgctagtctagatcttggattaagtgttttaatacttttactctaattgccaagttatcttcttcctaaatcttcatgagaaaacccactaaaagaatgctttttcctggtagccttccattgtgatcataaagtttggaagtaaagttgaaaataaacatgtgggccaggcacggtggctcaggcctgtaatctcagcactttgggaggccgaggcaggcggatcacaaggtcaggagatcaagaccatcctggctaacacggtgaaaccatgtttctactaaaaatacaaaaaaaaaaaattagccgggtgtggtggtgggcgcctgtagtcctagctactcgagaggctgaggcaggagaatggcatgaacccgggagatggagcttgcagtgagccgagattgcgccactgcactccagcctggccggcagagcgagactctgtgtcaataaaaaaaaaaaaaaaacgaaaataaacatatgaataaaagttaaaaatagaaaaaaaacaagaaaataaacatatatttctgaccttattgattcttgatattttatctgcatggaaagctattttttggcagttattattgttcttattttagagacgaggctgagcaggaagggtcctttgaaaaagaaaagattgcccttgaacccctctggcaagtgggatgaagtctgcttcccagcctctaacggccttcttttcattttcccttgcagttcagctctggactgttggaaactatcactggtatctcaagcaaagtttatccttcagcacctgtgggaagagcaagattgtgtctctgatgtgggaccctgtgaccccataccggctgcatgttctctgtcagggctggcattacctcgcctatgattggcactggacgactgaccggagcgtgggagataattcaagtgacttgtccaatgtggctgtcattgatggaagtaagctcctgggaagtgtgtccatgagcctgcaaggggtcctgagcctagggcctgcagatgtggtggtttgactggaacagtggggaatctttatttgttttggctgtttgggttacttgtttttttattgaatgggatataaggtggggtatgttctctcctgagaaccattgtcccccctcccccaccagtttcctgttatactgcatctgtggccttcacacgtttacttgcctggcctttgaagacactgaaaactttgactctaggtagagaggatgacaacagtacagtcttgtgggattgggtgtgttagctttatctgtttgccctgacacagatttataattgacccttataccaccccacttgtgttgctttgtttcctgatacaaatgcttgctgatatatacctctccagtatgttcagttcatgcataaacgtttgcctaatatgaagattaggtttatattttataatgaggtagaaggtttttttagggggtggggtgggaagggcaagactgaagagtgaagtagtcaccttaatgaatagtttcattgctgatatgaaagggagcactggcttctaagattgtaatgtgaggtggtatattaattcatattctgtgtaatattctacataatactgattttatagtcatgtattctatatagagaacttaatcagatctgcgttattaccaaatccacacataggaaagtgctttaaggattttgaaagtattaattcccttggtttagtgtggcttggttgcaggcccaggtttaaagctagaggtctgacctcttggcctttttgccttagtccctggcacctgaaactccaggtactgagatggactcccctaggcctagaggtgacaatagccaattatggacagaacccatgacatttccccatcccacactgtttttagacttgttcctgagaaaaacattgaaagttatttttttgtgaattgccattattgtttagatatactgtgatgttcagatggcttatcttacaaattgaatatccctaggtctaatcctcttctttctttttcactgcagacagggtgttggtgacagtcttccggcagactgtggttccgcctcccatgtgcacctaccaactgctgttcccacaccctgtgaatcaagtcacattcttagcacaccctcaaaagagtaatgaccttgctgttctagatgccagtaaccagatttctgtttataaatgtggtatgttataaaacttttgccaagatgttctgaatcaagtcccttctactcctacataaaagcaaattatagtttggtgttgccataggtctagtgtttctcaaaatttttaagtctgcagttgatatcattatcattatgatatttaattgccttgggtttttgttttttttttttttaatcctatactggtttgtacgagccattccttttcccttactgacttgaagagtcagttatttaagaataacattggactctggaaataacatagtatgttatacattgttaacatgttttactcttttcatagcctttacacatattttcagttgatctcatccctcctaggagctgtgtcagagatggggttttcctcttttgtagatgagggaacacagtgtcagaggttttgtaatttgtttgaacaagaatggacaaggacctcaacacaggtgttctagctcctaatccacttgtcctgccacagccccattgctgtcagttcttcattactttcctgatgtgctggagaatctgaaatttgtttttacttgtgagttctgtggttatgtcataaattctgctggcatatggcagtgttagccttgttttcaaatatcttttgaattctcagaaaaagcctagatagttgccaagagagaataatcaaaattaattaatttaaatgggaagtccttactttcatatcagcttttctgttaagtcagcagcccactgtgtacatggatcctatctggatgtatcaccagtttctctgattatagtttcagtgtgtaaaatgctgttacagtcctccttaaacttttcaaaatagctttaaaaaaaagtgcaaatatgttcattgtcaaggcaaaaagaatcagatgtaagcttttgtgggacttaactgtatgatgctaatgagtttatatgtcactttatgatgtatggtatgttttgttctgcattcacttaaaaaatagctttatatcattcatctatttaaagtgtacaattcaatggtttatatgtgtgtgtatgaatatatatacatatgtatatgtatatatatgtatattcacagagttgtacagccatcaccacgatcaattttaggacgtttttatctcctcagaatgaaaccctgtaccaccctgcattcattttacttgagagaaaactccctgtgatgagataggacaggttgagagctccacttttgaaagattgttcggcatcaatatgtggggttggccataggtcaggggcacctggaggcagagattctagttaggagaagctgttgtcaagtgtccaggcaggagctagcaagagcttgagccagagcagtgttcatagaaatggaaagaagagaaagatcataacaaatccatgaagtaaaaaccctgagaagttaaagaacccactggggagagtttggatataagagaatctggaaaaagagatcttggactggaacaggtcagggctccgtgcccaagtggaagggaaattaagaacttggagtcaagtggtagacatttgagtggtgtggagacaagttcgttgccaaagttttcaaagatggtgtttgatgcatcctgagtatcactcctttttccccctcattgcttcttgattgtttattatatgccaggcttttttctagtacttggcttgttgtactagaaaactagttgtactttgtctacaacttgttgttctaggtgtagacaaaagatatcaattaaatatgatctatcagatggcaagtgctgtggagaaaaattaagcaaaataaggggtagggagagcttaaggataagggtttacagggggaaggtgtctttcctatttagtgtgatcccaaaggcctctctgtgaaggtgacattgaagcagagacctggtgagaatcacagtgggagccacgcagacatctggggtaagagcgtcccaagcattctatgcttgaaggcaaagaagaaaaaagaaagagcgttccaagcagagtaaaaagcaaccaccgaagtgcctgttgtgtttaggaaatagccaggaggccagggtggctgcagcagagcaaaggaggggaaggtggtgggtgagttcagagtggtgatgggaatctgctcttgtagggccttgcggcttttactccgagtgagataggagccaccagagggcttagaacagaggagtgcagtgttctggctgaattttttaaaggcttgcattggctgctgtgcagtgaataaactggatgaagaatagaaagaaaatgtcttttaagcaggtgcttaggactttggagaatttgaggatattgagaggtggttgaagacagtggaggaaattgtccacagcactgggctgagagggtagccccttcacctggtcttgctgagatgtggcctttgtcagggaagattatgactgatgtgttcttaagaggaaagcagaaattttaaggaggttgagatgtgattattttctagattgctgtttgccttctagaactcattaattgcagacaccatccccttagtattaggtgaaatcttataatttacgatgataatatttgcatttttgttttccaggtgattgtccaagtgctgaccctacagtgaaactgggagctgtgggtggaagtggatttaaagtttgccttagaactcctcatttggaaaagagatacaagtaggttcttaattatcttgggcttctgggaacagaatcagccagcatgcagtcctaaattcagccatctgataacagttctatgcctgttgctgagtggaacaagaaataaagacaacacccaggccctgactttcggatctgattggagaagccagtcatgtagtttgtctgaatgccatataatttgataggtagcaggagagcatgagttgtaagccagcctaggacctactcccaatagcgcttggttctccaggaaaaatcatgtgggaaagatggagatgacaatgataaggcggagctgcattctcttacataaatggggatgtatgggttgttaacatggatgacctaatgcagcctctgtctttgctccatcccagaatctagaacttctgggtgctgtgctttgaggctcctgggatggaaatcagaatgcattcttccattgaaacagtattgtaaacaattggatgttattgaatacctcaggtacactataggcatttgcaaaatgacctagaaaccaaattataatgccacatctgtgagagaacttttttaaaaagtaccacttattgagtacttacagattaaaaaaacaaagtgtagaggttaggtaacttacccaaggtcatggacctggtaactagagaatttagggtttgattctattctgtttgataagtccatgttcttcattactaaactactctgcctccagggaacatttattgttagattaatagaaataattaactgagtacaacaaatagcagaatttaataaataatgtttcttaaatatatgtgatatatttaataaatacagcagaagtgttcaacctctgtatgattttgaggctgcctgtataatgcttagtagtttttaaagagcatttacatgcattatttcacttcatagacttgaaaccactagagtagagatagaggacaaattagaaagtatgaggcagtttagaatatagtttcatttaaaaaaaattgatggggataatgccaattcgtctgagatttcacagaagacatgagtactcatcgtgatcttggggaagggataggtttggggttggcaaagaattgggaacattgggtctggtggggaagaaagtgtcagtgaaaaccagaggtgggactgatcctccatgggatactctatgtgaatgcaatggagagcctgagtccggggagagatgtttgaggaggaagatcaggctagtgaccaacttcttcagtgggagctgcggatttgccacctgatctaaaaggcaggaagtagccattgtcggttcctacgtgaggtgacaagaacagtgcgctggtcaggtgtataaatgctaccaaagaatgcattagagacatggagaccatctctcaagctagtcagtcagtttaatgtgaggtgcttaggaaaggacccattctactgcaagtgacatacctgccagagcctggtttgaatgctggtaagtcatggcagtggaaaagctctggggttcattagtgtagggactagggctggtaattttcttgtgtagtcagtttcctcaagtgttctcttcaaatttaaagatttcagggtatgagaaatttagggaaaatataaaaacgtattcttaagccagacaaagattaattttagattttgtagtatttggtagtatctcaggttttgtccctccaaataattaggagtggactgtatacaagatgcttcagtcttccttcatccaggaacgtctcagtggtttttaagttttattcatgtcttggatattcttcaatatttacaatagaatccagtttgagaataatgaagatcaagatgtaaacccgctgaaactaggccttctcacttggattgaagaagacgtcttcctggctgtaagccacagtgagttcagcccccggtctgtcattcaccatttgactgcagcttcttctgagatggatgaagagcatggacagctcaatgtcaggtattgcagtttttccctgtactccacatgttaagcaaatggagttaggtttttgtcttttatgagcatacaacttttgacttctattgatcaaggttgaggagcagtagctttcttgttagacacacttaacaagaaggttaagtctagttatgagccatgtcaaaataacagaccaaaaatatatcaaaaagtggtgaaaaataggataaatattagtagatgaagcaactttttaaagatatgttaaatattttaatttagcatctacccacatttttccagcgtgattgttatatgttataattgattttaataactgtcaagcataattagagtggctaattctcatgggctaatgtgatgggaagaaattttgtataaatgcagtcatgcgcatatatgtgtgtgtgtgtgtgtgtgtgtgtgtgtgtatacataccttttctatgtttagatacacaaatacttgacatggtattacaattgcctgtagtattctgtaaagtaacatgctgtccaggtttgtagcctggtagcaataggccataccccataggctaggggtgtagtaggctacaccacctaggtttgtgtaagtactctatgatgtttgcacaatgatgaaatcacctaacaacacatttctcagacgtatccccatcgttaaatgatgcataattgcacatatatgctttgttttgatgtggtgacttcaaaatgcttcttccagcctcctcttctatatatcctattttgtacctgactacatttaccattagaaagtctctattcttctttgctgaaatttcactgttctctgggcctgagttttgttttgattcctgactatatcttcattatgtaacaggtttcagttaatgaatgctcttctgtgtaatgtaagccctgttgtatagttgatagcattttctagccagttcccagaactccttgtttccagtgtcaatacttggcacctttgtccactgacactaatccccagattaatttgtaattaaagccctactggtgagatttctgagaaacgttgttgcaaaattaggaacctttcctttatatatatacattacataaatttatagacataaaacattttaatgcagtcatttgctgctactctttgactcatagtctttcgtgatattttgaaaaagccttttgttaacatgtctaaatgcagaatatgttctagaaatatgtagcacttaaagtaagccattagattaccttttgaaaagcggagcaatttactaagtttctacttcttcagatttgaaattcttcatcattagcttgtagaggcaaaagcttgatgcagtcatctcatttgctgtaaaggaaatgagaagtcatttacagtatatttctactgctttgacttttatttctcaaaaagactgttttgttcatataaaatattaatgcttttgaggactacaaagtccctcgatttagtttacatttactttagcttatactttgtaaaaaatactcttctaaatgctttgtctgttttagcttacttatttctcataatacctctgtaaagtatatgccatttgcaccatcattttacagatgagacaactaagacatggagcagttagataacttgcctgagatcatgcaggtggagccaggatcaaatcccagcgagtctagctccagagtttgttctcttcttgacagataatttatcctcacaaaatttgaagcatttgtagaggaattccctattgttataatgtttagtttttttgtagattggttaaaaactttgaattaaatgttagcattaacatcatttgcttttatcactacttctttgtctcttttttctttttttaatcactacctcttcctcctcttttgagaaattctgcttccgtggctatggtccaagctacttgagaaggtgaggtgggaggatcacttgagcctaggaggttgagattgcggtgagctgtgattgtgtcaactgcatttcaacctgggcaacagagcaagacactgtccaaaaaaaaaaaaaaaaatagtgaaattttacttcgctccattgactcagggaaaaaatgtaatggtgataacaaattcccttcatctcattagtgaaaatccacaattttccatcaatcgatatgatagtgatagagatattgagtgtgctcattttcctacagaccagctgctttaactattttaagcagacagaaatgatattggtaccatccatgtctaatgaaggcaatactttgtaataagttgcagtaagttgtggccagaagaggaatgatgacttcacagtgtaaacaactaccttattgggtttgtggaaaatggtgtcatgtagcagatgtggctttatctgggctttggtttggagtagttttatctattcatctaaccgtctgtctctaagtgtataagtgtgtgtgtgtgtgtgtgtgtgtgtgtatagtattgggtgtgtatatatgtattttgtctacattgtattgaagtaggtagtgcagcatcaaaaggaaattgttgattttcaaaatcagtgaaatgtcactatttttgagaaaaatggtctgtttacactcccttctccttttttttgtcagttcatctgcagcggtggatggggtcataatcagtctatgttgcaattccaagaccaagtcagtagtattacagctggctgatggccagatatttaagtacctttggggtgagtatcaaggtgttaggaaagcatgttatgacttacatagatgcttagttcttaagaacatgtacttgtatcttgtcagttcaatattgattgtcaggtcttttaactaccctggaaaaccctaagctttagagtggaattggcaagtgtattctactcctgtttcctcttttaatgaactaacgtactcttaaaaaagtgattgatgactatcgcagggacaaaaaaccaaacaccgcatgttctcactcataggtgggaactgaacagtgagaacacttggacacaggaaggagaacatcacacacctgggcctgtcgtggggtgggggagggtggagggatagcattaggagatatacctaatgtaaatgacaagttaatgggtgcagcacaccaacatggcacatgtatacatatgtaacaaacctgcacattgtgcacatgtaccctagaacttaaagtataataaaaatatatatataaataaataatgccagcattagagaaaaaaagtgattgaaattgcatgttaagtgttttagcaaatgttgatgttgatggttttttgcaaagagcgcatcagctatttgtgaactagatctgtgaatcttgcagagtcaccttctctggctattaaaccatggaagaactctggtggatttcctgttcggtttccttatccatgcacccagaccgaattggccatgattggagaagaggtaggtgaacacggagcaggaaatttacttaaagtagttacccagggactgatggcattaagtagaaagagcgtgggctttggaggtggacttgggtctccactaaatgcctagacaatagtgggaaatgatctcactttcataagccacaccttattcatctataaaatgggaaaatcagtatctgtctatcagggttcagaagactaaatgagataatatatgtgattagcaaccttttatccctagttgtacaaatcattcaaagttaattttatttaggaggggaaacagaaatgtgatcttgagaatagttttagtagatttttattcaacacatactagaatgcctataattgtggtggatggtagaatgcagtggctggaaaacaaaaccgcttgactaattcctgctcttctggaacttgtgatctattaatttcaatgtaatgattccctttgttgggagtgtgatggaaatggacagagtatactggtagagaatactgagatgtttgaggggtaatttgaggatggtggctatgagaatgggagtcctgcatctggtggtccaggaaggcctctcggaggcagtgatgtgtgtgctgagatgtgaagaaaaagaaggctctgtctccaggcagaaggaacaacaaactccttgagcttagcaagagctcatcttattcaagggactggatggaagtattgtggctggagctcagtgacagtcataggagggaatttgggttctttaattgaacaaagattagaaacttcttgtgatttttaataacagagtaatgtgttctgcttcatggtttggacagtgattctggctgcccagaagagacttgattggagagtgacgagactggaatatgggatcaacaccggttgagtggagttagtgaggggaaaaaggagatgggtttgagatatgtgtaggagatggagatgtcagggctcactgatggattggatggcttcacattccattttgcactggaccagccacgtcttaggtatctatctttagtcctgattacaggaacttaggtgtgaaatcatagggtggtagaactatgtgatagaaaaggtaggtttaactgatttgagatagaattgcttgtgatttcagttttatttctttgcaggaatgtgtccttggtctgactgacaggtgtcgctttttcatcaatgacattgaggtatcaaggcttggtttggtgttggatccttttcacagtgttagctccgagtaatctagctagctttcacccatgcctctctggccttctcttgcaggttgcgtcaaatatcacgtcatttgcagtatatgatgagtttttattgttgacaacccattcccatacctgccagtgtttttgcctgagggatgcttcatttaaaagtaagttttcaatgtataaaacagaaatggtcccttctccaatgtcttttggagtcttgatgactttttgaattcttcatttattttggctttttatcaaggagtcctaggctggagaaaatctttagagttattttacttagaccctaatctcaacataatatctcagttaaatcattctgcactttagtaaagacatccaaggaagggagttccttccttaagcagcacattctaaagttaaaaacttttcaggaaattttattatgtaactgatctaatattttatttggaattactatgtagatccccaatgttttaccttctgtgtagtcttttcccactgtgcccaccctccactgtacatctgcgctccatctagtggtttgtaggatattggctgcattttgtcttctgttccatgccctatctatctctgtgtgtgtggcgtgtatgtgtgtgtggcgtgtatgtgtgtgtggcgtgtatgtgtgtgtggcgtgtatgtgtgtgtggcgtgtatgtgtgtgtggcgtgtatgtgtgtgtggcgtgtatgtgtgtgtggcgtgtatgtgtgtgtggcgtgtatgtgtgtgtggcgtgtatgtgtgtgtggcgtgtatgtgtgtgtggcgtgtatgtgtgtgtggcgtgtatgtgtgtgtgtgttccttattctaaaaagccaacttattttctttgcttccaacttggaaatagggaatctttctttcattgatatgattatagtacactgataatgctaagaaatagagaagttgccccaattcttaactgtgtttctccacatcatttgagaagctgtgtatgtgaatgtgcatgagggctctgtaagagagagggcaagttccagggatgagcgtgttcatcagcagggctgatagtcttgaggttcagtgggagagctaaggcacatggttgttatttgttctcttctatttcacataatgtgtgcggtttcaattgcagttaatggagagtggcttgttgtgataattaaggcttattagttaatggtgtgtttagcattacaggccggcctgagcagcaatcatgtgtcccatggggaagttctgcggaaagtggagaggggttcacggattgtcactgttgtgccccaggacacaaagcttgtattacaggtaagctggtttttcagacaagatagatagtctgattgtcattcagccaagtaccaagcataattcttgcaggttgtattttaggctttcttattctttgtatcgtttattgtaaacctttccttgatagttttctgttagctttattcaaaggagtgttgatacaggctgtgaccataaggctcaaagcgaaacttttcttgaaagtcaagataaatatagagaacaacaagattctgctaaaagtgtgctgattttagagagttgtggtaattctctgtgaagagttaggtaaaatggtgtatcctggctatttaaatgttttctacttaattaaaaatgttactgctttaatttatttaagatgccaaggggaaacttagaagttgttcatcatcgagccctggttttagctcagattcggaagtggttggacaagtaagtgccattgtactgtttgcgactagttagcttgtgatttatgtgtgaagacaataagtattttattacaatttcgagaacttaaaattatgaaaagccctcattacctatatcatcaatcagattcttagaggctcttttttttttttttaacttttttactttaatgcagtattttgtagtggagattcctagcagaaagaatcgtgacactcatcatataaaggagggcttctcttaacctgagggaacacatgtgggttttaggtggcctgtgaacccagggagattgtacacaccaaaccttgtctttgtgtatttattcaagtagaaagcccacagctttcaatagatttacagcggggcctatgacccagaaaagcctgagctactcttgtgaaggaaatgactgattttctgaacctatttggaggaaactttgtattggaaagatctatactaatgttttgtttaaaaagtagacctgaattccatgatgattttctttgttttttttttgagacagagtcttgctctgtcacccaggctggagtacagtggcgcaatctcggcttactgcaacctctgccttctgggttcaagcaatcctcccacttcagcctcccgcatagctaggattacaggtgtgcaccacgcctggctaatttttttttttgtattttcagtagagacagggtttcaccatgttggccaggctggtctcaaactcctgacctcaagtgttctgcccacctcggcctcccaaagtgctaggattacaggtgtgaaccaccgtgcccgggcttctgtaatgattttctgttgtatgtatgtgaagatgtagttctcagacagtcatgatgactaaattacaccttttaagaaggtaaatgaatgtggtacctgatttttttattctgtaatttcagagtagaaatccagtgatagcagcttggcattggggctgtaatctgattataactggtttgtatcataatgaaaatatgctgggcccatggagctcagtttttgtgaatatcttttctattctttctctgtcttctcacagacttatgtttaaagaggcatttgaatgcatgagaaagctgagaatcaatctcaatctgatttatgatcataaccctaaggtaactttctaagctgtcatttactctagcttactttgtacttaaactaatatgatctgaacgaagatgttttgtcctttttttggtaggtgtttcttggaaatgtggaaaccttcattaaacagatagattctgtgaatcatattaacttgttttttacagaattgaagtaagtattttgaataattcatgtgtatcttttccatagttttctctcttcttgttaaggaaatcaagcataaatagctagagaagaaaaattccttactgttcatttttaaaaattgctataactcttagatgccagttggttttttgctcttttccgttctttttaaaacagcctgtttaaaactatgtccttaaaacatgtcattcagaattattatttcacttgatttttaggtatacatataaaactacttgtttttcctaggagactgaaatcaaatggcatctttctctctgatgatctttcccctcaactttttaatgaaacactttcaaaatagagaaaagttgagagaattgtccagtaagcaacctatatataccccacctggattcgccagtttatatttttctgtatacacattctcattctctataatctgtccatccatcattcatcttgtttgtagacaaattgctaagtgagttgtagacatcagtccactctaccacctgtacttctccttgtatatcattaactagagggcattctttgtgtatgggttggttttgttgtgttttttcaggtcatatttatctacagtgaaatgtccaaatcttaagtgtgccacttagtgagttttggcaaatgtacacttcatgtaacctgaacctctgtcaagttagagggcatttactccttttcagaaagctgcttcagattcctttcaatcagtccctgtcccattccccaggcaactactcttctgaattttttaccataaatcagttttgcctgttcaagaacttcacctaaatggaagcatacagtattactcttctgcataaagctgttttcattcagcatattgtcttgagattcatctgtgtttttatatgtatcactagttcattctttttttattggtcagtagtatgccgttgtgtaaatacaccactatttgcttattcattcccctgttgctggacatgtggattgtactaccctgtttggggctaatgtgactaaaacatctacaaacatttgtataagtcttttgtggacatgttttatttctcaatatttttataattcaactcttttccaaaagtcatttttatttatcatcatcagcatgccaggtgtatgttagtaatttgatcgctgggctacatgttctgttgatgaccattccatacacacctgttcttagagaagaagatgtcacgaagaccatgtaccctgcaccagttaccagcagtgtctacctgtccagggatcctgacgggaataaaatagaccttgtctgcgatgctatgagagcagtcatggagagcataaatcctcataagtatgtatgctgtcaccaggtggcatcctttgaaaaaccgaagtgtgtagttgtccttgtccagcctacttacctttctcattctggtgttcttcacttattacctcagatactgcctatccatacttacatctcatgtaaagaagacaaccccagaactggaaattgtactgcaaaaagtacacgagcttcaaggtagagatccgctcacagagaaagtgcttaaggtggccgtgactgctactagtcttctgcaggtgacaatcaccatgtcattgccacaccacagatttaacatgtgactttttagttgccattttaagacccttgtcagtttttttcagtgctgccctctaaagcatatataaaagtatcagaagtatatattcttctgatgtccagttctattgagaaaaatttattgtctttttggttatgttgttaggtctgtggattttttccccaaatgattgtgttctgttttgttttctaaacactgttaggaaatgctccctctgatcctgatgctgtgagtgctgaagaggccttgaaatatttgctgcatctggtagatgttaatgaattatatgatcattctcttggcacctatgactttgatttggtcctcatggtagctgagaagtcacagaaggtatgtggagttcttacttttatgccatttggttcttgtttatataatgatagtgtgaaaccctgcttctggtagtgcagtagcttttctgctatcactctgtgagtgcagggctggagacagatctgtgagtttctagggcccacattcctaagcccctgtgcttatgaaagtgttttgattgtgaggttgaagaagtgaagtaaaattgcatggcttttttttgtttctttttttttgagacggagtctcactcagtcgcccaggctggagtgcagtggtgcgatctcggcttactgcaagttccacctcccgtgttcacgccattctcctgcctcagcctctctagtagctgggactacaggtgcccatcaccacgcccggctaattttttgtatttttagtagagacagggtttcactgtgttagccaggatggtctccatctcctgacctcgtgatccgcctacctcagtctcccaaagtgctggaattacaggtgtgggccaccatgtgcggcctaaaattacatggttatttttaagatgatgggcatatgtgtgagctaatttcttctcttataaaggaaatgtaacaagtggttcatgttccactccggttctttctcacatggctcttttttctagtggagggtgggcacatggagcacagaaggctcatggcctcctttcctatgttggtacatttgctatgatcaaaaactttgaacaccactggtatgcatattttttatttatttttttgcagcctcagtctcttccccatgacctctccaaaaatgaaaatcggatccttcatctctctgcttaaaatacttcatgagctcccattgttccgaggatataattcagaagccataatactgcttaaaaacccttccttgacctggcctctgtgtatctttccattctcacttcttggtattgtctttttttcctctgcccatggaggaaagacaatgcttttgtcccccttcccttgcccctcaccaccacatgccttggtgggcagcattacttctgccatccatgggctttgactgcttccaccctcaccattcccctggctaattctcactaatctaggttaaaggatgccaaggtggcctcttcccagtaagccattcatgcttccctccagggactgggtgaggtgaccctcctatatgcttctgttgcacacagtgcctacccctgcagactacagtgtgtctttatctagagtgcggtatttatttatttatttttgagacaaggtcgggctctatcacccgggctggagtgcagtggcaccatcttggctcactgcaacctacgcctcctaggctcaagcaatctcacctcagcttacaggcgtgcaccaccatgcccggctaagttttgaattttttttgttgagacggggtttcgccatgttgcccaggctggtctcaaacttgtgagctgaagcaatccatctgcctcggcctcccagagtgctgggaatgagcacttaattatttgttgtcttgggttttcttcctatgttgttcttacatgtatttatcctgtcagcccagggaaattgcattaaaaacaggaaacacctctccattaggaagaaaaacaatttgcttacagggcatggcatagagctggagatgatagtgccaataaatactaggttggcagggtctcagagttttgtgtccaactcagtataattttatgtttgttttaatgtgatcatttcaggagagcatggaatgtcatgaaaacagcaccaagagcaatgtcttagacttttaggagaaacttagatgcatttgttgaatatcttctagactgaaaccttatttcccttattagcctatgaaataaatgatactgtgagacttagttaaggaagttactattattccaagtgtaacttattaatatccgtatgtgaaagcatttttgccaaagcttgtttgatgttcagctgacccttgcacaacgtgagtttcaactgtgcgagtttgaactgtgtgggtttatctaaatgtggatctctctcaaacacagttggccctttgtgtccacggcttctgcatccacaatcagtgtggatcaaaagtacaatatttgcaggatttgaaacttgcagatacagagggccaacattttgtgtatccaggctccatggggtcaaatgtaggactggggtatgcttggattttggtatccttggggtgtcctggaaccaattccccatagatactgggggacaactgtagtttgattttatatattatataatatgcagttaatatataatacacatttaaaaattatgtagctttgggtttattgctatatgtaaatgctagtttctattcctatatatgaatatcacaagtaataaagttctcattaatcatttttttaggatcccaaagaatatcttccatttcttaatacacttaagaaaatggaaactaattatcagcggtttactatagacaaatacttgaaacgatatgaaaaagccattggccacctcagcaaatgtggtaagtgtggggattagtatgtttatctctacttcagatcttctttggaactaggcaaggtataaattaaactgttagtttagacagtgactgatttcacttcccactcctgaaaactctaacaattatgtatgctcacgttattttgtcctgtgttctgaaaagctgaaggtaatcacttttaatgaactggaggagctccctaggtaagaacgtcaagtagatccttttttggttaagaatgagcacctgtgaagttaacttcagtgtctcagaatcaaaattggttgtcagttcttccttctcatgctgtttgcagacatgtcagggaaactctgcttgtctggagagagtgatgaggccacctccccgtgccctgcaagacgcagttttaattgacagtgatggggtgccagttgttcttcccatgctggaacagttgtgattctttactgaggactgatgggggaaaggaagaatcacctggggtgcatgttaagccttcagctgctggcatccttggagaatctgattcaggtggtctgggataggactgaggcgtgcatgtgtctaataagcttcccaggtgatgtcttttcaaggaggctgagaaaacactgggctggaaagctgggactcttaagtaggatgctgatcccaatcagtgctgctcttgcctcagaatctgcagtggtgctcattaaaaattcaaattccaggatcccattcttcagattctctgattatttaggtcttaaaaagttcctcatttattttgtttggtgaccattggtataaatgaagtccattatgcttcccatgtcttaagcctgtctttgtgtgaatctttttcctgcaggacctgagtacttcccagaatgcttaaacttgataaaagataaaaacttgtataacgaagctctgaagttatattcaccaagctcacaacagtaccaggtatgtggtatgtgaaaatgaggctctcctggttttgctttttgctttagtaggaaaggagtgaggatcctaagttcataacaccatccttggcttcaaaatttatcttaaaactaattagcctcaatttgaacttcttatctgggagaatggtcctgacctgttctctgattcctcatctggaataccacagcaccttcctcgtggggttccctgcttctttcccacccctcctctagcccaaccttactgctgtaagtctgattatcctaacaagtacagatctttcccatatatttcagcataaagggaaatttttgtttgcttgaaaaagcatccctttagctttttttatataccacacactttgcttctaagttaaatgtgttatatgatcctcttaacagcctcatagggtgctgtacacaatttgtagatgaggaagcaacttgcctgaggatccagagctacaaagtgctggacctgggatacagagcccaggctgcctgaccaccctgcccatgccattaaccaccactctaccatgccaccagcatcaccattttcagtttgtcctcagacaatatacacatctttctttgatcaagcccctgccagcttctttagcaccagcttctgccactgtccacattcccagttacttgtaggtagttctacagatgtcacatcgtgtgattcctctgtcatttctctacccaccagccttcctttagccccatttgtccatcagaacccttgggttactcctgaatgccattcctggaccaggcgccaaacactgagcccccagagcagcctgccctcgccttggtgattgcatttgtcaaactgctgattagctggtttgtcgcctccaccaggctgtgggctccttaagggcagggactccatgttgtattcctctctgaatctctggctaacatccagcctggagaatcgaggatttggccagtggctacctctttgcccttgttttctgttctcttccacactctctctgctctagtcacactggccgtcctgttactcctcagacctgctatacacattcctgctgcatggccatggtgccttctctgccctctgcctggtgccccctatctcatcacgtggtttattctcctgacagccattagagctcacactccctgagagctgcaaggagactgtcctctgtccctttactcacgtttgccattatgctatagactatattttgtccctaagtccatcctctgttactataagagcagcaacttggtggtggttcttatatggtttttcatttgtttggttttattttttgccttgctgtagtatccatactgcccagaatggtgcatatgtagttaagagtaattatttgttgagtgaataaatggcacatcctcagtaaggttttgaatgaaaaaatgactgtactaactgatcaactgtaagattttcccaggtaattctttcaagggagttccaagtataggaactaaggcagctacactggagctttagagaaatgattgtcatatttcctcctcagtcctaaatctcctcttgtcacaggatatcagcattgcttatggggagcacctgatgcaggagcacatgtatgagccagcggggctcatgtttgcccgttgcggtgcccacgagaaagctctctcagcctttctgacatgtggcaactggaagcaagccctctgtgtggcagcccagcttaactttaccaaagaccagctggtgggcctcggcagaactctggcaggtaagtacaatcatttatatgtttacatctacaaaggttttaaaaaatttatttcttttgtttggtaattttgcaaataaatttagggcagaatactctgagacagtcttgttctcactgataaaaattaatttagaatgctttaaaggataagctactacagcaagagtcccagaatgcagtggcccaatatggaaagaagtttatttctctctcccatagggatttataggcccttccgttgtgtggctctgcaaccttttaggcagatggttgtagctgggttatctccacagctgtggggaaggaaggagagtggggagaagttagaatcatggtaaaacatttacctttaagttggaaatgacctggatggaagttaaactatcaccttctattccatctcggccacgccatgtagctggatgggctgtgccctgtaagaaggtaaagatgaatttttggatgggtccattctgttatagacagtaggttgttggaatagccaggaatgaggtggggaaaataaaaggccaaatgtcgaagcattctgaaagcaaaggcagtttagctgcgtcagggacaagggttgcccgaaccagaggcgaggctggtaccaggggctctagtaccagagtggaggaaagggtaaggacacctatgaaaagagatgagcagaagctctggtcatctcagcagtgcttgaagtaaagcaatgactggtatatttttttccctaacttgtaaatattgttgagatctcaaagaaaaaaataaaaagcagtcctaaaaaaattccaaactctatcctgttaaattttgttaaatttatgtaccagtccttctttgtcatttgcagtattctttttttcttgggattataccagtgtatgggattatcacttttctttttctggttattagcctttcccaaatccctccgtttccatgctggcctctttttacaaatgtcgagaattccttatttcaggccttttagttattcgttcggtctccattgttcctttctgctttagaaatttatgatattggttgtttataccttctatctctgttcttggatctcttctattctttacagctcttagcttgctatttcccatgtcttatgagggagtatttctagtttttctcagatgtttagcaaaagtaggtggggagggcagtggtcaaagatgtttgagaaatgttacacactggagtcactctgtgtgtacatttaacgtaggcagtttacacaagagagcaaaagaaaggtaactatttaaatagtggaggtgattttacctactttttttagtgatatatgcactggagtgagcatgcaatgagagaccggaatctaccagctccttcgaaagccttgggttctctgtgcctctcattgtggtttatctcaattgggctgagagtgattctaggatctaaagacactgcatgactcaaacataagtcagctacctccatctagtgctcaaccaaagaaatagtggtctcttactgttaagggacgaagtggtttagtgagagataccaggtcattttcccatatacatgctttggaagcatctttcaaggctaattttggctgtatatgattttcaattcctgtgctaaatttagattctagctgccatttaagataggactctgtggtgtatatacctattccctcacagaaattcagaaagtacatagtttcatacataataaagacatattaaagaagcacttgagctaaagtatctgtttaactttgtagtcaactgctgcttattgtctctacaggaaagctggttgagcagaggaagcacattgatgcggccatggttttggaagagtgtgcccaggtaaactcaattcctcccttctaaaccccccagtcagcaagaaaggtcttctcaattgtatcttagtgatcatgaaagttaaaggaactgtgcataattgttaagtccagagatagtgtttgccccagaggtcttatcttgctggcttgacttggaaatctaaatttagtacatctctaagtttggtgaggtagaatatgaaggtgctctactttaacataccactggtttgaccttggtagaaagtacttaattacatctcaaggtagctgtgctttttaaaattgagtttgccaaagtagaaacaatgagaaaggaccattataaaacaggatcattgaaggctacatactcttggcttttactctcattctccctattggaaatgtctcttttacctcagggacctggaggtacagcagattataaggataagtacccatatgagcatttggtagtattataggatttattatgaaaataataaaactgcagtaacactggccacagactaacagtacacaggtgcacagttgacaccagggattattgccttgtagagttttgacctttgatgagagagtgttttttacagttgttactgatagcacatttatgtaacttaattgtgctttaaaaatatttaattgtctcttgtgtaataacagtaagtgaaagacgataactaaaattttatataattagatcctggagagaatatttgttgggtgattgaattgaaaataccagtgaatgaaacatacctaaaagggtagataggttgggttggaaagatataccacatcgagggttaattaaatggataagatgtcattatctttttttctttgtaaaggaagattaatgcataaaattattttgtgtaatttacatacaataaaattatgtgttgtacagttgtataatttacatataataaagctaattcaccaattttagatgaagaattcagtacatttggacatatgtttgtagctgtgtaaccaccattgcactcatgatctagaacatttctaacacccccaaaagttccctacttccccttttgcagtcagccttctccctccactgccagcctttggcaaactgatcagtcagtaaagtttcacattatctagaatttcatataaacagaaccatatggtatgtagtctttttaatctggctcctttcactcacatagtgcattggagatgcatccatgttgtagtttattcctttgtattgctgaatagtatcccattatatgtatatgtcagaatttgttgatttaccagttgatgtacatttggattgttttcagtttggggttattatgaataacgcagccatgaacattctagtgcaggtctttatggggacaggagtaggaatgccacatcccgtggtaagtggatgtttaactttttaggaagctgcagaactaatctgcagtggccgtatcattttgcattcccctcagtgatatgtgagagtgcttcagtgactcctatactcaccaacactgggtgtattactgtgacactagatgtattatctattgctacgtaacaacttaccttaaaagctggcagcttaaaacaacagaccctattatcccactttttcaatgggccaagaatcttggctgggcttagctggggcctctggctcagggtcctttacaaggctgcaattaaggtattggccagggctagagtcatctcaaggcttgactagtttttaatttcattttctaatgttttattactagtatatagaaatatagctgaagtgttttgcagggaggctgtataattgaccttgtatcctgcaaccttgctaaactcatttattagttctagaagctcttgggtgtattctctaggattttctacatcaacaaacatggtttctataaatatagttttatgtctttcttacaatcaatacttttttctatctgtattgcattttctagggcttccagtgtggtgttgaatagaagtgttaagagtgaacatccttgcctttttcctgatattggagaaaattcacttgtcttttagcattaagtgtcatgtttgcttttttaaaattttattctatattattttatttttgagacagagtcttgctctgtcacccaggctggagtgcagtggtgtgatctcagctcactacaaccttgacctcctaggctcaagcgatcctcccacctcagcctcctgagtagctgggactgcaggaacatgccaccatgcctggctaatttttgtattttttgtagggatggggttttgccatgttgcccaggctggtcttgaactgttggattcaagcaattcgcctgtctcagcctcccaaagtgctgggattacaggcatgagcctccgtgcctggcctgatatttgcttttttttttttttttaatgctctctattgcagagttggcaaactacaacctgtgacaaatccagcatgccacctgtttttgtaaataaagctttattggagcatagccatgctcattagtttacatcttgtgtatggctgctttaacactacagcagcagagttagagttgtgacacagatagtttggcccataaggcctatatttactgtctaatcttttacaggaaaaatttgccaattcctgccctcttggtttgaggaaattcccttctgttccttgttctgagagtttgtatcatgaatgggtgttaaattttgtcaaatgcattttcaactatgaagggttttgtttttagacgagtgatatgggggactaggtgattgattttctactgttaaaccaaccttgcatctctgggttcaaccccacttggtattatagatttattaccctttttctcttgtggcagattagatctactaaaattttcttgaggatttttgtgtttgtgttcatgagggatattgtagttttttcgtgtctttgccatgttttgggtatcaggataatgctgctgtcattgaggggtgacaaaaatgaggggtggtgtcctttacacttctgttttctggaggatttcatgtagaattggtatgagagtctagcttatggttaaaaacctatgtgtgatgtttcagacctgaccataaacaattacagactttacctaggaggccacatggggaaaagctgccctccctacaccagacttggcgtactgccaatgcattacagtttctaaagggagttgcagtcaaggactcagggccccctgttagtcatgctcttgtaacagtatttgcattgagagtcctggcactttcattcttaggtctctctatctgaggccatgggccaaggtcttcttcaggcacctctgccaaggcctgtttatgcaagaaggagtggaaaaaccttgacatttttttccactgtgactcactacccagtacttttccacccttagcccccttcctttgcacccatacccccaagatccatcaaactgctaaagcctttttttccaagctccttcaacagtgaaccaaccctcatgtctgtgtggatccagctgactcttgactagtgagttgttccttgggaaaaaatggaacagagagagttggtgctttccctggttttagcctcttgcttataccaatgcaatgcctgaaggcttaattcatttttgacttgttgctttgatcagctactccaacacctgacagctcagctctttctcccagctcttgggagatatttttttctttaaatgtttagtagaatataccagtaaggccatctcggccaggagttttctttaatgaaagcttttccactattagttcagttactttagtagacattagcctattcaagtttatctgtgtcttctggaatgagcattggtagtttatgtctttcaagtaatttgttcatttcatctaaattgtcagatttattggtatgaagtgtttatagtattctcttattttactgtccgtagggtctatggtgatgtcctgtctttcattctagatattgatgtgtcttcttttttctgattattctggccagaggtttatcaattttattgatcttattaaagaatgaactgtttcattgtttttctctatgatttttctgtattctatatcattctttttttattattttattattttatttgctctttatttttctagtttcttaaggtgatggcttacttttatttttttcttatttttttcttttgttgttgttgtttttttaaagaaacagggtcccactcttgctcaggctggagtgcagtggcacgatcatggttcactgcagtctcaaactcctacattcaagctgtcctcccccctcagcctccagagtagttgggattacaggtgcatgccaccatgcctggctaatttttaattttttttgtagagatggggtgttactagttgcccacgctggtctgaaactcctggcctcaagtgatccctccacctctgcctcccaaagtgctgggattccatgtgtaagccactgtgcctgaccaaggtgatggcttaaagctattgatttgagatgattccttactttatagtttaagcatataatgccataattttcctcaagcaccgttttagttatgttatacaaattttgaaatgttttgttttcatttcctaatttcccttgtgatttctttattgaaccttggcttatttagaagtatgtttaacttgcagatattggagatttgccagccatctttttgttattaatttctactttaattttgttgtgattagagaacatacattttattaatttaaatttataatttattttaatttataatatggtctgttttacagaatgttgtgtgtgtatttgaaaataatatgaaagctactattattggatggagtgttctataaatgtcagttagattaggttgatcatgctgttctagctttttatatccttattgatttcctcactacttgctctatcaatgactgggaaagtgttgaagtctcccagtatttgtctatttctcctttgattctaccagtgtttgcttaatgtattttgaagctctgttataggtgcatacatgtttatgagtatgttatagatgtattcattttgatatccttctttctctgttactattcctaattctgaatttgactttaatgttattaatataattcttccagctttctcttggttagtcttttcattgcatatctttttctatccttttacttttaatctagctgaatgtagtctttattttgaaagtgcgttccttgttgatagcattattggttcttttttttttttaaatctaatttgacaatctctgtcttttaattggagggtttagacatttgcattgaatgtgattaccaatatagttagatttaaacctacagtcttgctgtttgctttttgtttgtttcattgatcctttgtttcttgtttttttctttttttgctttcctttggatttagtatttttcataattccattttacctccactgttggcttattagctatacttcttcatttcagtattttagtggttgctgtaggatttataataaatatcattaactgaccatatcttcagataatcgtatactacttcatatatagtgtaaaaaccttacaagagtattcactccataatactttgttattgcttttgctttaagtgatcaatgattgtttaaggaaattttttaatgacctttcatgtttattctttttttttttttccaaaagattcagtattttccgagttttcaaaaactgctggccactcaaagtggatcaacaaaaatttaagagctaaaactgtaaaactcttgaaggctgggcacagaggttcatgcctgtgattccagcactttgagaagctgaggtgggacaatcacttgagcccaggggtttgagaccagcctgggtaacatagaaagaccttgtttctacaaaaaataaaaacacaattagccaggcatggcggtgtgcacctgtagtcccaacttcttgggaggccaaggtggcaggatttcctgagcctgtaagtttgagactgcagtgagctgagttcacgccactgcacttcagcctggacaacagaacaagaccctgtctcaaaaccagaacgaaactataaaactcttagaagaaaacagggctaaatcttcatgactttggatttggcaatggatggttagaattaataccaaaaacacaatcaataaattgataaattggatttaataaaaattaagaacttttgtgtatcaaggacattgtcaagaatgtgaaaagacagcatatagaatggaagaagatatttgcaaatcctatatctgataaaggtttaatatccagaatatgtaaggaactcctgcagctcaacaacagaaagccagttaaatcaattttgaaatgagcaaacgcctgtaaacccagctgcttggcagattgagacaggaggattgcttgaggctaggagttcaagaccaacctggacaacatagtgagaccctgtctaaaaacatttttttaattagctgggtgtggtggcatattcctgtagtcccagctacatgggagaccgaggcaggaggatcacttggggccaggcagtcaaggctgccgtgagctgtgattatgccactgcatcccagcctgggcgacagagtgagaccctgtctgagaaaaaaaaaaaaaaaagaacaaaaaaaaatttagaagattgctattctagtctactattttttcaaagggtggtcttgttaacaattctggagcccacctaaacctgctaaatcaaacttggtagtaaagctggggagatgggcatgtctaacagacgtttctggtggttttgatgtccaggcgtgcagagagatgatgcttaccttgtgttttgtcattattttcaggatttacaccccttccttgtcttttgtatcaatatttatggagtcatgaactctaggataggcatgatgttgagaactaggagttctcccctggccagggagatagaggcaggtctgtggttagttttgtagttggctgtgatgacatctgacatgctctcttcacttgttgtcttcttcctgttcccttgtcaggattatgaagaagctgtgctcttgctgttagaaggagctgcctgggaagaagctttgaggctggtaagaatcttgtaaatcctctggatgttgggtgctaagcagagagagcaagcaagggattccaggtcagttggaatctcttgtcttctgaggttcatgaaataagtagaaataggtcaggttcctggcttaaggaaaagcggtgtttttaaaatcatttttatcattcttgataataatttgaaatattactgtcttttactgaaatgaattgaatttccttggctgccttgtaggaggcctgtttttcaggaaaatattctgattacctctgaaagtaatccatgtctttctaagtatcttaactctccagtgactagaagttttccttcctaaaattattgtgtttttccttctaggtatacaaatataacagactggatattatagaaaccaacgtaaagccttccattttagaaggtgagggttccattttagatagaattcctcatttggaagaaggtgaggagagagagatgagagagtctcctcctatttactgtgttttcttaataatatgtcatgtagactcaatcaaaattaccacctggatataatatttaattctcactagaatttttaaatatgctgaactattaaatggtaacaaaatatttaaatgttagaaacctgtgatcaaatatgattaagaatctttgtatttggaaatagtaaacttgaatatgaactatattagataataatataacactgataaatttctggcatttaataatcatgttgtggttatataagataatatcctattattctcaagagataaatgctgaaatatttaggaatgaaggatcatatctctgccttactcttaaaaggttccacaaaagtattaatgaatgtgtgtatgcatgcagagaaacaggaagcaaaaaaatgtcaaaatgttagtaattggtaaatcaaagtaaagggtatatgtgtgttcattgaactcttacaacttttatgtaggtttcaacgtttcaaagtattttttaaaagttaccttttcaaatgaagtttgtggttcttagagaacatatgaatattaccagttctagaatactcagatggtcactgtgacctcttaaaagcaaagtggagaaggacatcagtttgacttatagaaaccttagggagtggttgattttaagttctgcatttttatgcacatctaccctgtaagtaacgtctggcctttctgacatttacatgtatgcacattcttaccttgtctgcacccccttcctccatcctaattaaaacgttgctggggtactttttatgtcattcactttaggtacctctaactgggtactgaaaacatcattcctcatctataataatctaaccagctcttacttagattttcaccactaatgagaacctttcttagataaatgccgataattcatctacataggcccaaaacctattaataaaatgcatccttggatagtagtattttgcttttttaaaatgtattctactagtgttatttttctcttgtgtatttttccattggacaatatttattagatacattttttccacatccatgggcattttgatggatgtttagccagaaacatttaggtaattttcttcttatttttgttaactgagctcccctcccctaccccccctttttttgtttgtttgttttgtttgtttgtttgttttgccaatcctcccttgctttaggtatcaagtcttcgttcaggtgattttacaagttcagtggtagcgcatattctgggataatgttgatgaactctaagatctggaatctcagtctctaatttgttaatgcttattaaggaaaaagagctcgcttggaaaacctagtaacctctttctttttgctgaattttaaccctccttcactgctccccgcctttagttttttctctttgcttaaacctcatgctcaaactattttccattctgcatctccagcccagaaaaattatatggcatttctggactctcagacagccacattcagtcgccacaagaaacgtttattggtagttcgagagctcaaggagcaagcccagcaggcaggtctgggtgagtatctgcgtgaaggccatcgacgtgcgggggcagtggggttgggtaacgccacacattgtctagattgcttggtgatccgcctgcaatctgattactgtgccatgggcaagtgtgaggcttctgtggagccccttcagggccctctgtgtctgtgtttgtgtgttggtgaagggcaggaccaagcatgaatggggagagctctgccagacattcccacctacccccattcacccagagcagctgaccacttccgtgtctaacaaaatgagtttcctcatttccagaaaaaagttcaggaaactactgatttacattagtaattactgtatttaatattatctcattcattttgagatcaactttgcaatcattttcatccatcctttgatatgcaccagttgactctagttagttcatttaccgccctgaaagtaaacccacacattagcaggcagtgttttcatcggcttctggttcttcttttctagatgatgaggtaccccacgggcaagagtcagacctcttctctgaaactagcagtgtcgtgagtggcagtgagatgagtggcaaatactcccatagtaactccaggatatcagcgtacgtatcacattgattcagcacattgactatatcctgggcatatagggaaagtggaagcaaatagattggttttctactgggacggtgtagtgggagtggggagaatattcttcagcgctgtgtggaagttgttcagacactttcccagcatatctgagacattaaacttggcattggaaggttttcttcctcagccttgtggcttgtgtgttttcccattccccacgaggcagttcctcccctgaatgctcagtttatattaacatctgattttattttttgaacaaatgttgtgactaaattataggcactgaaaaaatgaaaagataagcttcttcaattcaaaatcaggattggaagagaccataaatgtaaaataagtcataacacttttaccaaatatagtaatttgtcagaaatatttattcagcactcatatggtaggtgcagtagatgttaccaaaaacttataaggagatatgagttataagagtttatagtcttgcttgggatgtgtaaagcaatgcaagattatatattcaaactgaattttgctttaggaatttaaaatggagatctgtgaagttgtgtggggtcatcagcaactgcaagaaagtagccaggcaaggtagcacatgcctgtagtcctagctactcaggaggcttaaaaatatctgtgtaatttctaacaggagatcatccaagaatcgccgaaaagcggagcggaagaagcacagcctcaaagaaggcagtccgctggaggacctggccctcctggaggcactgagtgaagtggtgcagaacactgaaaacctgaaaggtatattctcagtcctgatgatgattcctgaccacaaacaatagtgaataggcagtacagacaggcagagttcagtaggtgattaagctaccattttcccaatttgaggaaagatgagaacttttagcaggaagggtcatgtctgcacacattcctgaagcagcccttcttagctggtaactgagaagccttcctccatttggcatccccctaactgaactgggagagatgcttaggccaggataaagaattgtgggacactgctttctgcgtaggccccccagcgtgcttgattttctttttgtagtacatgtgtttaattattccagcatttgggaagaaaaaagataatgtgggagaaaggacctgcagtgggatcatagaaatttttggctttggatagaagctatgtatgattctgtcaatggagctgggaatataacttaccactctttcaaatttcttctctctagatgaagtataccatattttaaaggtactctttctctttgagtttgatgaacaaggaagggaattacagaaggcctttgaagatacgctgcagttgatggaaaggtcacttccagaaatttggactcttacttaccagcagaattcagctaccccggtaagttttctcagagacggtgtgcatttttttcatcattttcatgggttattgtattcacacaatctccaagtcaaaaagttttcctgttcttaaaacataagatgccatagttaaattatcttagatttatgtgtaagctgtcagtaagatttgatatttgcctgtagagtgactagtataccttggcataggttaaatggactgtcattttcctttctggatgaagtagctgtcatggagaaaatgggaaagtcacatgattgctcctggccttcaatgaggttggagtggggagagatgggggaagatggggtcagagacggcctctcactttcctttcagaactcagggatgggatcaggctttaaagggaccccaggcaattgcttttccttttgttttatgaaaaatttgacttgtcacttctatgttgttatgatggactttgcgggttgtgtttaaggctgaatcagctttgtatcgcagaattctagtatattgtcatctgtttattatttatacctctgttcactctcttatacttcaagtctattgttaagagtttttatttggattcaaaaaggctggtgtatcagtcaagatctagaaaggaaaacaaaagcctatctattattttatcacagaatttaatatatggatttgttaaataagtattagaggactaaacaaggcaaaagggaaatacagaggaaggacattgagatagtaactgtaggaagcagctttaccctctagctgagggaacaggaggagttgttgggaattattagaatttagaagcctggaagtggggccctgtagagctggctcttgaacctctgagaggagggtgccagccagctaatcctggcatttctgagggagctggttccaagcgtacagaagtaaatggaaactggaaggaacagctgctgctgggggaaaagccagccggtcgggccaggtgtggtggtggctcacgcctgtaatcccagcactttgggaggccaaggcaggcggatcacctgaagtcaggagttcgtgactaatgtggccaacatggagaagccccgtctctactaaaaatacaaaattacccgggcatggtggcgcatgcctgtaatcccagctactcaggaggctgaggcaagagaatcgcttgaacctgggagacagaggttgtgatgagccaagatcgtgccattgtactccaacctgggcagcaagagcgaatctccgtttaaaaaaaaaaaaaaaaaagccagccaatcacggaagaaatctagaaatcttttgttcatcctccagctttgtactccccctctggtgttcactgtaggcaggacatgatgggaagccagcagcaaggaagaatatctttcaggtgcccagccccagcaccacaagcagtggatagaagggtgggttggagctgagagattacaaatcagctcagtgtttagaaacacatacgcttatcatgtcttgatttcctcatttagaaatgggcataagacttctctgtgtgcttcaatagaatgctttgaaggttaaataagagggtgtgtgtaaaagcactttacaaaccgttgaaataaaagcaactaggaatcagggccccagaacttcttgaatttattataataggtatttcttagaagaaatgtgatcatcatcttcaaaactgtagtacttttgaagataattgtttttgttttttgagacagggtctcactctgttgctcaggctggagtgcagtgatcaccgctcactgcagcatccaccgccccgggctcaggtgatcctcccacctcagcctcttgagtagctgggactacaggcgcatgccacaacacctggttaattttcaaattttctgtagagacagggtgtcaccaagttgtccccgctggtcttgaacaactcctgggctcaagtggtctgcccacctcacctctccaaagtgctgggactataggcatcagccaccatgcccggcttgaagataataatttataataccactcccatgagtgatcttctcttctgatcacatattcacattaaggtctattttattttatttttttcttgctctgtcacccaggctagagtgcagtgacagtatgatcaatcatggcttggtgcagcctcgaatgcctgggctaaagcagtcctcccaccgcagtctcctgagtaattgggaccacaggtgcacaccaccatgcccagctaattttaaaattttttcctagacatggggagagggagtcttgctgtgttgcccaagctggtcttgaactcctggcctcaagtgatcctcctgccttggcctcccaaagtgctgagattacaggtgtaagccaccatgcctcccacattaagttctaagacatcaattttatgattgtggttttgattggtgaagtatggttgtggtatgtgcaggataccgtgagtgacttctcatggcattgctcttgagagtgtgccaccaagggtctgcactaaccaggggtgtgcccagaggctcgctgcaggcttgaaattcctgcggagtcttgtgttttacctggagcacatgtgcacagtttccattctgctccatagtatgcacatgtttgtatttatttcaacctaaaaatgtttgtttcccataactctttgcgtataattgatactctacgtatttgtagcctcttttactcttttccctttcctcagggagtggtttgctcatttagaaaaggccaagatatatcactgtagagtttcgtttcttttcttttcctccaccccccatctttaccttgttctgggagaaaggagaattagaagtctgagttgcagctggagaaactggcaaattaaaatcacattgggaaagagaattactgtgtttcacaccataccagtagaaatgacaggctgttttctgggggtagggatttggcctttggtattggcagtcttgagaagtattagataatctttgctgatacagtctattttctcctcaggttctaggtcccaattctactgcaaatagtatcatggcatcttatcagcaacagaagacttcggttcctgttcttggttagtattttttctcatttaatattacaatactaagcagaaggactatctttctgtaagtattgagaagatcagcagtataaggagagattggatacaatttttcactacaaaaaattgactacaattcttcctcaattctaagaccgcatctttagtatgatcagtttcatgcttctagcggtgggggacctggtgcaggaaaatccagcatgaccattgtatgtgtaatttttaaaaatatttatgtggcatatgcttgttcataaaggcacaccacagttccagtttcagtctaaactgtctacatttacatatacatcaaaagattcttctgaagcatcattactggctattggcagttatgctttgcatcttgggggcattttcataaaccttgcttatgagtgggacctttttattatgtttaggattgacaatataatttgaaggcaaatccaaagaatattagcattttatacatatttcctgtttagttatgcatgaagtgttttatttgttgaggggagatgattctcaattagattacttatatccctaaaaattaaaaaccctaagcgctttcttttgaaagttggttagaaacatttgatgagtcagcttgggactttcagtatttgcccttacttatagttggatcaatgaagcatcttagctttgaaaagtgaatgatagtttctaaaataattggcagttttaactgctattatttgcatttctagcatgtgacaagcaactttctgaaattttttttcaccgaagtgctacactgtaatagcattttgatgacatttgaagtagcctgtggggattcaaattaagtttgactttaacagcttatgttgctaccaggaagaacagctaccttccatcccagctaaactcatacatccagactgtaactactgtattcctagctcctcttctgtctagagaatggcaaggttcttttggtatcagtttcgacatatccacttattcctttttttttcttaagttttttcatttagaaaaaaaaacagatggggtcttaatatgttgcccaggctggtctcagcctcctggtctcaagtgatcctcctgcctcggcctcccaaagtgctgggattacaggcgtctgcccctgtgcccagcccacttatttcccagatgctaggaacttacattagacctgaggccatttggtcattgtttattttgtgctgtagtccaatccagttgtgatttctgcctcctgtgttcctcgttgctggcctgatgctgaccttcaggttaggtcagtcccatcattccccagggtattctagatggctttcccacttcaaagagcactttcttgttttccagctgagccttaaagacactctgtaatatttgagagcccctcattatctgagtgtttattatcattacccttgtggtttcaaggatgtataggaaaaggtaagttcctataattcaaaaattgccactgatgaactaatcacaaaattagtgccactcaaatattactcagctgcccctccccagctaacaatagttaagtatattggcacatccccacaagtgaaatcaatgacttgatgggtcatttctgattgtttcctgctttgatgcaatacaatatcatgcagatcaattgcaagtcttgcaaaaatttagtattacataaaatagattaaaatgatattggaaaagtacttgaatcacagctgggttggacttgttgcaattgatgacaaaataagtgcttcaaatgattttgactatcaaaggattgagagaggtccttagaaaaattgaaaagccctcaagttatttttataaaaatggccttttttgtgtgctgtgaaatccacatatggaaatgtgaaatatgtcatgtcctgctgtcatataatttgtcagaataattactttcttgcccaaaagtctgtactttgtgtttatttcaagttaagtctagaatcaaatatagttgtagttatgcctaattttaaaaaatgagatagagcacattatttttgtaactagtttttttttttttttttttttttttttttttttttcagacagagtcttgctctgtggcccaggcgggagtgcagtggcgcaatctcggctcactgcaagctccgcctcccgggttcacgccattctcctgcctcaccctcctgagtagctgggactacaggcgcccgccatcacgcccggctaatttttttgtatttttagtagagacggggtttcaccgtgttagccaggatggtctcgatctcctgacctcgtgatccacccgcctcggcctcccaaagtgctgggattacaagcgtgagccaccgcgcccggcctgtaactagtttttttaagataaagtcttattccaactttaattggaatttatgaaataccttgttgatagtgaatttatttaagtagccttttttcagtattgatattcttatatctttatggcaccatttagtggagagaaatgtaaacaaacataaagatgtagtattaaatcataactgcataaaattaactgtagtatgtactgcactactgtaataattttgtagctacctcctgttgctattgtggtgagtgagctcaagtgttaccaatatctgcttaaaatgccatgtgccgctaaccatctccacatgagcagcacatgagagtctccattaattgcatatggcagcgaaaagtgatctcttgcattgtcgtgtattttttatcacgtttaatgtaatatcgtaaaccttaaataacaccatgagacctataggaagtaccacaagtgttgctcccaggaagcagagaaaagtcataacattacaagaaaaagttgacttgctcgatatgtactatagattgaggtctgcagctgtagttgcccaccacttcaagataaatgaacccagtgcaaggactattataaaagaaaaggaaatttatgaagctgtcactgcagttatgccagcaggcatgaaaaccttgtactttttgcaaaatacctttttatgttgtattgaagatgcagcttttatgtgggtgcaggattgctatgagaaaggcatacctatacaactattatgatttgagaaaaagcacagtcattgtatgagaacttaaagcaaaaagatgaaggatcaaagctggagaatttaatgccagcaaaggatggtttgataattttagaaagaggtttggctttgtaaatgtctggataataggaaaagcagctcctgccatccaggaggcagcagcaaaggcagtcaggtttatgatcaggactgcccttatctgtaaagctgctaacccccgagcctggaagggaaaagattaacaccagctgccaggcttttggttgtaccatacaacaagaaggcttggacaaggagaacactttttctggattggttccattgtcgatttgtccctgaagttaagtagtatcttgccagtaaggggactgccttttaaagttcttttgatactggagaatgcccgaggccaccccaaactccatgagttcaacaccgaagacattgaagtgatctacttgcccccaaacacacatctctaattcagcctctagatcagggtgtcataaggacctttaaggctcgttacaaacagtactctatagaaaggattgtcaaatgtatggaaaagaaccttgacagaacatgaaagtctgaaagaattacaccatcaatgatgccatcattgttatagaaaaagctgtgaaagccatcaagcccaggacaataaattcctgctagagaaaactgtgtccagatgtgcatgacttcacaggctttacgacagccaatcaaggaaatcatgaaaaagattgtggatctggcacaaaaaaaaaaaaaaaaaaaaaaaatggtgcatgaaggatttcaagataggaatcttggagaaattcaagaggtgatagacatcacaccggaggaattaacagaagatgacttgatggagatgagtacttccaaaccagcgccagacaatgaggaagattacataaaagaagcagtgccagaaaataaattgacatttgttccaaaggttccaattattcaagactgcctttggcttcttttacaacatggatgattctatgttatgggcactgaaactaaaagaaactgtggaaggattggtaccttagagaaatgaaaaagcaaaaacatcagaaattatggtgtatttctgtaaagttagtgacactgagtgtgcccacctctcttgcctcctctttaacctcccctacctgtttcatctctaccacccctgagacagcaagaccaacccctccacttcctcctctacttcagcctactcaacgtggagatgacaaagatgaagacctttatgatgatccacttccatttaatgaatagtaaatattgttttctttatgattttcttaatattttcttttctctagcttactttattgtaggaatgtagtatataatacatataacatacaaaacatttgttaactgactttttatgctgccaatacactgccgaacaacagtaagctattggtacttgagttttggagattcagaagttaaacatggggccaggtgtggtggctcacacctgtaatcccagcactttgggaggctgaggtgggtggaacgagaccaggagttttgagagtagcctgggcagcatggtgaaaccttgtctctacagaaattagccaggtatggtggtgtacacttgtagtcccagctacttgggaggctgaggcaggagaatcgcttgaacccagggggtcgaggctgcagtgagtcatgatcgtgccactgcactccaacctgggcaacaaaatgagaccctgtctcaaaaaaagaaaaaaaaaaggtatatgcagatttttgactgtgcaggggggtccgcacccataaccctacattcaaggatcaactgtaatttttcatgcctgcatggctcatatgtacagatttactgctggaagtttatcataaataatgctgaaaaagaaaatccttatatatacatattttctcctatctctgcttgcagtatatgattcctggttagaaaagaaacttaacaaatctaagtgaaagagtgcctgggagttttaggttacaatgacagaatcttttcctaaccctctctctccattcactttttttaaagcaggggcatctttattgatcaacatgtttgtcgaagtttcatcataaagtagttcctgtccattaacttcacttactgaatatgtgctatcacattttgctattccttaaaaattgagctagactttacatatagtgaaatgcagagatttcaggtgtacaatttgatgagttttaataaatgtatacagccatgtgactgctgccaccacccctcccaccagtttgaaatacagaacattcttccactttgaatcactgggtgagcatgcctgaggttgaaatgcagtccctcctctcagggcggggcctccaggttgtgtttgctctgacctggaggttgcaggggtagcagacacatgaactctggctctgatggtcttattgctgcaaactccacctgcctagtttgtttagtttagagttactgcctcagcgccctccaacaagagtatgtctgtcacaatttcccttcctttcttgcttttagatgctgagctttttataccaccaaagatcaacagaagaacccagtggaagctgagcctgctagactgagtgactgcagttaggagggatccgacagagaagaccatttccactcattcctgttgtcctaccaccccttgctctttgagggctggctattgagaactggaaagagtaaaatgataacttaccttagcattgccaagaacttcagcagacaacaagcaattctatttattttatgttgtgtatacatcttgatcattagcaagacattaagctttaaccattatggcaccattttgtgagaatgattgttctttcacttgggctgtttgagagcataattatggtaatcatgagattaatgtttcatgatttctacctccaaagtgtgaagacaagtaaaacaatgtttctaaattgtcttattttgttggcggagaagattacaatggctattagtgctacatttggtcaaatgtaatcacttaaatagcttcttgtcaccttaaactaaagcagaataaaaagtatcctttgaaattataagccctcctttgctgacagctattattttgtaacatcttaccaggtcatgtgctttcagttataactgggctgagcctcctataattacaatgtctatagggactgttttactgcctgtgtattttctgctagagagttagcaatgttagagctagaacagattagaatttctaaacagtatcatgcacagttggtgtgagtgatcagtgtgcattgtatggcatgcatggttgtgaattattctctgttctccaaatactgtttctttaactcagatatttttgttagtgtctaggccacttcatttatttttcgtcatggtactttactgacttctctttattcaattctccacgccctcaccaaaaaaaactgtctcaaaatgagaatattttattttcatggtgagtctagaaaacgcccacttcattctgattaaaaattcttccatgttttaaatatcagaaccagacctttcttactgtgtatcttagcccatttgtgtctctataacaacaaccagctttcaaaggaactaatagagtgaaaactcactcattaccacgaggatggcacaagcgattcacgtaggatctgcccctgtgaccaaaacacctcccattgggccccacttccaacactggtgatcacatttcaacatgaggtttagggaaacaaatgcctaaactacagcactgtacataaactaacaggaaatgctgcttttgatcctcaaagaagtgatatagccaaaattgtaatttaagaagcctttcccagtatagcaagatgttaactatagaatcaatctaggagtattcactgtaaaattcaacttttctgtatgtttgaacattttcacaatctcataggagtttttaaaaagaagagaaagaagatatactttgctttggagaaatctactttttgacttacatgggtttgctgtaattaagtgcccaatattgaaaggctgcaagtactttgtaatcactctttggcatgggtaaataagcatggtaacttatattgaaatatagtgctcttgctttggataactgtaaagggacccatgctgatagactggaaatagaagtaaatgtgtttattgataatggtgtgaattttcctggacattcagtttccttaaataatgtattgaagcagcaagaaataatttgtttgaatgcaaattactatcaattactgtttctctcatctgagcaggattggattttgttcctttttagaagaagcaggcaggaggagaccttccaaattgaggcaaagccaagaattgaatattcatgggggaaaattgagtgtatgagaaaaggaggaaactcctctgagtgatgaatgcttaatttgggggaaagagtctgtcaagttttagaaaagagtacataaatttggatcctgtcccaaagcaagttcatgctgcaataagctaaaaccttcacttttcttggttccattgagtcagatagctttgctcagatgctctaaacttcaagaaggaacttgcagaagactgtcttcttcggtcaaagtgcattttaaatttatgcttttgaaaaaactgaggccgggtgcggtggatcacacctgtaatcccagcactttgggaggctgaggtgtttgagaccagcctagccaacatggtgaaatctcacctttactaaaaatagaaaaaaaattaggcggtgtggtggtgggcacctgtgatcccagctacttgggaggctgaggcaggagaatcacttgaacctgggaaggtggaggttgcagtgagccaagatcgtgccactgtacatcagcctggacaagaacaagactctgtctcaaaaaaacaaaacaaaacaaaacaaaacttaggagcaatttttatatgcctttatggatgtagcttggtgcaatttcttagccctgctgcatattttaaattaaatttaattatatatgcatgtatatatacatacacatttgagagatttgtcatagcaatagctgaagtgggtgtttttaaaaataagtaaaactgatgaagcttggtaacttaaggtgactgcaaatttgagaagcaaaattagatttgttcttcctcttgtgctggttattgtactcccatattctctagaagcaccgcctggacaagccctggggagtctttggctgttgtttcttgtttgttgtatttattagtaactgggtgcaaataaacatcttaggagctaggtagctgtacatattcacgaggctggagataagacaaagctaatttggtaacatttggcagtgctgaaggcctgctttggattctcgtgtttctgtgctctctgtgctccctgagcccttgcctgtgcctgcagtgggctgctccaccactattcttactggctctacagtcccaggacatttaggaacaacagttgtcctcctggttataaaggaaagaacaaggctttgggccatgtgtccaaccatcttagcagtgttggacaaagtcacttaatctcactgagccttgctttccttcagtcttgtgtgtgcccatcaagctaagcagagtttctcaatggcactgttgtcattttggttcatgtcattctttctttgggtgttgggaggtgcttccctgcacattgtaagatgtttaacgacttccctcatctctaacccctagatgccagtagtacacactcccacccctgttatgacaaccacaaatatctttagacattgttaaatgtcccctacaggccaaagttgccccctgcttgagaactactgtgctaagataagttccaaatacttagtaactatcacttttttatgaggagattctctttttctactggggcatacttgtgaggatcaagtgagaaaattcataaagtggtttgaaaaagactgcacaattgttcagccttcagttggcatttttcatttaaaaatgaacattgaggcctaggaaggcctggagacgcccatcctccagaaccacctcccaaccctcctcttcattaagaccctcgccttttttagggatctttgacatggggtttatttacccctaagggatcggtagatagagcatacttctgtatga

SEQ ID NO: 761 - DNA, 107648 bp, Homo sapiens
tttgctgtaagaatacacattgctttaaaagagacgggatcctggggaaagctaagagccaggcctcccagagatccaaactggacaggcatttgggatccacggcagctctaggcctgggccgtgctccttccccccggcagagtgagtttgtagatctgactctagcactcttcagtttgtgtggctgaaggcctttctttgctgattgcatattggtcctctcatctcccaccccatgtagctttcttctgccttgggcttctgcctctatgtagctgccgagtcctcctaacattgactctggaagcacctcattccctccaaccttatgtgctctctccatacatcctgccagcctcacctcccattaccaaactcctgattttccatttgtatttcccatttcagattctacatacatagaaacagaggtaagtaatccatttggcttggctaaggagacacagttttcatctggggactttacaggatgctggcatctcatggattgacagctcatgggacaggcagggccgccaccctccacagcagggtggatgtggtactttccaaaagaggacaccaggcaccctccttaggaagcaaggctatgtcttcccggtgtcttgccccttggtacaaattagccagcagtcccaaggtgcaaacagagtggatagatattctttcataacattattatactttatattgtctcaaattcccccctgccttttctttacgttgcattttaagctttttctcagctttcggcacaacccaagcagggaacacattttccctttcctaattgtattatttaccttcctaaaccattctttcatttactcatctgtttactcaatatccatgaagtacctgctttgtaactggtgaaatactagacaatgaagacttaaaattcacccatattctcaatataaacattaattgactacttacaaagtgccaggcattgtgttacttgctaggaatagaaagattcctgagacacagtcgctgtctgatacatagcaagaattgaataaatatttgttgagtaaaggcaactattttgacaattacaagcagagcaaaaatggctattctggggaatgtccacaggaggggaggcctagagaaaccaaaaagtgtttcctgcagacactaatgtttacactgagacctggagggcaagctgaattagccaagtgagaggcatgagaggcaacccaaggcctgcaggaagaacaaatggtttgtgtgaaggcctgaaaattagggagggtgtgcactggaggggcagccatgggggacagagaataaatcaatcagtgtgattatgattctaggactgagatggaagtctttatgtgggatggcacaagtccatttaaatacatggtcaaattgtggttttagagttctaggaccttgttgctgcctgcatctggttgtcagagggacatgaggatgatctagaaggggtatgtaccacttccactcgtattctgttggcaagagctggttgttgggattttcttagctgcaaaacaggccaggagaggtagtctaactgtgttctcaggaaggagagattgttggtggcagctagaaccatggagagtttccagggattggcatatccagagctgggcagccaccccgatccagctcctctagagtgcctgctagcggctgccagggaggtctatgggcagacaggcaactcaagacctggggaaacctctggagcccagggcagcacttgtcagtccaaggcagttttgtaggatgtaagatcttttcttccaaagtgaggtttgaaagttgcatgttcagtctccagacaaaggtggattttgtgtgggaaattgtcaagaactatgaagggcctgggcttttacctgacttgcaagctgacaagttagcttgtcatggatttgtgggtactgatggagacatgcgatgcctgcatcacagaaaaagaactttttaattattttttttttttaagaactttttaattcacagcaattgcagtggtcagagtgtcagcacattctttcacagttccccaataccatttcccacaagatgacacaaaagaaagaggtgactcctgcacatgtagtaagatgtgttataagagaagaactttgagtttagggaaactgaaccttttataatgggcagtaaacaggcctactctttgttctgcaggttgacactgtctctatcttccaaagctgtaagcaatttttccttttccctaaagagggacactgtctgtattttcaaaggccgttcactttataaacatcctggaaaagagagtctagaaaaaaggcagccaggtcctctgcttgtaagatgtgcagaaatgtgagagacacttgaatttgtcttccaacaaagacaggttcctctttagcaagatgaagtgttctttagatagaagcttcctttactaaatccttctcctcttgatctacagatatctagaggccccagggctcagtcctcagagctcttccctatatacattcgcttcctggagggatctcattcagccacatatctctgaacaccatcagcctcatatctttaaacccatgctgataatcccaaatttacagtttgctctttgacattgcccacatttccagacctagatatcaaacctgcctatgtggcatcttcacttggttatcttctagccatctcaaacttaccatgttcttgatcctcatcctccacatgaaacctgattcttcctcaatgtaatccctctcagtaaaatgtatcactcagccagtacaatgtatctatgccagacagaaacctctttctttcatgttcacatccaatctatcagcacagtccagtttcaaaatagatcttgaatctgatcaccccctcctcctgcaccacaaacatcctagtcccagccacgattatctctgttcttgacagagacatgcattcctctcttgccccattcaccttccaatcttgccgcatacattttcacttcctcagcagccagtgtggttcttctaaaatgtaaattaaatagtattatttctctactttcaactttccagtgatacacaaggtatagaataaaattcaaggtcaagactacatatgatctgacctctgccctcaaatctgattaccctctctctctcccttcttgtattccacttgcccttgaaaacacctgccattgggctgtctcaggccttcatagttagctgtgttgtcaaagtcatctagggctctctcagatgccagttggtcagggaaaccctccctgactattctaaagaaaatcacacactcccttgcccctctttccttttacccagacttatgattcatagccctgggcactgcctgattttagaagtctatctccctgcactgccctccagcctagaatatatgctgcatggatcaaaaacttggttgtgttcactgatgtagcctctgcttcaaaaataatatttgacagaaagtaaatgcccaagaagtacttgttgaatgaatgaataatgaatgaataatagttaatactggatttttaaaatgacaataacagagacacaaacaatttgtggctcgatctttcttcttcaagttaaatcaactaattttatataaattttctctcaaaatgcatatcttccaattcttcaataattctggattgttaccgcaaaattcttgccatgtttttccagcttcttggatatgatggagttcaaaattgaacataacataggcttctgagaaaagcctaggtagtctataattagtttctctctttctttggttttttttttttaattattttattttagtttttatttttgtgggtatatagtcggtgtatatatttatgggatacatgagatgttttggtacaggcatgcaatgtgtaataaacacctcatggaaagtggggtatccatcccctcaagcatttctcctttgtgttacaaacaacccatttatagtcttttagttatttttaaatgtagaattaaattattattgaccatagtccgtttccctctgtttacaggtttcacatgcttacccaggaatgctccttgaaaagataatctcctcagacataagcctggccacagaaaagtctctctaaggtcagcagtttctagagtgacgaagtgagaattcgattcttatctgttcacagactctacaaatctcaaaacaccttcctgaagaacaccctgggggaaaaatacaaaaaacctcatggatttagccatagatcatatatattttgaattgtcactctttcactcaacaaataaatatctcctatgtgccaaatcatgagctagaggttggaacagcacattgcatagagaacttggtccctagcctgagggattcagaatcttgggcaccatcatttctgttttcatcattgttgtcatcagtgtcttttgagacattcttattttgatctcctttgatttttatatattatgattatttccaatataattttaaaataagaattttatacttatggaaaaatatatttcatctaatttgaaaaaataaggaaacagtgctttgctttccctagccttccttctcatttactgtaagataataatttttctttttcagggttcgtttcaattttttgcaaaggatttagcaatgaaacactaaaatctcaggcattttcattaagctcattttttactttcctcatatatagcctatatgctttatttaatctttattctttacattaaattaaaattatttttaaaatgactatatttctattgctgttgtgacttttcattgatcaatatttcactaaagatattaactttctctaggatgcagagagactcatagaacttacaccaaaatttctactgaatgaatttccccaccttcttggtgattgtacacctgccttccttataaggagaacaaggaagtaaatcatgttgaagttgcttttaaacacagcttttctgctttacctgtccaggtagcctctgttttcatttcagtcttaatgaaaactttctaacttatatctcaagtttcttttcaaagcagtgtaagtagtatttaaaatgttatacttcaagaaagaaagactttaacgatattcagcgttggtcttgtaacgctgaaggtaattcattttttaatcggtctgcacagcaagaactgaaacgaatggggattgaactgctttgcctgttctttctatttctaggaaggaatgatcacgtacaaggtaagacctgcgttctctgatatattactttcgtggtatgcttgacaaacctgtcatttggttcagaaactagatctgaagtcatgttttatttgatctgttccattgctcttttgtgactgagtgaacactttaacaaattacagacaaacaccgggcagttcccacagtgaatgctctaggcttaaggtaaataaatacaaaggttgcacaggcattttaatgaggagaattaaataacattactgcccaatggaacttagtgccagtatgataaccatttttgaaacttttctattttattctaccacaagatcttccacttaggagtaataatcttgaaagagaaagaggatttatttcaaaaacagaaataacttgtttaagaaagaagcattttttaatggttgcaagtaatttttaaaaattaaagtggcacacattggctaagaataataaataggataatcctatatttgtgaactttcacattttaagaaaaaagagcatgataattttggcttataagacatacataatttttaatatacatacacatattttacatgtgatagatgtaaaatacaaacttttatgtgaattgctaacatttcgaggactgattttggatactaaactaaactttgatgttgttttgttcaagtaatgtaagagccatcagtctcataaatggaatgactgaaagtgtacttaatccctgcatcttgctgggtctaaacctaggtggctgtgccctgggaggtgcagaaacctgtgaagactgcctgcttattggacctcagtgtgcctggtgtgctcaggaggtaaaataaatgacctcaatgtgtttttaaaacctgtctgcagttaaattcatgttaatttcctcagtgatatttctgatagtgacttgcttttttgtggagttgtataagtaaaacaaatcaggaaaggagaaggtgagcattggtagatcaaaatggcattcatgtgattactttcaaaaacaatttgtagaaggagtggatgtcaaataattcggaaaaaaattttaacttgggatttttttattttacctggttccttcttttattgtaaagccatttctacaggttacatgtaaaatatggaggctgtctggataatcagagttcatggagatgatattttctaaagttaaacatacatttgatgttcatattatagttgtattccctctgggtaccaggatccattctgaactactgctagattctaagggatgtgttttaagtttggggcaaatattactggtcagatattatccagttcctttaaaaatggcattttcataaactcagtgactctgtaccacaccagtgacaaagtgccaaataggaactccttatctggtcaaaccgaaaactacatgaaagcagtatgaagatgattggggactatgtaccaagccatcctaagacactagagaatgatgtctaactgattcatggtaaggaagagaggcattagctttctgaattttaaaacaagtctctatgcactggatctcataaagataatctaaacataaatcaaatcatacgaataccaagtgcagcaagagctgagtagcatgctcaaagagcaacaaacctcgacaccaaactcagaactgggttctacctgtggaaacccaaactccgagttcagtgtgtatccatgaagtgtggcctcacagacaagagagcacagacacagctcagtcccttactacggccttgaccaacgcggccacaaaaaaaattcaagagaattatgcttttttttagttcctgtatcaaagcaggattgagaatatacaagaagggaaaaaatcacatgttttttggatattgacttcttgaagaagtattagtttcatgccagagagatacaacaacaaatcagcctagaattttcatttaaatgcatttttcagcatttacttaagagagtttcctaagttgctgctgataactttacttgtgtataatacttggtagccaaattgttgtcaaattgtaaaaccaaattattctaagaggccactctaatattagaagtagttatgaggatgccagtcgaggcagttggagcaaaaagtaaattaggcttctgcttagggcagatagaaaataggtcatgtggttaacaccacctctgatcttctggcaaaggctatgaatagaggtgatagcaatgacactgtgttgagaaggattctgaagccttggccagccactgtttcccttggttacatcatgggaagttacagtttgccatgcctggcctagagcttcagacacgcacaggcctactgatagataacaaattgtattctcaaaatcaatttcagaagaaatctaactttcctagttgatgaaaacagcaagagtggcttggagttctaagaggcaaggaaaatagtatgagcattggttttgttttctctaagcatgaaagtcaatgggcaacaagttcccctttgcatagtgtcatgcccactctaaagcagccacgcctatcaggtaagacaggtatttaatctattagctccatctccctgttttgggtgtttcagaatttgaacggccacatctctgctgggaaagactacatctcactgcccctctgctatccttgtgggaaactcctgtgtcccacgcagaaaagcagactttttttttttgagacggagtcttgctctgtcgcccaggctagagtgcagtggcatgatctgggctcactgcaagctctgcctcccgggttcacaccgttctcctgcctcagcctcccaagtagctgggactacaggcaccagcaaaaagcagacttttaacccatctttttcacttttcttcctcactttcaaatcttggagaaagttataaaggatcttgaactaggatacttcaagactctgggtttaagtccacaagaggtcaatttaggtgaagtaatgctgcaatataagggtaacagaccgatgcatacaactggcagagagtgctagatgggggagatgttgcaatccctaccctttaggaatctgcagaatctctctttatcactagatttggggattgacaccctggagcccttggacagtgtgtcaattcccaaatctagtgataaagatttgatcatggaatcaaacctacaggtcaccctgagcagataaattcatgggatgatgtcaactctgtgaacccaacagtttcaaggatctggtcatggcctgggacaaagctttaaagaactgagcttaagacacagacacacacacacagacacacacacacacatgcaattgttacgtgaattcaattgaacataactgaaaggagactccagttttactcagaattttaccggcagaattctctggttattcacctataacttaactttagacctataatcaatgttagtcatgtagggatacaatatggcaagatgcttaactagcaaattgtgcagaaaaactttcaattgctggtatcttataaagaaattcagatttgttttctttttctggttattgtttttctttttcttttttagaattttactcatccatctggagttggcgaaaggtgtgataccccagcaaaccttttagctaaaggatgtcaattaaacttcatcgaaaaccctgtctcccaagtagaaatacttaaaaataagcctctcagtgtaggcagacagaaaaatagttctgacattgttcagattgcgcctcaaagcttgatccttaagttgagaccaggtatgttaggatttggctcatgtaaatagatctaatgtcatatatggtaattctgctaccttgctaatgtgtcttgtatcatattacatatcattgattattatgactcgaatttcccattcttaaggaaatagaaaattattaggctcacacatttctctattcacattggccccggcactccaattgtgttactaaaaaagccttctctaatagtaaccatttaaattattcaaatgttgttaaggcttacctcacatttcttcaagggttgtaatgtagatttaaactctcttttatttggttctccttttctaaaacaacacacaaaaaattcagcttatcttctatctaaatggatgctagttctcccaaggagagataaaatatcctaacttatcctccaatagttctaaactcactgctgaaagaatttcatgggttggttcttttaggatcttgaccacacagttaataaaatcatatgtatttcagtaagttcttattgaggtgaaatagccagctgacccagcgagtggccagtagcaaataaatctcagtgtgttttcctgggtttgcttttcctgttgggctttgcaggtggtgcgcagactctgcaggtgcatgtccgccagactgaggactacccggtggatttgtattacctcatggacctctccgcctccatggatgacgacctcaacacaataaaggagctgggctcccggctttccaaagagatgtctaaattaaccagcaactttagactgggcttcggatcttttgtggaaaaacctgtatccccttttgtgaaaacaacaccagaagaaattgccaacccttgcaggtaagtaaatgattctcttggcatctttgtgcgctgattttctgtggagatactcccgctctgagctgcacttgccaggagcttgctaactccctggcatttctgccttgtctggttggatctcagcagttctctcagaggcctaggttgcttagagtggaggtgaggtcatctgaactacatggttctagccgtgggtccttgaggcctctgcatttgcctcccagtatagggcaggatgtggcaaaccagaatgcgtgttatgcaggcgagggaaccaagactttcaccataggctccactggatggtgcccagccccagcctctcagacactttctagcctcagtggccaccactttctgaggttatttgagaataaccttcactttcccagagtctttctccatgacaatgacttctggcaaaataataatttttgcaactttctctgacatactttgggaaatattggtttctcttattgcttggagaaggccaatgcagccttcactgctgttaaattcagtagtaaatcactccataggcaatgactccattctcatatgctataataagctattaaaaccacacattatgcaggtgatggtggaggacagattgctttgtgacggcttacctgtgcagtgaatgacatgttcagaatcaaatattctcctattgaaaatgagctaccatatgctctgtgccagatctcgtgtggaaggttttacatacatgacctcattcagccttcataataacagcaggttaaacagcaggttaaagctagcttaataacatcagccctatactcagaggaagtaagaggctctgagagattagctatttgcccagggccacatgactaatccatgatctgtaccaagatttgatttgtcccaaaagcaagcccattactgctatatatctagtatatatgaaataatgttccaaatatttattaatttataatacttttatacaccaaaggcatcaatctctataaaagataaacagcttttattataccatttaaaaaacatctcagtgtacttcccaactacaatctaacataataaaaaataatttaaccataaaggaaatttatcaatgattgtaacacttagaaattttgtttggttgcaagtatctgagacagtggcttaaaaagagagtatttttgttttttgtgttttgttttgttttgttttgaaatggagtttcactctgtcacccaggccagagtgctgtggcatgatctcggctcactgtaacctctgcctcctggattcaagcaattctcctgtgtcagcctcccgagtagctgagattacaggcacctgccaccatgcctggctaatttttgtatttttagtagtgactgggtttcgctatgttggccaggctggtctcaaactcctgacctcaagcgatccacccgccttggcctcccaaagtgctgggattacatgcgtgagccaccgcgcccagtcaatattttcttttctcttctacatgaaatacagagaaaggccattcaggggtagtatggcagatccataaacatgaggaatctaggcctttttccccctctctgcttcaccattattgacacttggattttatgttcacagtccaagaatgttgctggggcactaatcattacttcttcatttcagtcagaaggaaaggaggaaaataggggcaataagggcactgtctgcccactccctcgcaactccttttaatgtatagttgacatgcctaaaatgcacagatcaaaaatgttcagtttcatgtgttttgatggttaaatataccattgcaatcaatatccaaaacatgatgtagaatatttccatcacctcagaaatttcacgttacagtcagttctaccacttcagaggcaaccactttctgtttctataatttatattggttttgcctattcctgaattttatataaatatataatgtagtatatgccctatgtgtttggcttctttggttcaacataatgttttgaagatttacctattattttgtatgtatcaggagtttgctgctttttgttttaattaataatccattgtatatattaactacattttatttactcttttattggtggacatttgggttgtttctattttggggagctattatgaaaaggctgctatgagcacttgcgtagaagtctttgtatagatgtatacttttacttctctttgatagacacctaaactggagttgctgaactgtatggtacttctactttttaaagaaactaccaaattgttttccaaagtgaacataccattttgcatttccttcagtagtgtgacagggttccagatattgtatatccttactgacacttgatgttgtcagtttttaaaattttagccattctaataggtgtggggtagcatctcattgtagctttaatttgcatctccttaataatgaatgatgttgagctccttttcctgtgtttatttgccattcttatttcttattttgtggtttcttttcaaatcttttgcccatttttttaagattagactgtctttccaatattgtgtggtaagagtactttatatatgctggatacaagttttttgtcaaatatattttgccaaaaaatagatattttagtcaaaaatattctctcccagtttatagcttgtgttttaatttttctggcgatacctttggtcaagcaaaagtttgtaattttgatgaagtccagcttattaatttttaattttatggttggtgtgttgtatgtcctaagaaatttttgcttactgtaaagatcacaaagactcttcctatattttcttctagaagctttatgcttaacatgcttacatttaggcttctgatctcagattagtttttgtatttggaatgagaaggaaggtctaggttcatcttttgtttccacagagatatctagttgttcaagcactatttgttacacaagaatttcttttccacattgagttatcttaatgtctttgttgacaagcaattgaccatatatgtgtgagtctaattctggacactattctgtttcattgatccattgcatatacccatgtaaccactaatgcctcactaccccccttacagagctttataaaaagtcttgaaatcaggagcataaatcctccaactttgttctttcattttgtttatcctagatcctttgcatttccatataaattttagaatcaacttgtcaatttcttcaaaaaatatgctgagatttttattgagacaacattgaaaccatagatcaatttgtggggatattgaacatcttacacatattgaattttccaatcattttacatgacatatatcttcatttattcatatcttgtttaatttctcagagcaatgttttgtcattttcagggtagatatcttgcacatgttttgttttatttatttctagggacgtttaacatttttattttcgaattctttgtggataacatgtagaattgcaattgattttgcgtattcactttgtatcctgcaaacttcataaattttctcattagttctagtgtgatttttatagattccttagaattttctgtgtatatgatcacatcatctatgaataacaacttctttttcctccaatatctatgcttcttctttcttatttcttaccttattgcaccgacttgggtctccagtacccttttaagttgatgtagtaggtgaggacaatctagtcatgttcatgatcttagggagaaaggatcagtgttttaccattaagtatgttgttagctagtggtttttcatttccttccatcagatcaaagaaatgatcttctattccttgcttggtaagtttttttaaaaaaattataaatggttgttaaattttattgccccaacttaagaggttttgacagaaatactcatcaccttagacttgcatctcattggctggcacttagttacatgaccacagttaactacaaaggaagcacattgctagctgcccctccaaaatcagcattctgttattagggaagaaagaaagatggatacaaggtggcatctgcgagtagttcctgtgacactgaatacatagatttctataaagagttataaagacttataccctcaaaaattctgtataataaaaagtaaggtatgattattgttattaattgcttgattcacttgtgaagggaaataagcttggtgctaacaacctcttaactatctaacataaaagtattgctaatgcttttggccccatttttaaaatcagagaatattatacctgaataaaatttgtatttagttctttggtatattgtgtgtttcccctacaataagcttccatagagagattagtagggcaattccaactagaactccaaagtgccacctctgccccagagggtatatttaaaatcattcctcatgtcacagatcaggtacgatgtagcaacatgtagtacaataataaccatgggaaccaatgagtgtggaatgttaccagagaaaataactaaaattaacaaggttgcatggctcagctaaactagtatcccagcatcttgaactaacaatgagaccctgtccttaatcgggcttcaagtaaatgaaagcagtttggctctttatttacctcttgactgtactttattcatgcatttatttattcattcatttgttcaacaaaaatttactgagttccaactatgtaccaagcaatgtgccaggcatgagtatatttggaagaaaaagacctggtcccagttctcaagtagctgaaatcctttggggaagcaggtacatagtatcgcatggtgattaaccacaagggctttggagtcagccctggattcagtcttgattcatatattcactcataatgtgagcttaggtgaatcatttcatctctcaagccttcggtgttttcgctgtaagtctagactaacaatgccaatcacaaagagtgttttttttttaattatactttaagttttagggtacatgtgcacaacgtgcaggtttgttacatatatatacatgtgccatgttggtgtgctgcacccattaactcgtcatttagcattaggtatatctcctaatgctaaccctcccccctccccccaacccacaacagtccctgaagtgtgatgttccccttcctgtgtccatgtgttctcattgttcaattcccatccatgagtgagaacatgcagtgtttggttttctgtccttgtgatagtttgctgagaatgatggtttccagcttcattcatgttcctacaaaggacatgaactcattattttttatggctgcatagtattccatggtgtatatgtgccacattttcttaatcaagtctatcattgttggacatttggggtggttccaagtctttgctattgtgaatagtgccgcaataaacatatgtgtgcatgtgtctttatagcagcatgatttagaatcctttgggtatatacccagtaatgggatggctgggtcaaatggtatttctagttctagatccctgaggcatcgccacactgacttccacaatggttgaactagtttacagtcccaccaacagtgtaaaagtgttcctatttctccacatcctctccagcacctgttgtttcctgactttttaatgatcgccattctaactggtgtgagatggtatctcattgtggttttgatttgcatttctctgatggccagtgatgatgaccattttttcatgtgtcttttggctgcataaatgtcttcttttgacaagtgtctgttcatatccttcgcccactttttgatggggttgtttgtttttttcttgtaaatttgtttgagttcattgtagattctggatattagccctttgtcagatgagtaggttgcgaaaattttctcccattctgtaggttgcctgttcattccgatggtggtttcttttgctgtgcagaagttctttagtttaattagatcccatttgtcaattttggcttttgttgccattgcttttggtgttttagtcatgaagtccttgcccatgcctatgtcctgaatggtattgcctaggttttcttctagagtttttatggttttaggtctaacatgtaagtctttaatccatcttgaattaatttttgtataaggtgtaaggaagggatccagtttcagctttttacatatggctagccagttttcccagcaccatttattaaatagggaatcctttccccatttcttatttttgtcaggtttgtcaaagatcagatagttgtagatatgtggcatcatttctgagggctctgttctgttccattggtctatatctctgttttggtaccagtaccatgctgttttggttactgtagccttgtagtatagtttgaagtccggtagcgtgatgcctctagctaagaattgatgagttggccaggtgtgatggctcacgcctgcaatcccagcgttttgggaggcttaggtgggtgaatcatgagttcaggagtttgagaccagcctggccaatgtggtaaaaccctgtctctactaaaaatacaaaaaaattagccaggcatgggggcacatgcctgtaatcccagctactcaggaggctgaggcaggagaatcacttaaaccagggaggcggaggttgcagtgagccaagactgagccacagtactctagcctgggtgacagagcgagactacatctaacaaaaaaaaaaaaagaattgaatgagttaacgattaaaagcatttggcattgggcctgaccatgatatgttctcaataaataagaggtactattaacaaaaacagggtgtgattagggggagaccagagcactgcagggggtgcaaaaattggagacctgaaggagaatcatctatttgatctcttaaaaggttcaatatgtcctattttctgaagattattattatgggcaaaatttaccattaaggtggtaaatagcaagttcttttttgtggcaagattatatgtttcccatttccattatagccctaactctcttagtttctctgtccagatagtatacccttgtacacacatacatacatatacatgtcaagataaaaagtcaatcctctgatcaaaccaaaccttataattgtagaataaaatgttcttagtaggaaggcaattagaggtaaaaggaaagagcgtaggatttttcagacctgggttacaatcataactttggataaaccattactctctttgagctcagtctcattacctataaacgggaataataatattgacctcctagagtaattgtgagaaccaaatgaactcataacaaaacagacattcaaaacaaatgttaattttttctcgctctcattaacacttactaatctctagttattttaatctagtggtcctcaaacttttagatctcaggactcccttagactcttgaaaattaagagccccaagagctttagtttatgattatggttatatatacccataatcatcatactagaaagtaaaacagaaacattttaaaataattatctactgatttatttaataactataataataaacccactgcatattactgtaatatgtttttatgaaaaataactgtattttctgaaacaaaacaaaaattaacaggccttctgctctaaaatggagtggcactgttttacatattcggaaatctctttaagcatctggtttaatggaagacaactggattctctatctgctcctgcatttaatcttttgcctttttcaaaaattgaattccatgaagaaagtcaaacctcatgtaaacatatagttggaaaggaagaagcatataatagcttttttcaatgactgtggacattcttctttgatattaccttcaaactagataacaggtgatagtagataacaggtaaaactagataacaggtgaaagtagtttcaatgaggaatctgaaacatcagtgaatgtttcatgttgttaaaatgaaaagccattgatctcttttcattttgaatggatttttttaaccaatgtgtgattttgtaatatgatgctttgtcctttgtaaaatattgattcagtgagctatgcagaccttccagatttcatgatacaatatcaaaaaaaatcacatttgttaatatcattaccattctcatcagacaaatcttaaagtattgagaagtattgtttttttctattttttattattattatactttaagttctaagatacgtttgcagaacgtacaggtttgttacgtaggtatatatgtgccatggttgtttgctgcacccatcaacccgtcatctacgttaggtatttctcctgatgctatccctccccctagcctcccacccccccgacaggccctggtgtgtgatgttcccctccctgtgtccatgtgttctcattgttcaactcccacttacgagtgagaacatgcactgtttggttttctgttcttgtgttagtttgctgagtatgatggtttgagcttcatccaggtccttgcaaagggcatgaactcatccttttttatgactgcatagtattccatggtgtatatgtgccatattttctttatccagtctatcattgatggacatttgggttggttccaagtgtttgctattttgaacagtgccacagtaaacatacatgtgcatgtgtctttatagtggaatgatttataatcctttgggtatatacgcagtaacgggattgctgagtcaagtggtatttctggttctagatccttgaggaatggccacactgtcttccacaatgactgaactaatttacactcccaccaacagtgtaaaagcatttctgtttctccacatcctctccagcatctgttgtttcctactttttaatgattgccattctaactggcatgagatggtatctcattgtggttttgatttgcatttctctgatgaccagtgatgatgagctttttttcatatgtttcttggccgtataaatgtcttcttttgagaagtgtctgttcatatcctttgccgactttttgatgttttttttttttttggaaatttgtttaagttctttgtagattctggatattagccctttgtcagatggatagattgcagaaattttctcccattctgtaggttgcctgttcactctgataatagtttcttttgctgtgcagaagctctttagtttaattagatcccatttgtcaattttgacttttattgccatggcttttggtgttttaatcatgaagtctttgcccatgcctatgttctgaattgtattgcctagattttcttctagggtttttatggttttaggtcttatgtttatgtctttaatccatcttgagttaatttttatataaggtgtaaggaaggggtccagttcagttttttgcatatggctagtcagttttcccaacaccatttattaagtagggaatcctttccccattgcttgtttttgtcagatttgtcaaagatcagatggttgtagatgtgtggcattatttctgaggcctctgttctgttccattggtctatatatctgttttgataccagtaccatgctgttttggttactgtagctttgtagtatagtttgaagtcaggtggcatgatgcctccagctttgttcttttgcttaggattgtctttgctaaatgggctcctttttgattccatatgaaatttaaagtagttttttctaaatctgtgaagaaagtcaatggtagcttgatggggatagcattgaatctataaattactttaggcagtatggctattttcacaatattgattcttcctatccatgagcatggaatgtttttccatttgtttttgtcctctcttattccttgagcagtggtttgtagttcttgaagaggtccttcacatcccttgtaagttggattcctaggtattgtattctctttgtagcaattgtgaatgggagttcactcatgatttggctctctgtctgttattggtgtataggaatgcttgtgatttttgcacattgattttgtatcctgagactttgctgaagttgcttatcagcttaaggagattttgggctaagatgatggggttttctaaatatacaatcttgtcatctgcaaacagagacaatttgacttgctctctttctatttgaatttgctttatttctttcccttgcctgattgccctggccaaaacttccaataccatgttgaataggagtagtgagagagggcattcttgtcttgtgcaggttttcaaagggaatgcttccagcttttgcccattcagtatgatattggctgtgggtttgtcatgaacagctcttattattttgagatacgttccatcaatacctagtttattgagagtttttagcatgaagggatgttgagttttgttgaagtccttttctgcaactattgagataatcatgtgatttttgtctttggttctgtttatgcgatggattatgtttattgatttatgtatgttgaaccagccttgcatcacagggatgaagccagcttgatcgtggtggataagctttttgatgtgctgctggattcggtttgccagtattttcttgaggattttcgcgtcaatgttcatcagggatattggcctaaaattttctttttttgttgtgtctctgccaggcttgtgtattaggatgatgctggcctcataaaatgagttagggaggattccctctttttctattgtttggaatagtttcaaaaggaatggtaccagctcctctttgtacttctggtagaatttggctgtgaatccatctggtcctggacattttttggttggtaggctattaattactatctcaatttcagaacttgttattagttgattcaggtattcgacttcttcctggtttagtcttgggagggtgtatgtgtccaggaatgtatccatttcttctagattttctagtttatttgcatagaggtgtttatagtattcactggtggtactttgtatttctgtgggatcagtggtgatatcctgtttatcattttttattgtgtctgtttgattcttccctcttttcttctttattattctggctagtggtcatctattttgttaatcttttcaaaaaaccagctcctggattcactgattttttgaagggttttttgtgtctctatctccttcagttctgctctaatcttagttatttcttgtcccctgctagctttggaatttgtttgctcctgcttctctagttcttttaattgtgatgttagggtgtcgatgttagatctttcccactttctcctgtgggcatttagttctataaatttctctctaaacactgctttagctgtgtctcagagattctactacgttgtgtctttgttctcattggtttcaaagaacttctttatttctgccttcatttcgttatttacccagtagcatgttgttcagtttccatgtagttgtgtggttttgagtgagtttcttaatcctcagttctaatttgattgcactatggtatgagagactgtttgttatgatttccattcttttgcgtttgctgaggagtgttttacttccaattatgtggtcaattttagaataagtgcgacttggtgctgagaagaatgtatattctgtcgatttggggtgcagagttctgtagatgtctattagttctgcttggtccagagctgagttcaagtcctgaatatccttgtatattttctgtctcattgatctgtctaatattgacagtggagtgtgaaagtctcccactattattgtgtgggagtctaagtttctttgtaggtatctaaggacttgctttatgaatctgggttctgctgtattgggtgcatatatatttaggatagttagcttttcttgttgtgttgatccctttaccattatgtaatgcccttctttgtcttttttgatctttgttggtttaaagtctgttttatcagagaccaggattgtaacccctgcttttttttgctttccatttgtttgataaatcttcctccatccctttattttgagcccatgcgtgtctttgtacgtgacatgtgtctcctgaatacacaccaatgggtcttgactctttctccaatttgccactatgtgtattttaattggggcatttagcccatttacatttaaggttaatattgttatgtgtgaatctgatcctaccattgtgattctagctggttattttgcctgttagttgatgcattttcttcatagtgtcgacggtctttacaatttggtatgtttttgcagtggctggtaccagtttttcccttccatatttagtgcttccttcaggagctcttgtaaggcaggcctggtggtggcaaaatctctcagcatttgcttgtctgtaaaggattttatttctccttcgcttatgaagctcagtttggcgagatatgaaattctgggttgaaaattcttttctttaagaatgttgaatattggcccctactctcctctggcttgtagggtttctgcagagagatatgctgttagtctgatgggcttctcttcgtgggtaacccaacctttctctctggttgcccttaacatttttccttcatttcaaccttggtgaatctgatgattatatgtcttggagttgctcttcttggggagtatctttgtggttttctctgtatttcctgaatttgaatgttgccctgccttgctgtgttggggaagttctcctggataatatcctgaagagtgttctccaacttggatccattctccccatcactttcaggtacaccaatcaaacataggtttggtcttttcacatagtcccatatttcttggaggctttgattgttccttttcattctttttctctaatcttgtcttcatgctttatttcattaagttgatcttcaatctctgatatcctttcttccccttgattgattcagatattgatgcttgtgtatgcttcatgaagttctcgtgctgtgtttctcagctccatcaggtcatttatgttcttctctagactggttgttctggttagcaattcctctaaccttttttcaaggttcttagcttccttgcattgggttagaacatgctcctttagtttagaggagtttgttattactcaccttctgaagcctacttctgtcaattcgtcagactcattctctgtccagttttgatctcttgctggcgaggagttgtaatcctttggaggagaagaggcattctgggttttggaattttcagtctttttgcattagtttttcctcatcttcgtggatttatctacctttggtattttatgttggtaaccttcggatggggttttttgtgtggacgtcctttttgttgatattgatgctattcctttctgttcattagttttccttctaacaatcaggcccctctgctgcaggtctgctgaagtttgctggaggtccactccagaccctgtttgcctgggtatcaccagcggaggctacagaacagcaaagaatgctgcctgttccttcctctggaagctttggcccagaggggcacccgccagatgtcaattggagctctcttgtatgaggtgtctgttgatccctgctgggatgtgtctcccagtcaggaggcacgagggtcagggacccacttgaggaggcagtctgtcccttagcacagctcaagcactgtgctgggagattcactgctctgttcagagctggcaggcagggacgtttaagtctgctgaagctgtgcccacagtcgcccctttccccaggtgctctgtcccagggagatgggagtttcatctaaaagcccctgactggggctactgcctttctttcaaagatttcctgcccagagaggaggaatctagagaggcagtctggctacagaggctttgccgagctgcggtgagctctgccgaattcgaacttcctggtggctttgtttacactgtgaggggaaattgcctactcaaccctcagtaatggcagatgcccctccccctaccaagctccagtgtcccaggtcgacttcagactgctgtgctggcagcgagaatttcaagccagtggatcttagcttgctgggctccatgagagtgggatctgctgagctagaccacttggctccctggcttcagcccccttttcaggggagtgaacggttctgtctcgctggaattccaagcgccactggggtatgaaaaaaaactccggcagctagctcgctgtctgcccaaacagccacccagttttgtgcttgagacccagggccctggtgatataggcacccgagggaatctcctggtctgggggttgtgaagacaatgggaaaagcgaagtatctgggctggaatgcaccattcctcatggcacagtccctcacagcttcccttggctaggggagggagttcctgaccacttgcgcttccatggtgaggtgacgccccaccctgcttcggctcaccctttgtaggctgcacccattgtctaaccagtcccagtgagatgagctgggtacctcagttggaaatgcagaaatcacctgccttctgcgttgatctcactgggagctgcatactggagctgttcctatttgatcatcttaccagccttctcactactgctttcatatcatcagtgcaaatgtcaacacagtgaagaaggcaaatgacatctctgaattactgtgaaaatagtttaacgtgaaggacctcctgcaaggtctcagggaccctcatgggtctgtgcaccacccttcaaaaaccacaccaaacccccatcacacacaatttacctatataacaaacccacacaggtacctctaaacataaaataaaagttaaatacaaataaaaataaaagccaccctttttccaggtgcagtggcacatgcctgtagtcccagagctggaggattgcttaagccctggagtttgagtccagcctgggcaacatagagagtgtccaaggctctataaaaagaaagaaaatccacctctttaatctaatctttatgttttctggagtagctcatttattttcagtggatggagagacactaaaaatttatttcaccctgttaaaaatgctgaagtggtttacatttttgaaaagaatttcttttgctgttgtctaagatacagcaacattctgaaggttgttttttttgtttgtttttttttttttttgaggtggagtttcactcttgatgaccaggctagagtgcaatggcatgatcttggctcattgcaacctctgcctcccaggttcaagcgattctgctgcctcagcctcccaagtagctgggattacaggcgtgtgccaccatgcccagatgattttttttttttttttttttgtatttttagtagagacagggtttcatcatgttggtctggctggtcttgaactcctgacctcaagtaatccacctgtctctgcctcccaaagtgctgggattacaggcgtgaaccaccctgcccggccgaaagatttttgaaacatcattttatgtatactgtggtgttttttgttttgttttgaatttacaccaacagtgagttcattgtagttttgcaaaagaggaaactaagcatgaaatgctggaatgggccgggcatggtagctcacacctgtaatcccagcacttgggaggccgaggtgggcagatcacctgaggtcaagagtttgagaccagcctggccaacacggtgaaaccctgtctcaactaaaaataccaaaaaaaaaaaaaaaattagctggacgtggtggtgcatgcctgtaatctcagctactcgggaggctgaggcaggagaatcacttgaggcagaggttgcagtgagctgagatggcaccaccgcattccagcctgggcgacagagtgagagtccatctcaaaaaaaaaaaaaaaagaaaaagaaaaaaagaaaagaaatgctagaatggatttcctctatgttcacacacataaacatatatgagtatatggtatatagtttcttattgcaaaggtaataagtccatgtgaaaatacagacaaaagtaagaagtgaaaatcatttctaacctcactcaggaaaagacgatattaatactttagtatatgtgattatagtcttattttataaatatttatttaaaattttaacaaaaaattgaagtaatatttatattgtgttttatcattattttgcattttaaatgcaaatctctttttatctagggactcaaaatcaagtaatttggtgagaggtgcctatttcttttaattggtaggctaagaaagtaacaacaaaatatgaacatttgttagaaaatgaactcttgcctgtaatcccagcacttttggaggccgaggcgagcagattgcttgagctcaggagttcgtgaccagcttgggcaacatggtgagactccatctctacaaaaagtactaacattagctgggtatggtggtacatacctgtagtcccagctacttgggaggctgaggtgggagaattgcttgaccccggtggcggaggttgcagtgagctgagattgtgccaccacaaccgcattccagcctgggctacagagggagaccctgtctcaaaaaaaaaaaaaaaaaaaaagagagagagagagagagaaagatagagagaaaagaaaatgaactctgatcaaaacatgggcaatatgcactcaaaattccctggcgtgagccatctctgacattctgttttgctttagctctcctatcacttgaatttctttagtgagttaaattaaaattttattccactttccaaaggcacagagttctagtaaaatctacatagcggataattctaaccaacaaagatgcaaatctctcacaaaaaataggactgctacctctgtggatctggaagatgctcaaatgtcatttcggtatggtatgaaccagtagccccaaataatagattaaacaatttccaagaatagttaggtcccaggcacaatggtgtacctaacatgattacatactttttatctcatataatcgtcatggcaactttgtgaaatagatattatgatcattcccattttatggaggaagacactgaggccagtggtgttgaataacttgcccaaagatagataactggccgggcacagtggtgcacgcctgtactcgcagcactttgggatgccaaggtgggtgcatcacttgaggtcaggagctcgagaccagcctggccaacatggtaaaaccccatctctactaaaaatacaaaacttagctgggcatggtggcgtgagcctgtaatcccagctacttgggaggctgaggcaggagaatggcttgaacctagaggcagaggttgcagtgagccgagatcatgccactgcactccagcctgggtgacagagtgagactccatctccaaaaaaataagatagataactgttcgctctttttattctaaatccaatgtattttctaccacccacagctacttcaagtgctctaagggcaattaagaaatatactgcattattgtcatttaacaagttaaatattttgaaaaaaatcaggctcctttcttatatcacactttaaaaatgcatcttagatttgaaggtgggaagaagtttgactgcatcaaaacttttaagatatatatccaaaaacaccatgaacaaaattaaaagacaaactacaaagaaaaaaatgtaatatttttaggatggttctttttttttttttgagacagaatcttgctctatcgcccaggctggagtgcagtggcatgatctgggctcactgcaagctccgcctcccgggttcacgccattctcctgactcagcctcctgagtagctgggactacaggcacccaccaccaccccgggctaatttttttgtattttttttcagtagagatggggtttcaccgtgttagccaggatggtctctatctcctgacctcatgatccgcccacctcggcctcccaaagtgctgggattacaggcgtgagccacagcgcctggccaggatggttcttaaaattaaattagaataagaaatgtagcaaaggatatcagctagcaattaacaaaagaagaaatacaaaatgttaataagtagaaacaatcactcaatcttagtaataataaaatgaaaattaaaactaacaaatgccattttttgctaatcaactagtatagttttttttaaaaaaaacaatgatgccatgccatacactaataccacagatggcaatggatacaaacttttttggaagagtttggtaatatgagtcaaaagataacccagcaattcacaatcaaaaaatttattttaagcaaggatatggaatagtttgtacatatgtatgtagaaggatcactatattatttaattacaaaaatgttcaaaataaatgctcagcaatagaaagatgatcaaataaactatgattcatctcacaacaattacaatttatgtttttgattcttttctttacactttcatataaaaccccaattttcttcaatgaacctgccttattattttaatcaggaaaaaacattattctagagataccattagccaaatccattatctgtacttaggtctgttctagactgtgtgaagtgatttatgtaagaaatgacaatcatatttattatgcattaactctgaaaagctcatcgtgctgtattctttgcctgtttgatcccattcaagcctcatgacaatcctgctaggtagatacagtctgtggtcagcactttagagtttcaatgaaacctgatgaacaatattaaaaataagagaataaggttgtcttctgagagttaaagttaaacataataattaggaaaggaaatttaaaaattacctggaagcgacagactggcccctggacccagtagactaggtgtattgatgcagctgaaaggacagagagacctagtgggctagggcaggacagagaaggggatgtcacagaggccagtgtgggccacatccatccaagagcctcggccaacacacttccagagcttccagtccctttggttgcgagagcttttcaaatttgtgttagctgaggaagtggaccacagatgggggaggggtcagaagtgaccaagaacatccattctggggtggtcgtcttgggacatattgggctatgccattcagtgctgggttcctccatttcccctagttctgaagcctggggacatatccaaacctcacctgctttcaaggaaagtctactgataggaagaaaatgatgatactcacaggcacaagcattctggtcccggtgagagcatccttactcagtgtgaaagagtccatgatcattctgatctatctgtacacacagtcaattctcattattcatggtagtcatgttctgcaaacttgccccaagcaatgaattatggaatattgaatcattgctcccaaggaaaatatagggttaggttcctgtgagcctctggctatcacattttcattaacaaatcactacacaaacttattttatgtgtgcttctatttaaagacgccacatgtaatagatctcattgaattataaacattgaactccagacgaaggcactataactcatgcctgaatgaagcttgtctcacacagcttattttctcaatgagacacatcacagccttcttgcacttaggaacactaaacagcatttcagcattatgcctgggggctattttaaacagtgaaaccatccatgaaaagcataaaaatgaaagaaaggtggtactatgtagaccgtgaaaaagacactggcttagagttggaggcctgaaataagaaggcagagcaccaccgtgtttgattccagttgggaatgtgcatatagggagatgctttgttttgggtttttttgttttgttgttttgttttgcctgtctacacatgtccacgaatgactcagaaaacacggcaagtattaattagggagtaacaaataaatcttagcaactaggtgaattcacaaatatagaatctgtgaataatgaagatcaactgtatacctcaggcagatgaacttgatgaactgaagcctaacattgaaaaatgcaccttctcgtgctgacaaagtaagctactggacctgtagagccaaggcccaggccccacatgtgcccatattaagaatcaaccagttcatccccaggcagcacatcattccctcaccaggcgctatgcctttttgtctctttgcgcttctacaccagtgattctaaaactttagcatgcatccagaaggcttagtacaatgcacgccagtgagcctacccccagcatagctaactcagcaggtcttgggtaggggttcagattttgcatttctaacaatttgccgggtgatgctcatgatgctgggccagggatctcagttggagaacctctcctctatacgattatccgcattttaaaatccaaagctcagaagtgttgagtaacttgcccaaagtttcatgcacagctagaaacttgctttcaaaataagatgtggctgaactcatgatcagccctttgtgttctactgtaatatctttggtgcagatttcatcgtaacattgtaccttaagtagtggttttatttctagactggcctattcaatcacagtagagttggactctcaaatcaagaatgctgctacaattgttgggcccttggcaggcagacctgggagtacaggagggagcaaaggaaaaagaagacaggttcctctcttgtcttgctacagggtgattcacacttgatgacagcctgagatatcagaatacaaaggaattgtcgttgtattaacttagtggtgaattttggttgggagcccatagaaggtagtgattacacacacacacacactggagtctgatcacctgattatctgttatctgagtttgagccagtgcaagacacacaataagctctaaataagtgtcagcgaatatggtcaacatagaaagggttggggatgatgtcaacaaccttaacagtgagattcatagctgagttgcagagtcaggccctttagaaaaactaatcttcatttaggagaatgttgctaagctattagatccattaattgtgtgtggcatcatatttcatcaacagtatttttgcatcttacttttgcagtagtattccatacttctgtttacctacatttggattcaagcacattttgccattgacaaatgatgctgaaagattcaatgaaattgtgaagaatcagaaaatttctgctaatattgacacacccgaaggtggatttgatgcaattatgcaagctgctgtgtgtaaggtatgctgaagggagtgctgtttcactctgttaacataaaattcatctcttattaataattctacttcaaaaagattagctaatttcctttcctttgatctctaaatttctatatttcatatttttcttaaaatacacaatttttaccaaatgtttaattaaatcatgttgaaatggggactgtcctttctgcctactatttgaataatctaagaaaattgtcgtgttgggaaaatttagttgaaacaatagctatgcatgattgattttcaaagatcaagatcagattagtttttggattaatcatgataaaaaaatcaagggtagaacatttattttaaaaagttaaaatgctctacgtcagtatatgttcatacatatgactacatagctattgttttgaaccaacaataagcttcggaagtttgctgtctctacaacattacaggaacactgctcctccttgactgtctgacaagtatccacaagaattattcccctgtctttaggcaacagcccttcatgaaaaatatcaggaaataaacagggctgaagctcctagaaggtgggagggccaaggaattagaggaggaaggaaagggataaggtgggatggaagagccaggatgcgtttttacccaattagttcctggactaatattaattaaaggggagggctttactaaacaccaacaacagacaattttaattaacaggaccttcgggccatactttcataagcaattcttatccttgtattaggttcataatttttggatgacatcattggaaagagaaatatgtgcctaaatgttgggtgacattttaatgaaacaggcttactctgagcccctttaacattgcattttgatgagtttggcttcaatttggatttgggaccatctatgacctcctctgctcaatttttttggagaattgaaagctggatagtaaaaataattgaactatgtaaaagtcaagattaactgcataccgattgtagtggagctatatttttctgaagcataaatcatatgaaaatgttatccaggaaaaagcaaatgtcacagaatttcatgttttattaaaaacattaatattatcaattcacgatagataaaaaggctaaaatagactagcaatattatttttataacctaaatgtgtccaagcataattgatccacactcaataaatgcctgcctccctccaatatcacacaaatgtttctttctcactgtaggaaaaaattggctggcggaatgactccctccacctcctggtctttgtgagtgatgctgattctcattttggaatggacagcaaactagcaggcatcgtcattcctaatgacgggctctgtcacttggacagcaagaatgaatactccatgtcaactgtcttggtgtgtaacctgcactctgtactgttttcagggctataagtaggagaacgaagcaacaactagtgtaatacatgtgaaataacatacacttggtgaaagcagtgcacattttctaatgtgggattaacaagttgccccagctcgattctcaccatcctcagaggttcccaccagagcataggtggacggtgggacatgtgggaagttagatctgctatgaatcccatgatcccagaacctccccaacttctcaaaaatcctggtgctggtaaagcaatacaggcagctcattctattctcagccacagcctcagaaaggagggacccagaccagaacagtagccacataggatttgcagtgaatgatagtccttgaatcaggccatcctttcatgttccatgggtaacaactagtcaggtatggcttggttggtgcttgttaacctttggcttattttttgtcatttataaaatgctagtgacattcaaagaaaacagctaactcttgtaaaaccaggaaaaaatttcagagctctttggacatgcatgatctcctcaatagacccctatgtatccagctgcttttcctgaacagaccatgaggctgctatgcttgtgcacatgttattccctctgcctggaatatccttccttcctagcctgctgagaaactcttcattatccttgaaaagccagttcagtcattactgcccccagagagccttctttgacctctgccaggctctgaagcaattgtctttcccttcagttgcatacgcagatgtgttcttgtgcatctctatgtagaaatatgttttcttacatctgtctgtctttcttgcacaatcctcaggtccagacctggtttattatctctgtttcctgatagcacagtgcctataacacagtgggtgccaactaatgtatgaaatagaggccgggcacgttggctcacgcctataatcccagcattttgggaggccgaggcggtggatcacgaggtcaggagatggagaccatcctggctaacacagtgaaaccccatctctactaaaaaatacaaaaatttagccgggcgtggtggtgggcgcctgtagtcccaactactcgggaggctgaggcaggagaatggtgtgaacccaggaggcgcagcttgcagtgagccaagatcgcaccactgcactctagcctgggcgacagagcgagactccgtctccaaaaaaaaaaaaaataaaaaaataaatttgatttctgaagcagcagtctgagattgtcatattttccccatttaacacttggggaaatatggtacagagaatttaagtgacttcttagaacaatgctgtggaggtgtaggtgggggtgcagggggagagaaagagggagacgggaacctagaattctaatgtcaattggaaaactattctctaaaaactcttaacagttcattactcactactattccttgacctaaatttctaaatttcgacatgaatgttttccccaaacatttgatcagtagtattccccaaatgtgtatattctttaatcacatactctgccttttcatattacaatatcagtgaggatagccgcatgttgtcttttagtcagtgaggggcaagaaactggaaaatttatccccttttcattacccttttcttgcaacttttcaaaagcaccacaaaaagctccattttgaacgaggcaggttcataaaagctaacactacttattgcctaatatgaacttctcagctaataaatgttcaagttgttctttctgaataagttgtaacaaatccacagaagccagagaccgtatctatgcctgcctgcaacatagcccccgggtcctctgagcacttcctgtgtactcaaaactcaggccagattcctcaggccaaaaaataatacaaggtggttcctggccttgaacttacagtatggttgtgggaattaaaccaacagatctgattcaaatagaaaaccagcttcgctcaccttcgaaggactatgtggtgtgatcctggctacacacacacagcagctaaggagtgtgggaacacgtggagataaggagggactggcactggagggatttaggcatcagcgtaaaggatttttacgcagttgaaaagcagaggaaatggataatatttggtatctctattaataaaaatccaaatgtgatggaaatcacatatgacatagccatttgcagttgggtaatttattgcagtgttttaggcaaaactacacttttctctcaacttgaaccttgtgcctaaagaaggctttagatgaaaatactccagtagtactaagaatatgtgaatattccatatgagtgtacaggagggcttatttatcagtgttcctccctttggctgacttctccctttgactcccttaacataattaacatatgttacttatgtcataattaacatattcttaatttaattgttagcaggctagtacctcacttgagtttcctctgtacattattcacatttagattcatataatgggcaaatgccacataatattttccaaacttgaaaagtaaagtccatattccaatttaaaaattaagcttcttttattttttatacagtacacatatcacttgggaacaaatatgccaatggaacagaagtacaatgtagttttcaattgtcctgtaaaaatattgcacgattccatgcaaccaacttgtgatattaaaatggcagtaaaaccaaacccaaggattagtacgggaatgtcatagtatgtcatacctcagcaaccctcattccacctcatccaattccaataggagtttcagagctacaagagtcacttcagtcatgtatattatagtccaacagcccctccctcgactgaggaattcctagcctgctggtaagtgtcacttagaaggagaagaaatgtttgtctacccttgaaaataggacacactgttagtctttaaataaatttcaaatggtcttcttagaagtggcagagcatgatacaccacatcaacaggaactgactcttaggacttgactggatttataagatttagaaaaagattattaaaccaactaagtgaataatgctaattgtgtatttgtttacttagagtgatagagctataatgcctgtgagcattgaaatgccaaactcaaaaaggtatctttgaaataaatattcctttctttatttacattattttattgagatgatgcaaaattatatatgttaattttaggaatatccaacaattggacaactcattgataaactggtacaaaacaacgtgttattgatcttcgctgtaacccaagaacaagttcatttatatgaggtaagcaaaaataacttgggaaattccttcaaggagattatgtgacatgaaactttaacattaactctgtgagtttaacacatgggaaggccattagataatcattaacacacaccaaatgtactgggcgcttggctaagtggactcatttactgcttgcaatttaaattgtaaacacctaggtgcagtagggcatggggaactaataaggtgggatgagaaagactgagttaaggaaatgaaacagatatgctggaggagagtatcaacaaatataggacagcctacctaaaagaaaatttattatctgtccccttgaattatttcatctaatgagggagttaacagagaacagagaaaatcttaagagtgggagcagaattgacttcacattctttggcatttgcaaattagatacttagaaaagacacacacagagacacaagctattgagaattggaaagttaaaggaaaaaacttgttatatggggccaaaatacaatttatcccttaaaccagctggatttgcagctcaagtgtttgaatggaagcaccaactgcaaaaagggaatggtttcattagatgaagtgctgtccccaaaccactgtgcaaactgcaaaaaaatacgatatatgcacatacaaaagatttctgtggttttttttcccagcctaggaaaaatatgtcaaaatgccctgaattgatttactcctgcagttttacagagaagtaaggagtctttagcaggggccctaaaaataatgcagagaaattaaatagtctgtgccttctatgcagaagtgtcaaatgctcctaaatacagagtttgatctctcattccttttgaaaggacctcttaacttgcttggtgacttcacagggcttctgaaactctgagattatgtcacagaaggctttgattaaatgccactcactactaaggacggtacagccccatgaacttgcatcaggttctgtagaaaggatccagcaggagatgctatcttgcattttgaatgagaggagggtattgtactcccaggtgagattgccttctgctgcaaaccaaggaagttccttgcaatcaagctccatacttgaaacctgtgttctacgcagagcccatgtgggttcacctgatatgggcattttcttcaggctttttagtatgtgatatttgtttccagtggttttaagtagtagagttgcagttgagacttttttaaaatacccccaaatacaatagtgagtctattctgcctttgatccttaaggctagtgtgagaggaccctgggggtcacaacaccttctccacagcaaggctccagtttagaagtgggaggaggagttgcacagaacttttcttcaaaggggagtctggggaatgcgattgatgatcgtgaacatagactaccataactcactttggtaatagtctttaagactcacaactcatttatacgtctccccaaaaccgctattaaaaagacagaggcagatgaaaaataactacatggcaaaacagagcctgtcggatttaagctagttgcatccatgattcccccgttgcaagggaaatgatcatttccgaggaaaatgccagattagagtctgcctctaatgtaacagcaggacatcgattttgcctgtcttctaatcttattatgaggcgaatttatgttctgtcatgatctgtggtctttaccatccagccttcactaaattcaaagggacattttcaaggggtcatacgacagtccaggtcagccacccactctatgactgaccgtttcattgttttatttttattttgatgggctcatcattccatctgcattagtaggggcaggcagcagcctggcctaaagataataacagcaacaatgcacatccttgaagccttcacacagcatgaaaatgctgatcttccattttattgataatgaaaactgaaaacggtccactaatggcttgtgttgcctttcaattcacatcttttagaaggagccctgtatgtgcaggagtcctgtgcgatttgatgtttggataactgcgatataaggaacgtagctactgaagaatcactgaaaaataaaaccagtgatagataaataaagcaattaagtggttagatttcatgaaaattccagaaggaaaattatttgcccgagttacacgttaagcatagttacttgcctgcacaggccacacaggtttaggttcaacgaaggccctgtctgcagcaaataaaatttatgttgcccactcatggaatgcaggaaaaatgactgttttttttagtaactgtggtagaatgctttggaccgcccaggtgtgtagtgtgcctgtacattgttgtaacagagatgaacagtgaaaaggataaagtaagcagttttgcttcagttcagtatggctgtagtgtgcaccccagactccagccaacagaatatttttgaacaaacttattattatgaatagtttcctgtttgtccaattatagggttcgaaagataatgatgataatagactgagcagtgggtagtatattacattctagtgctaactaccattttgaatcaggattcaattacccaagttaaaaaaaagtttttatatttcctctgtagttttaaaatgtttactgttaatttacattaacatagtatcaggccactaaacctcaactgtcttatctgaatagcttctctttcctagtaagctattgagataaaaagcaattaaatcaacattctttatgacattgtcgaatcatattattaatcactgtgggctatttccaaggctttaaaatatcctatagctattcaaaatatctacatctggcttgaaaagatgactttagtgaagttaatagcaataattattatatgacctggtatttgtgatgtaatgctgaaacacagcaattggaaagtaaacaagaagtatactggtacttccagtttactcactaacttctatgaccactgattaatatctcttggctgttagcacaaagcaatgtttctaaagcatgagagaaggggagtacaagcaggtttttatgcagccaaagggacctttcctctggagacaaaaaaccctcaatcattaactgtttgaggagaataacaggtctttctcatctgtttaggccaattctcgaaacacagtagattctcagtagatatttgtcaaatgatttaaaaattgcaataactgcacttcatcttttctaaaattgggtcaaaagaaagacttggagttttgcgtgacaagcacttgttaagattgaggaagcccacagacacagagcaagtgggggcacctgaccattgccagaaccttctgcagccctggctgtcccttcttccatccctcccacattggatgcagatgaacactctgccatcagtctcaggaccaacatgttggagaagctccacagccttctagcaggccataaaaggaacaccctgagcaagtacccacctgatggccattagatctataaacaaacataaacagcagccgcatatgctataagcctgatgtccttgtgtggcttgtggaaattatccaccatacgtaagtttccatttttcaggaatcaataacccagctgttattttacctcttctttcttctatttggttcttttgagcttttcattgcagcgagggaggaaaagaggcagagaaaatagagagagaaaataaaaattggacccctttgctatttgttagcctgttctattattgttttgttttataatgttcctgttggaaaagatcaaaacaattttgctccagtggaaatctctttatctctctggcctcagtttttaggcaataaaaaagactgggcgggaagatttcagcctcaacagtcaatgaccttgattctggaggagggaaattaccatgaattccaatgacctccacacaaataacaaagtttagtaagctgtaatgtagctaattttagggcatagtctagatattctttatcctatcaatctcattctgtagtggagtattccaaacttgtgattttagtaaaaataaaatcatctaggagtaaaacgaccacttctggattatgagacatctccatggaggtaataaattgctctttatttaagtgtaatggaaagtattttcatttctccttaattgatagtatctgggaacaaagactgaggagggccagctgcctacactttccttattaatgaaaacatcccttagagagggaggttttggaaataaaccttatgtcctcagattatcagtcagagttgttgggagtattttccaatcctaaccatgaaaaatcatcagttaccccttagatcacacatagtacttttcttctaaagaactcaaagcctcataactgagaaagtaaacacaagaaagaaaaaggtacaggtttaaagcaggaccttaatgagatgcctgattaggccaatacttgtagaaatataaaatgggatttttttttttcttgagagagagtctcactctgtcgcccaggctggagtgcagtggcatgatctcagctcactgcaccctccgcctcccaggttcaagtgattcttgtgccctagcctcccgagtagctaggattacagatgtgcgccaccatgcccagctaatttttgtatttttagtagagacggggtttcgccatgttagttagccaaactgatctcaaactcctggcctcatgtgaactgcccaccttggcctcccaaagtgctgggattacaggtgtgagccactgtgcccagcctaaaatgggatttcaataatgcgagatctaaatgctttgagatttacagatttacaacgcacaggatatctagcatatcattgaaactaagacgctatagactgcatagtcattcattccttcatttctcaaacatatcatgagtacctcctgtgaactatgccaaagtttgtgactatagagaagaataagacgtagtgcctgccttaagaagtctcagagagcatcagcagacttgtaaactaatattttgcctataaaaacagaatgagggcattttagagttgtgttctggaaagagactccagctgaggggtcagagttttcatgtctgtcaatgtttttactcttttctattcactatctttcctataaggagcagcaaattaatcggcaatcataaaactgcttttgatgctaacaatatcatggtgttggaccaagcccttcactttataggggtgagggctggtgatgatatgcaactatgactatgataataatagtgtaatagggaacgtttgtcaagagcttattaggtggcaccctggaggttcaggattttgcactcattttatcatttaaactccttcttatgcaaattgcatgtaagagccaagatttgaactcagataatctgaatctacagtctcaatcactgagataactcacaattgaatcactgagataactcacaattgaacctgctatagtgaaaaagcagaccactagaccaccagacacagattttaaaataatcacctttttttttttttttgagacaaagtctccctctgttgcccaggctaaagtgcagtggcacaatctcagctcactgcaaccttcgcctcctggattcaagagattctccagcctcagcctcctgagtagctgggattacaggcgtgtgccaccatgcccagctaatttgcatgtttttagtagagacggggtttcaccatgttggccagactggtctcgaactcctgatctcaaatgatccacccacctcgacttcccaaaatgctggaattacaggtgtgaggcactgctcctggtcaagcaaccagctttaaaaagcatagaattcaagggtagagcagagctgcctgacagctaaaccaatagatgaattccctgtaaattgcacagtgctttaagatcaggaaatacttcatctagggttcttccctattgctgttaatttggatgaacagagcaatttaaagatgcatagacttgaaaaaagacagacacttggattctgccccgtgggttgtttaagctctgggtggtaagaacaggccacacagctagggaacactatgcattgggtcagcacatctaaaacagctactgtctatggtaatcacaatctatggttccaatcaaagtgagaaattgggggcacgtggtctgaccaagactataggtttatgatgagcatatagttcaagcatatggaaaaatggcgtaatataataaacactcggccgggtgcagtggctcacgcctgtaatcccagcactttgggggccgaggtgggtggatcacctgaggtcaggagttcaagagcagcctagccaacatggcgaaaccctgtctctactaaaaatacaaaaaattagcaggttgtggtggcatgcacctgtaatcccagctactcgggaggctgaggcaggagaatcgcttgaacctgggaggcggaggttgcagtgagccgagatcgcaccattgcactctagcctgggcaacaagagtgaaactccatctcaaaaaataataataataaataaacacccacatacttattgccagttttctcacattttaacattttgccaccatatttgctttggattttttaaacaaatgaaacaacccagatctagttgcatgctgtgtaactgcccaactctggtctagttcccctgtccttctacagaggtaaccagtatcctgaacttagtgtttgtcattctcacatttgttttttgtgctattaaaaatatgtgtgtgtgtatatatatacatatatatatgtacacatatatgtacatccataactaattatgtagttttggcttataagcttaatttcatgctgtacacattatttttaccatttgctttttgactcaatgttatatatttggggttttttattatattttcttattatggtaagatacatataacataaactttacattttagccatttttaagtgttagttctgtggcattaagcacttgaagcactctgccatttatagagaatttatctattggttcatctgccaggtattaaaactttgttaagctcaatgctctgcttttgaggcttgtccatggagatacgtatagctatagtttactccaccccactgctatgcacgctccattcacagtattactggcaatgtgttcattctgcaagtgagggcatcagatcacttccagttgtgcagcattacaagtgttgcagccatgcacatctttgcacacatatgctctattgagaagtgaaatccttgggtcacaggggaatggcatctataattttactgagtttgtccaagttgctttccgaagtagttgtatcagttactctcccaccagtaatgtagtgtggaagtatgaccaaaacaaaatgaaactttaagttactctttttctgattataaaactaatatatactatttgcaaaaagaaaagtgaggaggaatacagaaaacccaaagaagaaaacaaagatcactcataaactcaccactcagacatagctaacattgttgacattttagaataagtttttctggccgggcatggtggttcatgcctgtgatcccagcactttggaaggcagaggtgggtggttcactcgaggtcaggagttcgagaacagcctggccaacatggtgaaatcccgtctctactaaaaatacaaaaatcagccaagtgtggtggcatgtgcctgtagtcccagctacttgggaggctgaggcaggagaatctcttgaacctgggaggcggaggttgcagtgagtcgacgtcatgccttaatcgtacaattaagtatgttcaaactttttgaatgtttatacatgtataatcttataaaggcatacaaattaaattgcatgtagttatacatcaaaatttttattgatgagagtaactatatgaaatcaagatcatcctacaaaattctgagcctatagttgccatacttataggtgtctactttaaaataaaagcaaacttgtcctttcccaccagcagcccaaaacctgagcaagtactgcatttttacctcctgggttacttttacatattcacataatacttagttacttttttatattaataggaccaacaaattatttccagtattcattttcttatgcctgaaattgcccctttggtgaagactttgacatctgtgaacaaaactcctctctgagctgctaactgctcaaagctgtgtaattacccttctccgctttctctgggtctcacagcacaagggcactcctgcataattcagttacccatgtatcccctaaagcctttcctatggttgcagttggccactctatgtggtgtctgtgaggctggcccggactgtaagtttgaagggagctcacccagcttgtatcactatgcaggagtctaacagcaaccaagcattttccacgtgtcatagcctttgaaataatcacatatggcatcaaggcacaaaaggacaagtgaaactgacaacccccgggacataagaagagtttaagagtattttctattttcattttatgtctgattatccagaaaagccccaaatatcctaccaagggactagtattaatgataacatagtttaacattttgttgtcttggcattattgaatcttcagaaaataaacagaaaattttggaatcattatttgttgagcttgaacagttgaggtaattatttataaattcaagggttggcacacttttttctatagagttttcagattcagcacataaaaatccaggagatccagttaaattcgaatgtcaagtaagcaacaaataattattagtataaatatgtcccatgcaatatttggaccacatgtacactaaaaatttttcattgtttctctgctttccaatttatctgagcattctgtattttatctggccgcctatctacaaagggtcaaatagtaagttaggcattgtggccacatggtttctgtcatgattattcaactctcattgtagcatgaaagcggccatggacaatacataaataaatgagcatagttatttacaaaaacaagcaacaggccaaatatggcccgtgggacatagccaatccctgccttcgttcattcattctacaaatatttatgtgttttccgtgtgtcaagcactggactaggccctaggagtatagaggagaataaaaaaagacactgttttgtcctcatggacttgtaatctagtagggggaaatagacgagaaacaattaatgaaaaaacaaccaattacaacttttaatagtgttatcgaagaaatggaaaagaatagtgtgcagccatggaccataattaagggggagaaagtgagactttccttggatagaattttcatggaaggtgcctttccagaagtgataatgaggaagcgagctgaaggctgaggagttttcaagaggcaaaggcgtgtgcaaaggccctgaggcagcaaaggactcagttcccagtgtgcttgagaaaaggaaaaaaggccagttggcctggagtgagtaggggtagaaggagatggagcgggagaggtaggcagaaaccagacccttcaatcttgaaggcagtgggaagtaagcagggtgctattctatgggtagcaggcatccaaaaatacttttgttgctgggtatagatgtcacaggtatatgacaggctgaaaaccctggataaactgtgggtatatagatttaaaaacctaatgcctttattttccaaatcactacaagccctctgatagactgttctacaccagcagttctcaaacttaggtgctcattagaatcaggtagggagctttactaacaaacccaatgtgtaggctacaccctgatccaattgagttagtatctctggggctgagacccagacaccagtggtttttttctttttattttcttttttaactggtgtatccaatcaacctgggggacagggacctcttaaaatgcagactgtcattcaagaggtctgggctggggcctgagagtctgcatttctttttttttttttttgagatggagtctcactctattgcccaggctggagtgtagtggtgcgatctcagctcactgcaatctctgcctcctggcttcaagcgagtctcctgcctcagcctcctgagtagtggggactacaggcgcacaccaccacacccagttaatttttgtatttttattagagacggggtttcaccatattggccaggatggcctcgatctcctgacttcatgatccacccccctcagcctcccaaagtgctgggattacaggcatgagccaccgtgcccagccaagaatctgcatttctaacaagtttccagatgatgttgctgctgtcagtccacaaatcacacttcgaatatcaagagctgaagcctcttttgcagtccttgcacatacacctacttgctattttctcgtccccttcattttcttcctactagtcatccttcaaagttttattacctgccgtttggcctgcaaagcacataggctgctactgaaccccacatcacttcctattttaaaagagctttctaaagctttgggacttgaattagtcagcaaaggtctgcaattcctctccaaaggcaaggtaatcttattaagagaagatctgaagtatccttaggaacaaaatactcaatgtagcctctttgttctctaagtctccattctccagtgcctctctgtgcatttgtttgtctcagaacagtcatgcacggtggatccatttgtcttcccttatcactctgttactgctgccgagcactcgctcagctgtgtgctccagcttcttggctgacaagataattacattctgggcagactgggagaaagacaggtagtgctcaaaagttccgatgccgacaacctagtcattgctggggcagacttcaagatcaagcacctgatctaattagcacactcccatcactacctgcctgcctatggaatgctgacaatcgaaagcctgaaggcaaagcagatatcatgcaacccagagacagacattcatgctacccttgtgccaggaacaattacatgttctttttggaatcttgggtgtcctagtaacacagttgagcctgggggtaaacttttgcataatactggaagccctgcatttactgataatgaacgtgagaaccagcagaataaaaccccacaagaatgaaagacctcacgggaagaaagccttctgaagaaggactcatttcagcaaacccagtccgcccctagctctggaagaagcacatggctccataaaagcgaggttttgccagcaaagagctgtttttctttgaccagataaatagcacaatacattcccctaggattttttttttttttttttttttgcctctgtgcttttgctacttcctacatttctttcaaaatgtagcctttgactttgaaagtcattacagccacaacgctttttctccttttctttttgctctgggtagaaaagtgctctataatctctaaatccttataataagtgttctataatctgtaagttcatatatagacataggcatgtgtatatatacagcattattatcttaaatttctaataagattcccaccctcacttgctgctggcatttgcactagtttctctggcagaggcctggtggagaagagtgaaccgtggctatacagtcaacacctatttctaccatgtattacatctgtgactgggcaaggtacttacctgtccagttaaaactaaggctttaggttaaagaaatcaaaagaaccctagtgcagtgttatggtttgaatcatgtccccctcttcctttaaaaaatatgttaaagatctaatgcccagtaccacagaatgtgaccttatttggaaacagggtcattgtggaaataataagttaacctaataggaggtcatactggagtaggacagacccttaattgaataccactggtgtccttatatgaagagacacagagacaccgccacttgagggagaacatcatgtgacaatggacgcagagactggagagctgcatctacaagccaaggagctccaaggattgctgccagaagctataaagaggtgggcatggagctcagacttccagcctccagaacagaacaatttctgttgttgcaagccacccagtttgtgggacttcggcaacccaaggaaatgaacatacccagtcaggcttactcattaacctcccttggaggtcaagaatgacatcacaagtcgaagatagccattgccaggcacctaacagaagtgatgtggttaagaaatctggctctagaaagagaatataaggaaagaggatatgagtgtatgggttcagccctactacttcctggctggatgacatcaggaaagttaactacactttctgagcctcaggatcatggccataaaacaggaataatgatggtacctaaataatagaacttctgtgaacaatgaaagggaacaactgtgaggtctaacggttagctctagctattcttttcctggtggtggtaggaggcaggttttgggtacctttagctttgtctgaactgagggttccctgagcccactaaccctgagtagataaaaagcaatgtggtccactcccccatgcattcctgccactatcccgaggctataacaaggtctcttcgagagccttgggtttcagaggatgcaggaggtgcttggggatgtcaagaggcttgtgaggacctctcaatcctgttgtaaggcccctgagttggcaactgcagctcctgaggaaggggagaggcatagaaagaggcagatgagattcctgtgagagccaaggagtctgctgggtctacacctcccttggctttgtcctcgggtagaggaatccatgaggagctgatgactccttgtggtcaaatacccaacagaactgagcccctttcagaattacctgcactttctgcaatttaagtggcatcttgattacccggaagcatccccttgatgacaacaatgatgaatccttctctatgcatttgtcttggaatagtcatacattctgttggcccatttctataggagtagaattgctagatcacagagtgtgcttatgttcagctttagtagatactgctaactagttttccaaaatagttgtaccaatttacacttctactacaagtgtatgagagcattgtcagttttgtaattttagccattctagtgaagtgagtgcacagtggcatctcattgtggttttaatgtatatttctctagagattcctgatgttgaacacttcacatacttatttgccacttgcatatccattttgattaagatgtcttcttcttgttgatatgtagaatcgtttagatattctggcaccatgtccttggttacatgcttgtactacagatattttcctcccactgagtgcctccttctcatactcttaaaggcatcttttgagaataaaattcttaatttttaaaaacaaatttttcaagcagttttaggttcacagcaaattgagtagagggtatagagagatttcccatatacctactctctccataaatgtatagccttccccattatcatcatctcccaccacggtagtacatgtgtcataaatgatgaacctacattgatacatcattatcacccaaagtccagagtttacattagggttcactcttggtgttgtacactttatgagttatgtacaattattatgtatccacctttgtagtatcgtacagagtagtttcactgctttaaaacttctctgtgttctgcctattcctccctctcttactggcccccaacctctggcaaccactcatctttttactggctccacagttttgccttttccagaatgccacatggtcaaaatactactgtattagtctgttctcacattgctatagagaactacctgggactgggtaatttataaagaaaagaggtttaattgactcagagttctgcaggctgtacaggaagcatggctgtggaggccttgagaaacttacagtcatggaagaacatgaaggaaaagcaggcgcggagaaggaggaagagagaaggggtttgtgctacatgcttttaaacaaccagatctcatgagacctcactcactatcacgaaaacagcaaggggaaacttcaccccatgatccattcacctccaaccaggccccttctccaacattggggattacaattcaacatgagatttgggcggagacccaaatccaaaccataccaactgccatatgtagccttttcagattggcttctttcacttaataatatgcatttaaactttctccgtcttctcatagcttgataactcatttctttctagctctgaatcatgtttcatttgatgaatgtaccacagcctttttttttttaaactattcacctactaaaggacatcttggttgcttctggcttttgccaattatgaataaagcaggtataaacatctatgtacacgtttttgtgtggacataagtgttcaactctttctttttatactttaagttctagggtacataagcacaaagtgcaggtttgatacataggtatacatgtgccatgttggtgtgctgcacccatcaactcatcatttacattaggtatttctcctaatgctatccctcccccagccccccaccccataacaggccctgctgtgtgatgttccccttcctgggtccaagagttctcattgttcaattcccacctatgagtgataacattcagtgtttggttttctgtccttgtgatagtttgctgagaatgatgggttccagcttcatccatgtccctaaaaaggacatgaactcatccttttttatggctgcatagtattccatggtgtatatgtgccacattttcttaatccagtctatcattgatggacatttggcttgggtccaagtctttgctattgtgaatagtgccacaataaacatacatgtgcatgtgtctttatagcagcatgatttctaatcctttgggtatatacccagtaatgggattgctaggtcaaatggcacttctagttctagatccttggggaatcaccacactgtcttccacaatggtttaactaatttacactcccaccaacggtgtaaaagtgttcatatttctccacatcctctccagcatctgttgtttcctgattttttaatgatcaccattctaattagtgtgagatggtatctcattgtggttttgatttgcatttctctgatggccagtgatgacgagcgatttttcatgtgtctgttggctgcataaatgtcttcttttgagaagtgtctgttcatatcctttgtccacttgttgatgggtttttttttcttgtaaatttgtttgagttctttgtagattctggatattagccctttgtcagatgagtaggttgcaaaaattttctcccattctgtaggttgcctgttcactctgatggtagtttcttttactgtgcagaagctctttagtttaattagatcccatttgtcagttttggcttttgttgccattgcttttggtgttttagtcatgaagtccttgcccatgcctatgtcctgaatggtattgcctaggttttcttctagggtttttatggttttaggtttaatatttaagtctttaatctatcttgaattaatttttgtataaggtgtaaggaagggatccaatttcagctttctacatatggctagccagttttcccatcaccatttattaaatagggaatccttttcccattgcttgtttttgtcaggtttgtcaaagatcagatggttgtagatgtgtggtgttatttctgaggcctctgttcagttccattggtctatatctctgttttggtaccagtaccatgctgctttggttactgtagccttgtagcatagtttgaagtcaggtagcgtgatctctccagctttgttctttttgcttaagattgtcttggcagtgcgggctcttttttgattccatatcaactttaaagtagttttttccaattctgtgaagaaagtcattggtagcttaatagggatggcattgaacttataaattaccttgggcagtatgaccattttcacaatattgattcttcctatctatgagcatggaatgttcttccatttgtttgtgtcctcttttatttcatttgtagtttgccttgaagaggtccttcacatcccttgtaaattgggttcctaggtattttatactctttgtagcaattgtgaatgggaggtcactcatgatttggccctctgtttgtctgttaatggtttataggaatgcttgtgatttttggacattgattttctatcctgagactttgctgaagttgcttatcagcttaaggagattttgggctgagatgatggggttttctagatatacaatcatgtcatctgcaaacagggaaaatttgacttcctcttttcctaactgaataccctttatttctttctcctgcctgattgccctagccagatcttccaacactatgttgaacaggagtggtgagagagggcatccctgtcttgtgccagttttcaaagggaatgcttccagtttttgcccattcagtatgatattggctgtgggtttgtcataaatagctcttattattttgagatacgttccatcaatacctagtttattgagagtttttagcatgaagggtgttgaattttgtcaaaggccttttctgcatctattgagataatcatgtggtttttgtcattgattctgtttatgtgatggattatgtttattgatttgcatatgttgaaccagccttgcatctcagggatgaagccaacttgatcatggtggataagcttttttgatgtgctgctggatttggtttgccagtattttattgaggattttcgcactgatgatcatcagagatattggtctaaaattctctttttttgttgtgtctctgccagcctttgctatcaggatgatgttggcctcataaaatgagttagggaggattccctctttttctattgattggaatagtttcagaaggagtggtaccagctcctccttgtatctctgttagaattcggctgtgaattcgtctgatcctggactttttttggttgatatgctattaattattgcctcaattttggagcctgttattgttctattcagagattcaacttcttcctggtttaggcttgggagggtgtatgtgtccaggaatttatccatttcttttagattttctagtttatttgcattgaggtatttatagtattctttgatggtagtttttatttctgtgggatcagtggtgatatcccgtttatcattttttgttgcatctattttattcttctctcttttcttctttattagtcttgctagtggtctatcaattttgttgatcttttcaaaaagccagctcctagattcatcgactttttgaagggttttttgtgtctcttatctctttcagttctgctctgatcttagttatttcttgtcttcttttagcttttgaatgtatttgctcttgattctctagttcttttaattgtgatgttagggtgttgattttagatctttcctgctttctcttgagggcttttagtgctataaatttccctctacacactgctttgaatgtgtcccagagattctggtatgttgtgtctttgttctcattggtttcaaagaacatctttatttctgccttcattttgttatgtacccagtagtcattcaggagcaagttgttcagtttccatgtagctgtgcagtttttagtgagtttcttaatcctgagttctaattttattgcactgtggtatgagagacagttcattgtgatttctgttcttttacatttgctgaggagtgctttacttccaattatgtggtcaattttaaaagaagtgcaatgtggtgctgagaagaatgtatattctcttgatttggggtggagagttctgtagacatctattaggtctgcttgttgcagagctgagttcaggtcctggatatccttgttaagcttctgccttgtttatctgtctaatgagagacagtgtctctcattattattatatgggtgtctaagtctctttgtaggtttctaaggacttgctttatgaatctgggtgctcctgtgttaggtgcatatatatttaggatagttagctcttcttgttgaattgatccctttaccattatgtaatggccttctttgtctcttttgatctttgttggtttaaagtctgttttatcagaaactaggattgcaacccctgcttttttttgctttccatttgctttgtagatcttcctccatccctttattttgagcctatatgcatctttgcacgtgaaatgtgtctcctgaatacacaccaatgggtcttgactccttatccaatttgccagtctgtgtcttttaattgggacatttagcccctttacatttaaagttaatattgttatttgtgaatttcatcctgtcattatgatgttcgctggttattttgtccgttaattgatgcagtttcttcatagcatcgatgtcctttacaatttggcaagtttttgcagtggctagtaccggttgtttctttccatgtttagttcttccttcaggagctcttgtaaggcaggcctggtggtgacaaaatctctcagcatttgcttgtctgtaaaggattttatttctccttcacttatgaagcttagtttggctggatatgaaattttgggttgaaaattcttttctttaaggatgttgaatattggcccccactctcttctggcttgtagggtttctgccgagagatctgttgttaatctgatgggcttccctttgtgggtaaactgacctttctctctggctgtccttaacactttttcattcatttcaactttggtgaatctgacaattatgtgtcttggggtttcccttctcgaggagtatctttgtagtgttctctgtatttcccgaatttgaatgttggcctaccttgctatgttggggaagttctcctggataatatcctgcagagtgttttccaacttggttccgttctccccatcactttcaggtacaccaatcagacatagatttggtcttttcacatacttccctatttcttggaggctttgttggtttctttttactcttttttctctaaccttgttttctcactttattttattaatttgatcttcaatcactgataccctttcttccacttgattgaacctgctattgaagcttgtgcatgcatcacgaagttcttgtgccatggttttcagctccatcaggtcatttaaggccttctctacactgtttattctggttagccatttgtccaatcttttttcaaggtttttagcttccttgcaaggggttcgaacatcctcatttaacttggagaagtctgctattaccgaccttctgaagcctacttctgtcaacttgtcaaagtgattctctgtccagctttgttccattgctggtgaggagctgcaattctttggaggagaagaggcactctgatttttagaattttcagcttttatgctctggtttctccccatctttgtgatttaatctacctttggtctttgatgttggtgtcctacagatggggttttggtgtagatgtcctttttgttatgttgatgctattcctttctgtttgttagttttccttctaacagtcatgtccctcagctgcaggtgtgttggagtttgctggagttccactccagaccctgtttgtctgggtatcaccagcagaggctgcagaacagcaaatatcgctgtctcatccttcttctggaagctctgtcccagaggggcagccacctatatgaggtgtctgtcggcccctactgggaggtgtctcccagttaggctacatggggatcagggacccacttgaggaggcagtctgtctgttctcagagctcaaacgcagtgctgagagaaccactgctctcttcagagctgtcagacagggacgtttaagtctgcagaagttgtctgctgccttttgttcagctatgccctgcctacagtggtggagtctagaggcagcaggccctgttgagctgtggtgggctccacccaatttgagcttcctggctgctttgtttacctactaaagcctcagcaatggcagatgccccttccccagccaggctgctgtctcgcagatcgatctcagactgctgcattagcagtgagcaaggctccgtgggtgtgggagccacttagccaggtacgggagagaatcactttgtctgccagttgctaagaccttgggaaaagcacagtatttgtgtgtgaatgtcccgtttttccaggtagtctgtcacggcttcccttggctaggaaagggaaatccccctgaccctttgcacttcccgggtgaggcaatgccccgccctgcttctgctcaccctctgtcagctgcaccctttgtccagccagtcccaatgagatgaagcaggtacctcagttgaaaatgcagaaatcacccatcttctgcgtcgatcatgctgggagctgcagatcggagctgttcctattcagccatcttggaagtgttcaactctttttggtaaattccaaagagtttgatcactggatcatatagtaagtgtttgttttgttttgcaagaaactaccacactgtcttttgtagtggctgcatcattttgcattcccaccagcaatgaatgagaattcctattgctccacatcctagtcagcatttggtgttgttagtgttctggatttgggccattctaatacatgcataaaggtatttcattgttgtttaatttgcctttacctgctgacatttaatgtggagcatcttttcatatgcctatttgccatctctgtatcttctttggtaatatgtctgttagggtctttggatcattttttaattgaaatgtttgttttcttgttaagagttctttgtatattttggtaatagtcttgtagtagatgtgtattttgcaaatattttcttccagtccatgacttgttttcttgttcttttgacatcatctttcacggagtagaagattttaattttaagtccagcttaccaattttttctttcatggattgtgcctttggtgttatatctaaaaagtcatcaacatactcaagataatctagatttttctaccattatctttttggagttttatggttttgcattttacatttaggtctgtgatcattttgagctaatgtttgtgaagggtgtaataatgtgtctagatttttttttcatgtgaatgtccagttgttcaagcaccgtttgttgaaaagactacccttgctccattgtgttgcctttgctcctttgtcaaggatcagttgactatatttatgtaggtctatttctgggctctctattctgttacatttgtctgactattcttttgtcaataccacactctttggattgcttcagctttatagtaagtcttgaagtcagatagtgtcaatcctccaactttgttcatcttcagtgttgagttggctattctggatcatttgcctttccatagaaactttagaatcagtttgttcatatccacaaaataatttgatggcattttgattggcattgcattaaatctataaatgaaattattaattttaagtcttatttattaatcttttcctttatgggtagtgctttttctatcctacttaagatattcttgttaaccataaggctgtgaagataactcccctgacttctacagtgataaaagtcaaaatagttgttgtgcttttgtggggaggagtaatgactgggaggcaatacaagggaagatactagggagctggttatattctctttcttttctttcttctttctttctttcatttctttctttctttcttactttgtttctccttccttccttctttcctttcctttccttttctttcttttttttttttttttctgaggcaaggtctcactctgtcacccaggctggaatgcagtggctgcagccccaacctcccagactcaagcaatcctcccacctcagccttccagtggctgggactgcaggtgcacaccaacatgccaggctaatttctgtattttttgtaaggatggggtctcactatgttacctggctggtctcgaacccctggacttgagtgatatacccacctcagcctcccaaagtgttgggattacaggcatgagccactgagcctaccttatattctatttcttgatttttctgggtgatggtatttgcttgtttactctttaaatatttcttgaacggtatatttattactggcacactctgtatgttacgctgccattaaagttgataagaaagaaagaaagagagagaaacagggagagagagagagagaatgctagccgctggctaaagagatacaaagtaatgacaaaaaatacttagaaagatttgaagagaaatttgtgagcagattatatgacatcatatattctcagtctatgtaagccaatcttttagtatttactaaagatttcagtagaatacatatagtaagtctatttccagattagaaacattgatgttggttaataatataatattgaaaacaaacagtgctgtgagcataaaataaagtaacattagtgacacattagtgaggcttcataaagagagttaagcaagcagagagtctaaagagaagcagccggctgctctgagcatttggttttacaaattctttattaaaatgtgatagatttgatcattaaacatggtatatgtgtatcaaaatatcacactgtaccccataaatatgtgcagtttattatgcatccattaaaataataataaaagcaagaaaaaattgccgctagctgatatgtgaccactcgacttgtgacttctcaccctcaaatgaggggcatgcctcaaatgaggggcatgcctcacatggtctatatcaaatgagggctactgagctctgaggtaggaggggtctctgagactatagtagaaatgtcacaagagtgggctataagggcccagtagagttactgtccaaagcagaaaccaaatcaaggtacccagcaaggatacagttaatacgaaacactgacccagcagacagccaggttctgaagagctaagcacacaggagatacagtcggagcaggaatgggggtaacatcaggagctgccccttctgcaggtcagaaagccaggatatcaccaaagccagagaggctctgcaaggtcctcaacaggagtctttttgaagagaaggccaaccaacagcctgtccacagttaaccaggcagcagttgtgtgaccgcatgttcctctgccctgagccaagcaggagtgcacacctgacagctggttctggcagccagacactgagaggcaccaaactgggggtccctctctgagaggagcccaggatgtgcaggtgggaatgcaggtgtttcctctgtatcacatctgcctgctaaatagctctctgtcggtttcttatgctttctcttccacaaagaggagaattccagggaacaaatgcagactgttggatatatacataatctttttggagatggggccgagtgaagagataaataggacttgaagaaggaagttaagaaaactaaggtaaccagaaagaatgagtgagaaaagcaacctcaggaactcctgggtggtatggtagggaggacagggaaaatccataattcggttaatctgcagatagataatagagaattcaagcccaagcataagagcttgcatttctaatcagctcatgcaacatcatgtttgcagtgttcaccatttctaatatccaagcaccatcttttagagtcacaaatgctataattcatcacatccaggcatgcaaaatcatcctttttctaacattaaacatgtttaattacaacgatttataatagtgcgttaagactttaatgaaaggaaggcatttgacacatgatatttacagtaatcataatactacaatatttaaagtataaattttgacagtgttagagcaggaagccaaattgtccatatttttagttaattatttgaaatgtttttgggggaactcagcatccagaaattaattaatagttttcctctgtgcaattgtcagtgttaaccactggttactgctactggctgccaacgcttttatatcgtcactctagtggaagtcagcgattaatggtaaccacttgtcctaatagccaaatgccaaatgtcataccacatgcaggattatagttatgttttaggaagtggatgggtttggctttgttagccaagaattaaccacaaatttggaggccacttgaactagtgcttgcagaatatatctgtgacacctcagtcctggggttctcaggatgtttttcaaggatagcagtttcataaaaagctaagagccttgaaatccttttcctaagagaccaaaacttttctttgtcaagcgcgaaaggttccctctgccgtctcttctgggatcagtcaaatttacacacgttccagcttcacttaagtggaattcaagttcctgtgtaggtattcgctgttaaccacatgtcacatgcttcacagccctttgtgacatatgtttatttgaaaaggtaagtccgtaaaccagtgccttccttgtattttacaagtttcccctgactcagggaaacaaaagggggtcctccatcatcaggcagcaatgtgggacacaaagtaaggtaaggactgttacctggattactgcccacagccccctcaataataaaacagtgtcaaggcagagcagcatctcacactgttaagagttcagattttaccaggctcagtggctcacacctgtaatcccaacactttggaaggctgaggtgagagtgttgcttcagcctaggagtttgagctacagtgtgctatgatcaggccactgcactccagcctgggcaacagagtgagaccttgtctctaaaaataaaaattaacaacaacaacaaaaataattagatttctactgacttcaaacttcaacacaatcgtgaccactgaaataagaggaacattagaaaccctcaaatcaaaaccaaaacccatttttccacacaggtgtagaaagcttggactcacccagggacccacttctagcaagtgcccggggcaccctgcatgcattctgtgttctaacattgccctagcttcatttgttcctctccttggttctctttgtcctaatttattttcttagtatcactattataattaatgataattatccattctaatatagttttgtgcattttctaaaacatttaaatcttctttaaataagatagaatatcattatgtttgaactatatgagatgccttaaatcctttactcaaagcttacttactcttttctacatacaattttaataaattcagccatctaatttcgtagcacacagcaactcagaagaccacagctgaaagaaagagtggttgttgacatagtacagtatagaaaacctacttagtagatgtcaaatgcaatagtaaatagataaatgagtaaattagtaggtgagtaataccttagagctcaccaaggagaaggtagaaatcatttaaaaacacatataagaagcaacaatgtaacagtcagagcacacttggtatgggtgtgacctctccggagatttcaaaagcctttgatgattacagaaccatagtttatttaatttattattatgatttttttttagacagggtctcactttgtcacccaggctggagtgcagtggcaacctatcagctcactgcagcctcaacctcctgggcttaagcgatcctcctgcctcagcctccaagtagctgggactacaggcgtgccaccacaccaagctactttttgtatttttagtagagacggggtttcaccatgttggccaggctggtctcgaactcctgagcccaaatgatctgcctgccttgacctctcaaagtgctgggattacagatgtgagccagcattcctggcaaaactgtagttaatattgataagtataactctattccttcaagcaaaggccaaagtattttggggaatctttgtttaagaagacaggtatgtctatcacacaccttgtaaaacttttcatttgaaaacaacaaaatttaaaacataaaactccagggtggggaaatgtccagctgtctggaaaattcccttctttgccgtgcctcattccctggccatgcccgatgcctggagtgatgatgaactcatattgctagttctcaggtgggaatgatgcctcaggaaaaaacactgtgggtaaagaatgctttctgcactagcttctgactcactccacggtgatgtggtgggagcaattccaaccaaccccagcacggtgctagcatcctgaaagggagctcattaccaggaggaagggagagctcagtgcaagcatccaataattcactctctttctccaccaagcggttactccttaaggcctctaaactgaatgacttacagagcgacctgattcccctcattgcccatgtgcaccaaaccttggtttctgcaacgttacaaaaagagaagttcctgggtgtgtgctgagaacattttggacaaaggatgcttcacgaatggaagatgttatataaatgctactattatttgagacttgactcttctggagacaaaaatcacagccttagaccatggcaaccacagaccctagatttccccagtgctgactctgtccagtccattttccacttgagcacaggaagcagcacaaagtaaaggctacagtttcaggagaaaagcaggtttgttatcacgaacctgttttccctggccagttaaatagaggcaatcatagccagcaggctcaaacccacacttttctcaattaccatgaggaaacaaagattgacttactctttttctgtttacagaattacgcaaaacttattcctggagctacagtaggtctacttcagaaggactccggaaacattctccagctgatcatctcagcttatgaagtaggatattttacagctggcttcttttttgcatttctttggtattcaaaaactaagatgtgatttaggcagttaaatgttagttacttgttggtagagagagtgcttatccaaaaaaagtctctgcatgaatgcagccaaaatataaattttgttcattttgcttgctgatcttcttcctggaaggtggagctgaagatagaaaaatcataaaactgatcataaagtcgaggttgtttttataataataagcaacagtaacattgttgccgcaaaattttaaaggctccacgagtcatacaattaagctctcctccatctgaaaaaaaatgaagtttaaattgccagtgagtgacagagttatgtagagagctaactctacaggcttgacgatactaggtcataactcaagcaaaaatacaagtgttggctatccaccaaaacaccagtacacaaggaatgccactttttaatttctatactttggagaactagggacattttccactggtttatgagtaggtgtgtaaatttttgcttttgactttgggaattagtacctgaggacagaattcctcccttaaaattagaatatatacctacggtgttgttatgttctcattctttgtctccatttcataactccattagtcaacaatggatggcccattgtcaattatttttaattttggttcctaaatatcaccccccctttttttttgcctttacttacaaagaaatacacacacagagagagaaagaagaagccctaaattaggataggaatgaaaaaaagtaaattttttagtaaggagtaaagctctactatttactgtaaacagcaactatgtaagaacaagtgaataacaattctcctgatttttgatgttttaaaattacaaaaaaaaaggcccatctgtaatatacgccaacatttagcatgtactgaaccagcattccttaactaaaacgacgtatcagaatcaacacggaaagtttttaaaaataggcctatcctctcacagacgtctttgaaggacttcaggggaaatgagagctacatattttggaaagaaaaaaaattccccaataattttgacgttgccccaccaattttgaaactcccctgaaggaagaaaagcaagatattccctctcaagtacttcatttcttcagaaaataaaatacagatgtgtccattaaaattataagatgatggttttgttttgttttgtttgttttactgatagcctcagaaatttcagttttcttagatcacatcaaattcatcaccacattagctcatgcttgaaattcttccagtcaggaatgctcatcaacaaaacgctataaaaaccttcctccctctcatgcagtaattaaagttttaatgtgtagaatcaaataaaatcacacagcaatccttcactgtatcagaatgcacgccattttttcgaatccaatactctcaacagtgttggccactaacatcatcggagaaactaagcagattagaaaacactaaattgtcaaaaatatttccccctccagtaagagcagccgccatgcctctgcttgctctgccagaggttatggctcactttaagatcccaaatacttcacgcaacttacagggtagttgaaatcaaggcattaaacatttgaattaaatcttctgtccttgttttactatctcagaaatactaagaagtgtctattattcttaaatgaaacaatcttgcactggagttattattggagctttatgattcacagggcaaagtctgtaatagatcctggcactagttcaaattatttttctactgttatttttaaatgtatgctaaaaagaatttaaaatatgggaacacatagactgaatttctttctagtctataaaaagagagagaaggaaagagaatatattgagagaaaacataaaatgcttctgactgacctctagtagggcagaggtagacaatttgtgtttataactttgtggctacaaacttcagctcagtattttacagtgccgtattgatattttaaaaaaaccttaaataccgatgtgtacttatctgatcatcattcactaattttctttcttccccgatcgtataataaaagctaccgaaatatcagcaatcccaaggataagttcctctgtttgtgtttaaattccaggagggaattgacttggtttcttttgtttttcctggttcataagagatgctcaaaaaatgaatgaatgaaactatgaaaaatacaaataagtgtttatgtcctttccttgggaaattcacactaaaatattcctggtcaaatttgcaatatgctgttaaattatagcaatgctgaaatttcctttatttaggtcagatcatgtcatccactagtcctcataattgctgtcacagtcttctagctcatatcccttaatttttatttagctcctgactctatctccaacattgcttctattttaatcttattatttcagtataaacagattttggaggaaggcagggtcattttactatacatttggcaaacttacacataaagtatcaaagcatctcatttctccataaatatatacacctactatatacccacacaaattaaaaataaaacaaatttttaaaaaattacacttaagggaaatttgaagccgaatatgctttttaaatgccaacaagaaaatggatatgtggacttaaaacttttggattaactgaagtgtaaattaattcataatatttttaaattggttttattctgtttttctatttttcataatttggtttggttcacctacaatacagactttcattttataagtgaacaaggaatagagaaagcaaaatgataaacttcttgaggaaagaaagcattcttatagtattccccagacctaactctacactaaatacattccaatattgattttaaggcacactttccccctacattttaacatctctaaaattgagctccatcttactgttggtggtgagttactatcaccattgtggtgccaggcagcagtcatgatgtagttttcatggactattgtgattgtactcacttcaattcattagaggcattgttgctacataaatattaagtttaattgctgttttaaaatatattttaaaatgtgtactgtgatttgatattgagatgaaaagtttattatgtatgcagaaatgtaccaaaacagagcagcagggtgtaaatttgttatcaatgaagcaaatattcattggtggaggaatgacttcaattgtggattctttgcaaagcaacaaacagctgatttatgggagctaagaaatcatgatacacataaaggaagctgttgtttaattttgttactgagatataagcaaaagaattgccttttatatgccaatctatgcaactcagggcaggagaatttgccaaatccttcagaatggataaaatgattttcaaagcaatgatagatggataggactgattcatatggtgtgcagaaccatcttgaggtattttgtcatagtttaattgtcgtaagataatggtgtatcttataatgttggcaccttagatttgataatatataaaatgtatatatgattgctcactttcttgcttttgattgatgatatactgaatttctttagacacccaatttagttttatttatttgtagttcaatgaacatgattcacggtttcttcttctggctatatttttggggttgtgacttcactgaactctttatgttgtaactaaaggaactgcggtctgaggtggaactggaagtattaggagacactgaaggactcaacttgtcatttacagccatctgtaacaacggtaccctcttccaacaccaaaagaaatgctctcacatgaaagtgggagacacagtaagtagctggccagtagatagtctgaataaatacctggatgggtcagaaattagctgagctcactgaagctggatttctttcaagaattttaaaagcaattttcaaagattttctagtaaatgcttttggcaaagctgatttccgtgaagccttgtttcacctcgtgcattttggtggatggagggagataattagtattttcttttccaggcttccttcagcgtgactgtgaatatcccacactgcgagagaagaagcaggcacattatcataaagcctgtggggctgggggatgccctggaattacttgtcagcccagaatgcaactgcgactgtcagaaagaagtggaagtgaacagctccaaatgtcaccacgggaacggctctttccagtgtggggtgtgtgcctgccaccctggccacatggggcctcgctgtgagtgtggcgaggacatgctgagcacagattcctgcaaggaggccccagatcatccctcctgcagcggaaggggtgactgctactgtgggcagtgtatctgccacttgtctccctatggaaacatttatgggccttattgccagtgtgacaatttctcctgcgtgagacacaaagggctgctctgcggaggtaggctatgttgaaatccatcttaccctgtggctgctcaagtatcagcaaggggcttggcatcctctgcaccttccagtttcctgggcacagtaggtgctcaataaatatttgctgatcagccttagacctagggtaactgaatcttctcttgtaggttttctggctctaacattcacttggggtgagatttctgccaactgaacttatgtctattattgtttccctaagcgtagatgaaagatacaagtgccttctctctggttgacacccagactctacaaaagtgcctgttatatgaactccattaccttccaggtttttctggaccaagcagctgtgtctgactgaccttttctttttttttttctttttttttttatttatactttaagttttagggtacatgtgcacaatgtgcaggtttgttacgtatatatacatgtgccatgttggtgtgctgcacccattaactcatcatttaacattaggtatatctcctaatgctatccctcccccttccccccaccccacaacaggccccagtgtgtgatgttccccttcctgtgtccatgtgttctcattgttcaattccaacctatgagtgagaacatgtggtgtttggttttttgtccttgtgatagtttgctgagaatgatggtttccagcttcatccatgtccctacaaatgacatgaactcatcattttttaaggctgcatagtattccatggcgtatatgtgccacattttcttaatccaatctatcattgttggacatttgggttggttccaagtctttgctattgtgaatagtgccgcaataaacatacgtgtgcatgtgtctttatagcagcatggtttctaatcctttgggtatatacccagtaatgggatggctgggtcaaatggtatttctagttctagatccctgaggaattgccacactgacttccacaatggttgaactagtttacagtcccaccaacagtgtaaaagtgttcctatttctccacatcctctccagcacctgttgtttcctgactttttaatgatcgccattctaactggtgtaagatggtatctcattgtggttttgatttgcatttctctgatggccagtgatgatgagcattttttcatgtgtcttttggctgcataaatgtcttcttttgagaagtgtctgttcatatcctttgtccacttgttgatggggttgtttttttcttgtaaatttgtttgagttctttgtagattctggatgttagccctttgtcagatgagtagattgcaaaaattttctcccattctgtaggttgcctgttcactctgatggtagtttcttttactgtgcagaagctctttagtttaattagatcccatttgtcagttttggcttttgttgccattgcttttggtgttttagacatgaagtccttgctcatgcctatgtcccgaatggcattgcctaggttttcttctagagtttttattgttttaggtctaatatttaaatctttaatccatcttgaattaattttagtataaggtgtaaggaagggatccagtttcagctttctacatatggctagccagttttcccatcaccatttattaaatagggaatcctttccccattgcttgtttttctcaggtttgtcaaagatcagatagttgtagatatgtggcattatttctgagggctctgttctgttccattggtctatatctctgttttggtaccagtaccatgctgttttggttactgtagccttgtagtatagtttgaagtcaggtagcatgatgcctccagctttgttcttttggcttaggattgacttggcaatgtgggctcttttttggttccatatgaactataaagtagttttttccagttctgtgaagaaagtcattggtagcttgatggggatggcattgaatctataaattaccttgggcagtatggccattttcatgatattgattcttcctacccatgagcatggaatgttcttccatttgtttgtatcctcttttatttcattgagcagtggtttgtagttctccttgaagaggtccttcacatcccttgtaagttggattcctaggcattttattctctttgaagcaattgtgaatgggagttcactcgcgatttggctctgtttgtctgttattagtgtataagaatgcttgtgatttttgtacattgattttgtatcctgagactttgctgaagttgcttatcagcttaaggagattttgggctgagacagtggggttttctagatatacaatcatgtcatctgcaaacagggacaatttgacttcctcttttcctaattgaataccctttatttctttctcctgcctgattgccctgaccagaacttccaacactatgttgaacaggagtggtgagagagggcatccctgtcttgtgccagttttcaaagggaatgcttccagtttttgcccattcagtatgatattggctgtgggtttgtcataaatagctcttattattttgagatacgtcccatcaatacctaatttattgagagtttttagcaggaagtgctgttgaattttgtcaaaggccttttctgcatctattgagataatgatgtggttttgccattggttctgtttatatgctagattacgtttattgatttgtgtatgttgaatcagccttgcatcccagggatgaagcccacttgatcatggtgggtaagctttttgatgtgcagctggattcggtttgccagtattttattgaggatttttgcaccgatgttcatcagggatattcgtctaaaattctcttttttagttgtgtctctgccaggctttggtatcaggatgatgctggcctcataaaatgagttagggaggattccccctttttctattgattggaatagtttcagaaggaatggtaccagctcctccttgtacctctggtagaatttggctgtgaatccatctggtcctggactgtttttggttggtaagctattaattattgcctcaatttcagagcctgttattggtctattcagagattcaacttcttcctggtttagtcttgggagagtgtatgtgtcgaggaatttatccatttcttccagattttctagtttatttgcatagaggtgtttatagtattctctgatggtagtttttatttctgtgggatcagtggtgatatcccgtttatcattttttgttgcatctatttgattcttctctcttttcttctttattagtcttgctagtggtctatcaattttgttgatcttttcaaaaaaccagctcctggattcattgattttttgaagggttttatgtgtctctgtttccttcagttctgctctgatcttagttatttcttgccttctgctagttttgagtgtgtttgctcatgcttctctagttcttttaattgtgatgttagggtgtcagttttagatctttcctgctttctcttgtggtcatttagtgtgataaatttccctctacacactgctttgaatgtgtcccagagattctggtatgttgtgtctttgttctcgttggtttcaaagaacacctttatgtctgccttcattttgttatgtacgcagtagtcattcagttgcaggttgttcaggttccatgtagttgagcagtttcgagtgagtttcgtaatcctgagttctagtttgattgcactgtggtctgagagacagtttgttataatttctgttcttttacatttgctgaggagtgctttacttcccactatgtggtcaattttggaataggtgtggtgtggtgctgaaaagaatgtatattctgttgatttggggtggagagttctgtagatgtctattaggtctgcttggtgcagagctgagttcaattcctggatatccttgctaactttctgtctcatctgtctaatgttgacagtggggtgttaaagtctcccattattattgtgtgggagtctaagtctctttgtaggtctctaaggactttctttatgaatctaggtgctcctgtactgggtgcgtataaatttaggatagttagctcttcttgttgaattgatccctttaccattatgtaatggccttttctcttttgatctttgtttgtttaaagtctgttttatcagagactaggattgcaacccctgcctttttttgttttccgtttgctttgtagatcttcctccatccctttattttgagcctatgtgtgtctttgcagtgagatgggtttcctgaatacagcacactgatgggtcttgactctttatccaatttgccactgactgaccttttaaatgtatatgactttggaaaagtaaaaactaggtagactgctaaataagcatgctaccaaggataaggagcacaaaaatatattaaatgggctttcagggccttcactcattccacaaatatttattaaacacctactatatgacacatactaggttaggcactgagcataagaaagatgagtaactgcatgtgtgaaaaagcctacaggaaagacaaagatggaaaattactcggaatatcttgagaaatttgagaaaaatttaaagtagaaatatgtatgttttaatatcctacatagatgtaaaatcgctatagtttaacgatatattgtatatgactattgtaaaatcattcttttatatatatatgcacacatatataagtgtaatctattcagaaaagaattataaatatgttcatatactcttaaacagtataaatttgtcttatagattgaaatattaactgaatgctgaatttaagcttcaatatctctgttcttcacactatgtaagcagacagctattcaaatcagaaagccattatctttatagaaaactaagcaagttatgtttttaaaagacagcgttaggaacatataaaaaagactaattttgggggaaataaaagacctgaaagaaagaagcatcaaagaaatccaagctttctgaaaaccatttgatacccttagaagtgtacctacctttcatttctttgctgctgctgttgcagccaataagttcttctgagaatatatgccttttttccctccagagagtgaaaaatttatggtctgttctgatcgagacacatttctctcccttttcatttaaaggtttatttcctggtttaataggtgtgtttccaaacccacatcagtcctcttttcacatgatgcagatggggcacaatctgaaggtgacaagaagccagccaaaggccgtcaccacatcacagagaggatatattgggcagaatcccatattgcatgtctaataggaatcttgtaataaaatacatgttcaaaacacttgaaattacctttcaaaaagccctaagtgtaatctaacaaaatataatagagatactaacacgacctatatttcaccctttaaatcttggatcaaagagatctaaggcagtataaaatgctgaactctgtttagcaacagagctttgcttgatggtctttcgctttattttttaccatgcatgaggaacagaaataaactaaaaaagacttgatctgtggattgtagctaggaagttctgacaacagtgcgtctcttttgaatcaggtacagtgattgctacagaaattctatttagaaaatacgatttatttagctagactcagaaaacttcaccaatgccgatttccttcaaccattactgtttctcaaaagctattttggtttttagtaacatcacaaaggatgttgctctataattagtaacttttctttcaaatggtataatgaaagtaaatgcatttataacaaatggttaacaaatggtcatggagtacctactatgtgcctggcattgtgcttagtgcagggacaaaaattgtgcctggcattggaatagacactctgctgctgctgttgttttatttgcaacagaggatcaaacatgctacagctcacaacttgtgtggatctccagtttgtaactaatatactaagcaatgtgccacttttctgaagagctattatcgcaatgttctttttcatacagcttctttcatccatctgtaagcactcaaagatacagagctccattgattttttccttgcccaaattccattagtctcctgtattttgattctaagagatggaaactatcaggcaaatgatattagagaaacacttcctgccattatgcacttaacagttattgtcaatggcattccagaaagatctatccctctgaaatagcatggtaattttttcttgatctttggttatcatcttgtccctccatgaaaccaatatgacagttttgttgttgttgttgttgttattgtatgaaccagtactctagataactggttgtttgaggatatcaattagcaactttggaaaccaggtcagtggctctggaaggccaggagagaggagggcttctaaattctgagaggagctccgtgtttttgccatgatggtccttttctactgctccaggaaggattttctaaatttctgccaagtacttcctacatgcaataatatacttgagcattctcaaagcatttggaaatgcatctttcatttaataatatttgtaaatcatattaattttccagaatcaactgtaatatggaatttctttctatcataagtttccccttttgttgaggaagaaacaaaaagatattgtagtttagaagatcatttacatgtaaaaatgaaattaatggctttggcccaaatcatttaattattctttgctttgaattaattatgtcaattataaattgtataggttatgaaacacagttgaaatatatcttaatatcatgaatccaggtaaatttcaactcatctttcattagacaaataatgcacacaaacacacactttaagatggtgtgaaactcatataaatttagtgtgttgctcgacttacagtaatgttatgtctggataaatccattattttacattttacaatgagtttatcccgacataatcctatcataagtccagaagcatctatacatacgtgtgtgtatgtgtatatatagagtatatagagaatatatatagagagagaatatatatgtatatacatataatcatccaccacataatgacgattttgtcaacaacacagtacatatacaacagttgtcccataattttataatactgtatttttactgtaccttttctatgtctagatacacaaatgctcaccgtggtgttacaattgcctccagtacccagcacagtaacatattgtataggtttgtagcctaggagcaataggctataccatataacctaggtgtgcagcaggtttaccatctaagtttgtgtacatatactctatggtgtttacacaatgatgaaatcacctaatgatgcatttcttggtacatattcccattgttaaaagacacatgactgtgtgtgtgtgtatacacacatatacatatatatatacacacacacatatatatatacatatatgcacacacatacctacagaaatcagaatccaatttcaaaatctttgtgtctatcatctttgtttggtgatttttgaccaaagaattaagcccaggactctcctactccaatttccttagagcccagtcatcaagatagaaaagtaagccacttactagaccaaagtttacaagagaaagtccagaattcttccttctacagtgaacttggcagtgtctcctgcaagtagaatcctgtttcacttgtgatttttttctacatctactttgttttcagtaaaagtataggaattttaatattgatagataattttgtttacaaattcttcctactggatagttttcagaaataatggcagtaactaacacttgtatagtgcttatttatgggccaggtaccgttctaaacactgttatatactgtcttaggtaatcctaaattttgctggaagagcaaaacttgggaggcaaaatgcctaatgcacatttcttttttttttttttttttgaagaaaagtatcagttacgagagtttgcaaataaatgttatttgtttgaaacatccaacacctatgttagtgtcttgcgcatggcaggcacccagaataatattatggaaatgacacagaagcccattattttaaacacttttaaaatcatttttgaagtatttcatacgtcattaagtggccatatcaaaggggctctttaggattagatgggctacttgtctacagcaaaagtgtccaggtgcctccctctttaacagtgtctgcctcaggcctctgcaatatcacttctgttcccttcctacctctcagtctcttctataaggatccttttttctgatcacattttaagtcctgaagctctccagagtttttctcactctacctgcttgccctagatgacctgatccatgacagcttcaagtaccacctttccctaatggatcccaaaccccaaacttcaggcccatatatatattcagcctcctactaggatgtcccacaggccccttgagctcctcagggccaaaagtgaactcatcatcttccccacccaaagctgcttctcctcctctgtttcaataatcaggtcctactctgtgccaggcattggtgacacggcagtgaccatgagctagcttccattccagttcagtgaaaagccacatcatccatctggctgctcagtctagtcacctgggggagaattccatccctctgtctcttccctcaaccctccgcctggcaccaatcgcacccacaccctgagcattccattcccgaatatatattctttccttgctgctcccatgggcaccgccttggttcatggtctcatatcttcttgcctctactcctgatttttctgtctgtagcttgaccctgtctactgatgctaaaaaatgtctagacaaaactttcaggatagaagctcttccttcagccaataaggcttttcatggtctgatttctgactttttgttatcctttccatttccccacctgccacactccatatgcaactttggctgtatccataggaaagttctatgggtattaagcaggtcacatgattccacatgtattcctgaaatgcatagaacctttttttttttttgtattgtctacccgtatctttcaaatttagctcaagcattacttcctttggaaaccctcaaatctccagtttaatttggaaactattcccctatgtatatttattagtagtagtattcattagcctgcctcctatactaaattataagttcaatgaccttgtcttatttaattttatatcctcatacctaatacaatctttggcacatagtatatgctcaattaaagtgtgttaagtagtgaattttttgagcactcagtgtatgcttatgggacatctaactggtgaatgtaaaattaggagatatatacattatgtcatccagtcacaagcattggaagtagactttattccctctgttttatagatgaggctctcatgatcacacagcttgagtgatatagaggggtgggctttaatccaggtctgtcttgcatcattatcatatggcatcttaactaaaagcaaaatataaaaataactaaataaatatgcacagagacacacattcacatcaaatatcttttacgtgctttctggattatctcatttggtctgattacaaattctatttcatataatatgtggatgaaaagagccaaactctgtaaaatattcgaagagatttattctgagccaaatatgagtgaccatggcccgtgacacagccccaggagatcctgagaacctgtgcctaaggcagtcaggccacagcttggttttatgcattttagggagacataagacatcaatcaatacatgtaagatgcacattggttctgttcagaaaggtgtgacaactcaaaggggatgggcaggactttcaggtcatagtggttggtgattggttgaaagagtctatctaaagacctggaatcaatagaagggagtacctgtgttaagataaggggttgtggagaacagggttcttattatgcagatgaagcgtccaggtagcaggcttcagagagaacagattgcaaatgtttcctagaagacttaaaaaaggttccagattcttagttaatgctctcttggatcaggaagaagatctggaaagaaaaggggattctctgcagaatgtagatattccccacaagagacagcttggtcaagccatttcaaaatatatcaaagaaatatattttggggtaaaatactttactttcaggacctgctatctatcatgttggtatcttattgctacaaagagtctgctttgtcagtcttaaggtttctgtcttcttgttaatgttggtcagctgtgcctgaattccaaagggagaagggtatataataaggcatgtcggaccacccactctcatcacggcctggactagtgtttcaggtttagtttagaatgcccttggctgagaggaggggtccattcagttggctgagaggcttatatttttatttatggtttacaaacataaagtaagcaagtggatcttcagttaggagaccagatctaagtatgcacaattagcaagacacatttgatacaatatatctacactcatactgcacccctcacacacatactttttttctcatttttttcttgtcttttgatgacggtgcttaaagacaaagagaaaagatgcccctcaccccctcaaatctgcaagtgttttggggctgtgagaagcatagagcattttgtgttacaggtaacggcgactgtgactgtggtgaatgtgtgtgcaggagcggctggactggcgagtactgcaactgcaccaccagcacggactcctgcgtctctgaagatggagtgctctgcagcgggcgcggggactgtgtttgtggcaagtgtgtttgcacaaaccctggagcctcaggaccaacctgtgaacgatgtcctacctgtggtgacccctgtaactctaaacggtaatgtctctgcttttctccattccttatgtggataggtttatagtgatcaaacttacagtggcattttgtaaactcagacctcagattgtatttgctggtttggtctccaaacatccatcaaaacacacacaaacccacagggcctctgtgatcttcagcctggaacatcaatctctcgcttacctctttctcagtcctgattatccagaatcacaatgtcacgtttctgctagagactagtgtggggaagtagagctgatgtcccacactgataacatcagatcgcctctccattacaataccagccacacagaaggaatgccctggaggtagacggatgacacccacatgcagtcagtagcttttcaggggaaacagacaagcttctttcttatctagaagtttatagcctgaccttactgattcattcctatctataggctcacagaggcaaaaaggcagaaagacgatcttagctttcaattctctcctgcttctttaccacccatgctctttggcgcctttctttggttgccattatacacagctattgtgtattgtgttttatatcatatgcacaataacaacaatgaaacctcacaatttcttaatgaaattggggccacatttgtaggtcaagtgaagcgagcctccaaagtggctcttatgatattgcagtggataatgtattatgcagcaaatatgcttcagcatttcagattttcatgaactctgatgcccaaaatggtgacatttgcatttctgacataaacagagtgagaaaagcaatttttcactcagtggttactcaccattcaggtgtcaaaacttctctgccactgtcactggcaaactaagacaagacgcatgccaggagaagcatgaggacatgattaggatgatttgaataggatctaatggaaaatgtcccttcaaggtgtttcttctattacttttctgttttatcttctctataaatatgattcaatcttaaatctgaatttcaagataggaaattaacaatcaaagccatttgaatttggggaatcaggtagtgacctccttgggatttatgttagttttgagatgagtccatttttccatttattcatgcatgtattcatttatcaatgaggtattaagtgcctactatatgccaagaatcatgttatgccatgggcaaagcaatgatgactgaaacagctacagcctctgccttcacaggtgctggagtctagtgggaaagatagacatcttttaaagtcattgcaatgctgtctaggctgacagttttaataggggaaatagagagtgctatggaactctacagcaggggataaggctaccagactagctagggcagccatcattgagatgcacaaagacaaagagatattaagagcttccacaatcaccagaccccttcaaaaccactccaaataaatatacaatctagaaaaatgcaatgtatttgcaatgccaaggcaacttcacagtaaaaccttccccactgcctgataggttgcccttcctgtggaaaaatcctgaggcttccactgcaaaggaactgattggtctaaggtttagtgaaggtttgcctaaggaagtgcagtctcagctgagatttgctgagttatgggtgcgggtggggtgtttcaagcacttagcagagcatacatttccatggccagaggagacagagacagcatgtgtgtccacagtaagaaaacttttgcagtttttgaattacaacaagcacaatctatttgtaaagtgattttcagcacaagattaattcagggtctaaattttactttgctctatagatgtctttagagtaccttaattcttggatgatgttcttggaaatgtacttttctataaatagtgatcttttatttaaaagcctgtattaatgaggatccatgctctaatccacagcttttgagatccaggctctaatccacaccttcattaagacttagacttattcaaaagagttacagaaaagtgaattgtgaaaataatcatataagacatatacaaagtccactaatcattcttggaattctggttaaggtatagaccatttctgtcaagaaattcaaaacttctcccagtctctaatcatattttaggaacatacgctctctgtaggaaaaagtaaatgaaaacagctaaatcaatttattttctttgattatttgtttgtttacttaaccaatcaggagcaatcattacaggtaaatgaaaatagtagctattatcaagactggcccagggaacattgattactgagtggaactcagaataattcagtgttcacttggacattaccctactatccttttgaaagtaacaaaagataatgacatctatgacatactcctatagcacaaattgcaacaacagcagtaaagcaatattcaagctgcaaatctattttccaccagcatgaactgatacactgttggatactgtccacaggagctgcattgagtgccacctgtcagcagctggccaagcccgagaagaatgtgtggacaagtgcaaactagctggtgcgaccatcagtgaagaagaaggttctgcttgtcttaaattgtttttcatttccttatgtagttcttgagaggcgtagttcttgaccctctgtgaatcgagggctatttagtagcttgaccttatttgtaccagggcattagctcactcacattcattttttaagagtaaatgcatcctataagactagaaacttgatgtctcaggacactagcatttcaaagtcatagctattctatttgacttcagctctgttgccaagttcacctctgcttaacaaattcaactgtagagaattccagaatgctatatttttcaaactagaaatggagaaaaattgaagaaatggctaaatgttaacccccaaacctgaattcaccctttatcatccaattgctttatttcaagataagataaagccaactgtaaaacagtgttccagatggtggctccaagatactgggtggtttctggttagtggccatttttcctctcctccatatacttttattcccaaccttccaaacatgggcattacaatgaccatcctcaattccctgttgcctcacccccaaaatacaagaaagacctattctctttaacggctaagcaaacttctcttgctttcatctgtcattttaaatttaattacttagaatcagagtctagtggcaaagtttcacctcaaatatttaaatagcttgttttttaactggcaataccttttaaacaataatttgtggactttaaaacaaagatgatgactgactcttccaacagagacaacctgggagaatttaatttggtatcatcctgaactcgctgcattatcatgcagctcagggtagaattgctactctgcacacattagagatgtggccaagatgtagctcaggtgaagtgaaataattaagccaataatgtatgaccctccaggatgtgtctcttgaatagatggaattagaatacggaaattaatccatttccagcatggattgagttaatgaactttatattgttttgaagactacttacattgtctgaaaatttagagttctaactatgcacaattggattaccctatatggagggtcatgatatgtgctcataaaacccctcaccaatgcttttcttgtgaccaaagataaacatgccaaatagcagtaaattggacaaaatggtgtgcgccttacattactaccaaaggcgagatacatgaaagcactgagcagacagcctctgtggacttcccacattagtacctggtgcaaagtcctagcatcaccttctgggctcatttcacagcaagcactggggatagttaccaagtgtttctgagaaacgcgtaaaaattgcagaaaatgctctgcaaattgctaagcctcaattcactagcaacatgggaaatctaatgtgttgaggaaaaaaaggagtaaaccttacatacatgcaaatcataatggcatgaacaaggtacttactatatttaagtacacaggtttttttgagtagattatcataaatgctgagattggagaggaagactagggctccagtggcatttaaaatacttacattattctttttgtgtatttgactaaattatttcaaaatagggagatacaattatttgtaactcagcaattgaaaataaaaattggattactaataccatttaaagcactaatctggatgaatttgagagaaaaaaatgtttttaattcagactgtgtttaaaagccacttttctaatgagcctttttataagctttatttcaagttactcatccagttatgttactgatcatactaccttgaaatgatcgcataatatttgtcttttaacaacctacccttcccccaacaagaggaattttattttactcctggggagtattttactccccaggagtaaaaaaaaaaagcataactttataatctgtatgaattgttcctcagttatgctgtgagtgggcatatcaaaaacatgttattaaccttattcatcccattttactgagagtctttttttttttctttttttttgagacaaggccttaccctgtctccccggctggagtgtagtggcgtgatcaaggctcactgcattctagaccttccaggctcagcctcatgagtacctgggactacaggcacatgccaccctacacagtgtaattttttgtagtttttgtagaaatggggttttgccatgttggccaggctggcctcgaactctgagctcaaggcatctgcccgcctcagcctcccaaattgctgggattacaggcatgcaccacagtgcccagcttgagagtcatatttttatttaccttaacatacatgtactcagagaattgtttctcaaagtatattccatgtaaccctagatatgaaaacattacatagaaaaaggcgcccctggtaatgtaaatcttagaaataggaaactaggtttcttgttttctttgcaggacttctgagagttgttatacatttaaattaaatgtgcattgtgaatcatcaggaatggcaaggggaggaattggaataaatagaggattcccaaacttatctgaccataaaccccttactttttccttgggaaacattgttgtttgtttgttttcgtttttgtttttttgaaaactgctaactaatcctagagctgaggtcttaaacatatggccatcttgactcagtggtgcagatgctttgtatttttctttttcttttttttaaattttattatcattatactttaagttttagggtacatgtgcacaatgtgcaggtttgttacatatgtatacatgtgccatgttggtgtgctgcacccattaactcgtcatttagcattaggtatatctcctaatgctatccctcccccctcccccatcccacaacggtccctgaagtgtgatgttccccttcctgtgtccatgtgttctcattgttcaattcccacctatgagtgagaacatgtggtgtttggttttctgtccttgcgatagtttgctgagaatgatggtttccagtttcatccatgtccctacaaaggacatgaactcttcattttttacggctgcatagtattccatggtgtatgtgtgccacattttcttttttttttttttttttttttaattatactctaagttttagggtacatgtgcacattgtgcaggtttgttacatatgtatacatgtgccatgctggtgcgctgcacccactaacgtgtcatctagcattaggtatatctcccaatgctatcccttccccctcccccgaccccaccacagtccccagagtgtgatattccccttcctgtgtccaagtgatctcattgttcaattcccacctatgagtgagaatatgcggtgtttggttttttgttcttgcgatagtttactgagaatgatggtttccaatttcatccatgtccctacaaaggacatgaactcatcattttttatggctgcatagtattccatggtgtatatgtgccacattttcttaatccagtctatcattgttggacatttgggttggttccaagtctttgctattgtaaatagtgccacaataaacatacgtgtgcatgtgtctttatagcaacatggtttctaatcctttgggtatatatccagtaatgggatggctgggtcaaatagtatttctagttctagatccctgaggaatcgccacactgacttccacaatggttgaactagtttacagtcccaccaacagtgtaaaagtgttcctatttctccacatcctctctagcacctgttgtttcctgactttttaatgattgccattctaactggtgtgagatggtatctcattgtggttttgatttgcatttctctgatggcccgtgatgatgagcattttttcatgtgtcttttggctgcataaatgtcttcttttgacaagtgtctgttcatatccttggcccactttttgatggggttgtttgtttttttcttgtaaatttgtttgagttcattgtagattctggatattagccctttgtcagatgagtaggttgcgaaaattttctcccattctgtaggttgcctgttcattctgatggtggtttcttttgctgtgcagaagccctttagtttaattagatcccatttgttaattttgacttttgttgccattgcttttggtgttttagacatgaagtccttgcccatgcctatgtcctgaatggtattgcctaggttttcttctagggtttttatggttttaggtctaacatgtaagtctttaatccatcttgaattaatttttgtataaggtgtaaggaagggatccagtttcagctttctacatatggctagccagttttcccatcaccatttattaaacagggaatcctttccccattgcttgtttttctcaggtttgtcaaagatcagatagttgtagatatgcggcattatttctgagggctctgttctatcccattgatctatatctctgttttggtaccagtaccatgctgttttggttactgtagccttgtagtatagtttgaagtcaggtagcatgatgcctctagctttgttcttttggcttaggattgacttggtgacgcgggctcttttttggttccatatgaactttaaagtagttttttccaattctgtgaagaaagtcattggtagcttgagggggatggcactgaatctataaattaccttggacagtatggccattttcacgatattgattcttcctacccatgagcatggaatgttcttccatttgtttgtatcctcttttatttcattgagcagtggtttgtagttctccttgaagagatccttcacatcccttgtaagttggattcctaggtattttattctctttgaagcaattgtgaatgggagttcactcatgatttggttctctgtttgtctattattggtgtataagaatgcttgtgatttttgtacattgattttgtattctgagattttgctgaagttgcttatcagcttaaggagattttgggctgagatgatggggttttctagatatacaatcacatcatctgcaaacagggacaatttgacttcctcttttcctaattgaataccctttatttccttctcctgcctaattgccctggccagaacttccaacactatgtttaacaggagtggtgagacagggcatccctgtcttgtgcctgttttcaaagggaatgcttccagtttttgcccattcagtatgatattggctgtgtgtttgtcataaatagctcttattattttgagatacgtcccatcaatacctaatttattgagagtttttagcatgaagcactgttgaattttgtcaaaggccttttctgcatctattgagataatcatgtggtttttgtctttggttccgtttatatgctggattacatttattgatttgcatatgttgaatcagccttgcatcccagggatgaagcccacttgatcatggtggataagctttttgatgtgctgctggattcggtttgccagtattttattgaggatttttccatcaatgttcgtcaaggatatttgtttaaaattctctttttttgttgtttctctgccaggctttggtatcaggatgatgctggcctcataaaatgagttagggaggattccccctttttctattgattggaatagtttcagaaggagtggtaccagctcctccttgtacctctggtagaattcggctgtgaatccatctggtcctggactttttttggttggtaagctattgattattgccacaatttcagagcctgtattggtctattcagagattcaacttcttcctggtttagtcttgggaggatgtatgtgtcaaggaatttatccatttcttctagattttccagtttatttgcatagaggtgtttgtagtattctctgatggtagtttgtatttctgtgggatcggtggtgatagcccctttatcatgttttattgcatctatctgattcttctctcttttcttctttattagtcttgctagcggtctattgattttgttgatcttttcaaaaaaccagctcctggattcattaattttttgaagggttttttgtgtctctatttccttcagttctgctctgattttagtaatttcttgccttctgctagcttttgaatgtgtttgctcttgcttttctagttcttttaattgtgatgttagggtgtcagttttggatctttcctgctttctcttgtgggcatttagtgctataaatttcactctgcacactgctttgaatgtgtcccagagattctggtatgttgtttctttgttctcgctggtttcaaagaacatctttatttctgccttcatttcgttatgtacccagtagtcattcaggagcaggttgttcagtttccatgtagttgagcagttttgagtgagtttcttaatcctgagtcctagtttgattgcactgtggtctgagagacagtttgttataatttctgttcttttacatttgctgaggagtgctttacttccaactatgtggttacttttggaataggtgtggtgtggtgctgaaaaaaatgtatattctgttgatttggggtggagagttctgtagatgtctattaggtccgcttggtgcagagctgggttcaattcctgggtatccttgttaactttctgtctcgttgatctgtctaatgttgacagtggggtgttaaagtctcccattattattgtgtgggagtctaagtctctttgtgggtcactaaggacttgctttatgaatctgggtgctcctgtattgggtgaatatatatttaggatagttagctcttcttgttgaattgatccctttaccattatgtaatggccttctttgtctcttttgatctttgttggtttaaagtctgttttatcagagactaggattgcaacccctgcctttttttgttttccatttgcttggtagatcttcctccatccctttattttgagcctatgtgtgtctctgcccgtgagatgggtttcctgaatacagcacactgatgggtcttgagtcttcatccaatttgccagtctgtgtcttttaattggagcatttagcccatttacatttaaagttaatattgttatgtgtgaatttggtcctgtcattatgatgttagctggttattttgctcgttagttgatgcagtttcttcctagccttgatggtctttacattttggcatgtttttgcagtggctggtaccagttgttcctttccatgtttagtgcttccttcaggagctcttttagggtaggcctggtggtgacaaaaatctctcagcatttgcttgtctgtaaagtattttatttctccttcacttatgaagcttagtttggctggatatgaaattctgggttgaaaattcttttctttaagaatgttcaatattggcccccactctcttctggcttgtagagtttctgccaagagatcagctgttagtctgatgggcttccctttgtgggtaacccaacctttctctctggctgcccttagcattttttccttaatttcaactttggtgaatctgataattgtgtgtcttggagttgctcttctcgaggagtatctttgtggcgttctctgtatttcctgaatctgaacgttggcctgccttgctagattggggaagttctcctggataatatcctgcagagtgttttccaacttggttccattctccccgtcactttcaggtacaccaatcagaagtagatttggtcttttcacatagtcccatatttcttggaggctttgttcatttctttttattcttttttctctaaacttcccttctcacttcatttcattcatttcatcttccatcactgatgccctttcttccagttgatcgcatcagttcctgaggcttctgcattcttcacgtagttctcgagccttggctttcagctccatcagctcctttaaggacttctctgcgttgattattctagttatccattcgtctaattttttttcacagtttttaacttctttgccattgatttgaatttcctcctgtagctcggagtagtttgatcgtctggagccttcttctctcaattcatcaaagtcattctccctccagctttgttccactgctggtgaggagctgcattcctttggaggaggagaggcactctgctttttagagtttccagtttttctgctctgttttttccccatctttgtggttttatctacttttggtctttgatgatgctgatgtacagaagggtttttggtgtggatgtcctttctgtttgttagttttccttctaacagacaggaccctcagctgcaggtctgttggagtttgctagaggtccactccagaccctgtttgcctgggtatcagcagcggtggctgcagaacagtggtggctgtagaacagtggatcttggtgaaccgcaaatgctgctgcctgatattcctctggaagttttgcctcagaggagtacccggctgtgtgaggtgtcagtctgcccctactagggggtgcctcccagttaggctgttcgggggtcagggacccacttgaggaggcagtctgcccattctcagatctccagctgtgtgctgggagaaccactactctcttcaaagctgtcagacagggacatttaagtctgcagaggttactgctgtctttttgtttgtctgtgccctgcccccagaggtggagcctacagaggcaggcaggcctccttgagctgtggtgggctccacccagtttgagcttcccagctgctttgtttacctaatcaagcctgggcaatggcaggtgcccctcccccagcctcgctgccgcctagcagtgtacaaggcggctgtgctagcaatcagcgagactccgtgggcgtaggaccctctgagccaagtgcaggatataatctggtgtgccattttttaagcccattggaaaagagcagtattagggtgggagtgacccgattttccaggtgccgtctgtcacccctttctttgactaggaaagggaactccctgaccccttgtgcttcccgagtgaggcaatgcctcgccctgctttggctcgcgcacggtgcgcgcacccactgacctgcacccactgtctggcactccctagtgagatgaacccggtacctcagatggaaatgcagaaatcacccatcttctgcgttgctcacgctgggtgctgtagactggagctgttcctattcggccatcttggctccacccccctgctttgtatttttcacaccctccctggaccttcccaggcccacatcctcacccctgttttcacatttcttccttctctgagtatggttccacggactgcctggcatcttattttcattgtattattctagagcagcactgtagacattcacaaaggaagggaaaaaagagagatccattttctatgaacaacagaagaaattatgcagcgaattatgcaaatctgtcgttgcacatttgagaatactatttcaatacccaaacaccatgaaacaggctacatctagagccgtaacagtcatgaaaaggagtggtgaagtaattaaagcaacatgggagttgtgactcaaagatcatattctgccattccattaacacttaaataaccctgaccaggtcaagtaagcctctctaggcttcagtgcagctatttgaaagaaaatttttaaaaacatggttaatattactgaaaggagtatgataagccactcacatatttcctaccacagaataaaatgtttcattaaatatgttcaaggcgagcagagtgagcctgggctgttcccacagagagggggaaagaagcaagaaaacagtccaagaagaaaacgcatagtccccaagacttcatgaaccctagctaattggaggggcaagtgaacaggagatgtggtaaaggccaaataaaatggccaacgtatgaattatatatgcaataccatttgcaatcaaatatatgaaataacacacatctcaccaaatctcttaatcagaatctcctttttaaaaatacttattaaacaactcactaagtgtacaagctcctctgcacacaaccaacttctcaaatcagaatacccaaggtgggtccccagaatctacattttcaaaactcccaggtgacttagatgaccataatcatttggcaatgactagactaggatgatttgtaattagatttcttaatattcccatgtaatagatgtttctaatgggttcaaaaacagtttgtacacttaaatctatcatccgaaattttatttacaatgctaaatgtcttgctggttcctgttttcatagataatacaaagcatacttctcacagacactgttgggtttttcatctcaaacaaaatgtaaagacagcaaacagcaacttaatatttctatctatggctatggcatttttgaccaaaaacagactattatttaatttttgttagattcagaaaacacattagattctgctttattaatgtttttatttttaagctaatgggagaggttataagtctagtaggagtatgtccaagattatcaggggcagccccagttttaatgttctgatccattgtagcataacacactaattttggacctatgtcctaaaagtttagattaggagaaaaacgtcttctacttacaggtttctgaaaaacagtgtttgtaaccatcattgaaaagtctccaacttaaaagataggagaacagttaagcaaatttgtttggttttcttaattagcagaatgccacataattttggcatacatcctggactactaaaatttctggtagatagtactggcatctcagattggccattttactttacttttaatttctgtcatgacattcattttctgcctcttgaatgagctcaataaggaaaaattcccacttggaaaagatttaaggtaaactggattttttttttttttcaaattaagaaaggagctctactgaatgatagacaaactgtcactgtggatttatttacctttatcctgctggtccctgagctacataatgcttcagtctcagtttcctgatattaatttatgttactgttaccacaatacatggccagcaatcttgactatgtcgttgtgagaaaggcccctttaaaagtatcagtatcagtttgaactgtgcagaaatgtaatctagacatccttcatgctctcagcaaagaacctatagccccctcattaccataatcagggccattctattcccaaggcagctgtgggtacctgccttgaagtacgttcagcctgttgcaatcctgcccgtatccgtttgataggcacatttgatggtcagtcctgattgaccacaactggaactgttcttctggaacgtgagtgaaaacgaaaacctcacttcatgagaaaaaaaaaaacctatgcctctcctattctcattctgcaatattgaaaactctaatttacatattaaaactcaatactactttgttttaaaaacaatctcttttggaatcttgtttaacctaatgaatgactcctttatctgcagatttctcaaaggatggttctgtttcctgctctctgcaaggagaaaatgaatgtcttattacattcctaataactacagataatgaggggaaaaccatcattcacagcatcaatgaaaaaggtgggtgttttgccttccattgccgatggcaaatgatactacacaggagaagagaaagcaaccagaaaatcgctctgggtagcatgccaggaaagacatttccaaaattttgatgaagtttcttaaagtttcccaaggattgaaagatgccagttagaaggttcagtatgttccagtgtctcttattaagaccagataagggtcgggcacggtggctcacacctgtaatcccagcactttgggaggccgaggagggtgggtcacttgaggtcaggagttggagaccaccctggccaacatggtgaaaccctgtctctactaaaaatacaaaaattagccgggtatggtggcctgcacctataatcccagctacttgggaggctgaggcaggagaattgcttgagcctgggaggtgtaggttgcgttgatccgagatcgcgccactgcacagagtgagactctgccaaaaaaaaaaaaaaacagctaagatgacttgtagttgcagcagtcatcatcttcctgaaatctgaagatgattgtgaacttggccttgaagctcaggtatgccgagtgcccctggagtcttgctctggaaaaatctcatgtaaatcaactcctttgaaatgcatacataaaatgagtcttgtggccgttcattagggaaacataaggagaatcctgctgtataaggagaaattactttataataccaaaaaagcctgcctgctcattatctgtcttacaaaataaaattctccaactacactcccaaccctctgtgactgtggcagtgactttagcaagttatcttgaaatcaaagccatcccttacagtattgattctattgaaaaaaacgagtttcaaaaacaaaaacgaatttccagaataagtcctgcttttaattcagagacttttgtatctagttggtgattttttttttttcagtgaaacatgccttggctaaatgcctcctcattactgagctgttgtctgttcttttattcttccacacaataagagtggcaccacaacatgccattctgcagagcacgcacagatgccctgatgctttttattatggcgtgttattatccccatgcttttgtagtagggaaaagtgaggggaaacataacctcccggaggcttaacaagagtcacctgacagcctccaggctccctcttcctcaacaaatgtccgcatggttgggtaggcctggcacttccaggggccagcagagcagaacctgtccccagaggtccatggtccctcctgtctcccgtctcacagctttcagactagaaaatcccagggtggcctggtggaggcttgggtagaagaggcaaactgagaagtgagaaaggggctgatccccagggtcctctaagcaaattgaaaaaaagaactgagtgaagggtcgccaccagggtgcttgtggacacaggtggcttctttcatcttctttctttcccccacagtccggagggacttccagagcataagagccacaacagagtcaaggaatgataggcgggaaggcttcctggctggaaagtaccagctagggtagatgctatacccacaggttccaacttggaggctccaggcccttgaggtgatgaggatagaaaaggggaaagagtgctgtatttgctgtaacaatagtaatattaattattataatagcagctctcattttttgagccctaataccatttgccagatgttgttttatatattttacatgtattaattcgcttaatattcttaacaaccatataaaacaggtaccactattattttcattttaaaggtaaggaaattgaggcatagagacattaaataattttctaggtctggcagtaattacgtgccagagctagttggaggagctctggcagcctggcctggagcccctgctctgaaccactgtgctctactgcctcctactggctgtacaatcatcataactatctgaatcacaaaaagatgttagatcagcatcatccgacagaactgttaggcaaaccctatatgtaatttaaaattttctagtaattacattaaaaagtaaaagaaacaggtaaaatgaattttatttacgatgttatccaaaatattgtcatttcaacgtgtaatcagtataaaagctgagatattttacatttttttcatgccaagtgttcaaaatcagtgtgtatttcacccttacagcataagctacttgggaaaagtcacatttcaagcactcaatatgcacattgagctaccagattgtgcaacgcatgtagcacagttagatactcaggaccttagaagtaggtgctgcaccaacctggactcgatgggccacattgcccacagtgatagaggtgaccctcttcttccacgtagaaatccattttcagtctgagcatctcaagaaacatccaagtatgaaaagtgatgatctctattgtgtaagacctgctctggcacttgggccaacatctttaattgagaaatgtacaattcctgaggactttcagttcttaaaataattatctctgccagaccgcacccatttcttctttagtccctcctggagaaccctcctaattcatgtctaggtgcaggattgtagcaagcttcatcttgctttgaacaggaacatactatgccccaccccaggcatttcttagccaaagatgtagccagtatatattctcatgacacaggcctgccgctttatttgcaggaatgtgctcacctattagaggcagctatggttcatttgctatgcgagaatatagtctttagatcttcatacagtaatagctatgtcattagctcctttacttatttctgcataatctctttacatggtttcttggccaaagaacaaaagtgtgtgaggccaggcatcatgctgttagtgggtaattagccccactcagattcacatcaactccagatccttaccttaaagacagcatgactagtcatatgtgtataactctccttattaaatatctaaaagcagtaagacttaggataaactaaacatcattcatttcctccccagatcccatggattttgcctcatttcttgcagagagatgcagatatctaatgataattttatgtgggattttttttccatgaaagtaagaggagaacataattataatgtttcattaagaaatgtatcatctcctaggcatattgcaaggactattagtcattctgctgtgaattaggaaacgtactgtataattgcaaaattacattaatatcttcaatacagtcaaaataacatttcatagaatattcaagttgaaagtaccctacagaacatctaatttcccagacttgcttgaggataagaataatttagaatatttaataacacagaatcggtggcttatccaagacccactgaatcagaatattggggaaggggtccaggaagctgtgttagtaagcaagaacagttcagcttattggtatcatcagaaaaggtaagggaacactgaactttgttttacagaggaagggcctggggctcagagaggtcaagggactggatcacattcacacagctactgtacatcagatgggaattgaatctacctctcctgaatctagtctaggaacttccccaaaaccagactactgcattagggttcaacaaaacagaactgaaacccatcattgtcttctgtctataaagaaagaaggaaatagtaattttttccaagggataggtttttatataacttttaatatagtcttctagactccccatgattcaagaaggtccatgaaaaactgatgacatgcagcacacacacacacacacacacacacacacacacacacacactccatttctgctttatcgtgaactcagaagagaccatgtttagtgattaaactagtctttttcttaatcctttaaatattccatgtgcattaattatcactcttttggattctcttttagagtcaaccatcaagtctatatccatttacttcaaatatctaaattcttcctttatcttttgttctactttgaggaatgcagggctattcttcaacaagtaactcatttttaaaatttaagcaaggcgaaaatggtgtcaatatttatcctctgctgcagaaaatgtagatgaaaatccaacaagaaatgcctttccgatgtcaaaatgttgattttaccaccttcttataattttctttatttctgcagattgtccgaagcctccaaacattcccatgatcatgttaggggtttccctggctattcttctcatcggggttgtcctactgtgcatctggaagctactggtgtcatttcatgatcgtaaagaagttgccaaatttgaagcagaacgatcaaaagccaagtggcaaacggtatgtggaaacttagggctactccttgtctaggggagaaagaggctggtggaagagattgaggggctcagctttcttctgctctgggagttcaaatgtcacattttttctctcccactctcgccatgactccaacagctttgatttctgttctgcttcaggggcaaaggtccagatgaccctcatagcttatatttgtcttagtgcggtggggatttccaccacgatgaagggtctcatgaggctcctgagacagctgcttagggacattggggaagtatatttttacccagcgcttcctcaccactaggagtatccctcaggccccatttgataaagcacgggtgctatatctaaacatttccataaattggttatgttataatgaatggaatagtgttcataaatagtacgataattcatgccaatttctttggaaatacttgtttctgatataataggttacaaagcaaaattgagatgatttttaaaatgccatgcagttattttttctgaataacataaattttaaacagagacctgaaaaaaaccccaaaagtattaacctttaaatacataaactcaacagaaataatttaactgccttctcttcacaagaggcaatcagaaggcaggactatagttttctgtgtttcttttccacaggagagataattacatttctagagacccatagaaacaattccatagttttaatttcatctctctatctctaatggtgtgtccaggtatctaacagcaattatcttacattgctgattctaacaacaatgatatcactggagaaaatacaggtagacgcaatgctcctttggatttgtccgcccaaataatttgatgttaacaatttttatagcaatgccttcaactcctaaagcaaatggaattttccatttttgataaatttatcttgataagggatgtttctgttgtatgcggttattctaaattaatgataatacatggtacaggacaatgaacactgaaaatttttatctactttatcttcccattaaaaatgcatttagatacaacagccaaatgcaatgtatggattttgtttggatcgtgatttgaacagtccacctgtaaaaatacatttttaaaacaactggaaaaaggctgggcatggtggctcacaccgtaatcttagaactttgggaggccaagacaggaggattggatcacttgagctcaggagttcgagttgggcaacatggcaaaacccatccctacaaaaagaaatacaaaaattagccaggcatggtggttcacacctgtagtcccagctacttgggaggctaaggcaggaggatcacttgagccaggaggtcaaggctgcagtgagccatgatcatgccattgcattccagcctaggtgacagagtgagccccagtctccaaaataaataataaataaatacataaaaagactgaaaaaagattaatacatgctgggtattagaatgatagcaaataagtatggttaatttgattaggtatgataatggcatggtgacattgctagaaaatatccatattttttagagatgcatactgaaggagtgaaaggaaatgaaagctggggttcactttgaaataattcagccaagagagtgggatggagggatagttgaagcaggtgtggcagaactgtgataactgtggaatctgagcgatgggtctttggaggttggttatatagctttcctctttttgcgaatgtgtgtattttccataattaagcaaaattcctcaggagaagatataatttactcatccctaacaatgtaaaaggtaaacaggttagcttggtgacttagaacacagtactaatgagcccaaagttgtaggacagttcacttcacctgacccctggccacagatgttatttttgactttcatcaactctccaacaaatgccttgccatggttagaagggcaaccaggtaaaagaatatggttaagttgccacaaaggacaatagcagcaagccccatgatataatcctggtatttccattttgaagagctaaactaaggctcagagaagttaagggacttccctaacttttggtgcatggttaagctgaagcctaattgttcattgttcttctaagcacagcctttggttgaccctcctggaaataataagcaggtgttccacaaacacgcacttgggcaattatgtgatgtgtatctactaaccagcacatttcaatgttctcatacagaggcataaatactgacaagtgattaatatctttaaaataacattttaattaacagttaatttccccaaaaacatgaattgttctccctcaggatgtagaacatgactgaaattcaaatgctgaatttttgctgtttcttcatctaacatgcgacccgaacatgcattaaacagaaaaaaaagcataaatggaaaatattattcccttattaaattgagtttctttgaataacaaatgtttgatgttcctgactagataatgactgggtagtaattattcacttggatgcaaaaaaggtttaactcaaataattcagtttaaatttcactaacatcctactggaaaaaaatgtcgctcactgcacacatttaggggtcttcaatttaactgagttttttccctaaaacctatttcttcttgaagaagtgaatttgactggtctttgaaacccagtgccctccagagacaatagggacagtcaggcctcctggccataggactgcactggactcataaagtgacagggcttaagacagaaaggtcttcactcctacctcctaaaacatttcagagcagctgtaaagaaaggttatcttttttattatgctttaaaaaataatgcccacccccacatattctttatgaaaacacaaatgaaacatatttaaattcatctttgattagaattttttttctaggatgacaagtcattaacttgaggcaaaaaaatgttcagcctgacatttcttgcagtcatgaattgattttgtactgtgctaagcaaatcaggtctgtgtttggcagttgggcgatcattaaggaagctgtgggtcatgacagagttttcctattaccactttttcaatcttgaaaaatgtgtcattgcatttgcagaatccacagcctaaattagcactcccagacacctgggggaatcagcctggtaaccccaaatggttaggggaaaactgaccttttctgagcagtggattgcacactcacccgaaatagagtaggactcaagcctgcatttcagctggaaagtctgtgtagagaggttacaatcagcagagcactagaggaggcagtgtggacatttccacacctcctcctggaacaaaacccaatgtgagtgcattatcctgacctctgatcttcagctgaggccaggaaataccctattacacacaacagcaatatgtacttgctcttcgtccacttttacacttccaccttaccctcttactctagtgaagtctgctttacccatcactccctataagcaatgtcttggccctaaaccagtattgcaagggactcccaaaatattgcaaacctgaatgaatgaagttgctttaaaatacggaatgaaaactctgccatcaaaattaaacattcaactaaatatctactaaataacattgtgttatcttgtcaactgcaattcaagtcacctcctctataatgcatatcagttatattaagtgtgggatatgggtgtattgtagtatgtttgacatgatatagggtgcacctacaaacaagtatctggtcctacggagctctaagctggccctgctcacagcctgtgtcctctttccaagtgtcttttctgttcacaaaggtgggagcttcctggaggaagtgggaaattcctccaggacaggcttaccctgtcattgctggcctgaacctcttacttttttccatcttgtttcttcaatggagtctctcattctcctgtaaccaactagattctagtctcaaatttaatagaattccatgcatgatttttgtttgcaaatgagactccatctacatctaaattcacatcagtctgccctttgccttcaaaatctcaaattcttagagcagcaagactagataagatctggaggtccctcagaattaaccaggctgctctcaggaatagaagcaatataccaacttagctttcacccatcatccaccaccagccaaggaacatttttctgtttggctttattatagaaatagcatatctctttaaaggcacataacaaaagtagcatgtcacttagtcagaggtcaggccactggctctggacaacatagaaatgggtgcaggtgtgattcccactcacaatgagggcactgaggccagtgagtgggaaagaccggggagtgtttccgattttattcaattcttttaagagctgaaagaaatatactgagcaagcaaagacaattaaggttttttttcaaatccacccctagaaatttctaccatagctataattcatggaatgaggtgatcaaagtataagattttaacttagaaggtcagaggcggtacctggattccatacatactcagtaatgggcttagaaatgttaagtgtaccaaagccctgggggaaaatatcttaataatcctctctaaaacctaaaagaaaaggaaattccaaatgtgaagaaaagctataaataggaactaatgagaagaggcagcatttatggagcatttgctatgtgctacacacagtgctaaaatactttacctggacgaggtaggaacagatagggacaccaaggctcagagtgtcttcagtacggtcatgtggtggagctgggtttggacccagactgttgccatagcctgtgtgatcagccttggaaagtgggagagaagaaactgtaccttacccagacaccttcctccggcctggaacaactagagaggcttgatccttctggaccttctggtccttttggctacagcaccactgctattggcacctggaggcacatctataacccaaacagcacagctgagctacccaagagtcccacacccaaccttcccactgcccccaaggcaaagccatttttcctggcctgcctttggactgcaactctttcatgaccccagggtcctccataccagtctcttgtggttgtcttacacagtgttgtacatagtaagcaaaagacagctggttctttggctacccagggcaagtgttagctgtccagaggatggttcctcactcctcccaagcaactactttctcccacttctgagttttgatttcatcttagcatgattatttgtgcccttctttgatgcctctcatgagtaacacgtttgttaaaggcagatactgtgtcgttcatttttgtatgttcctactggtttcacttttcctgttttttacttttttggctttgatttcacttttggttcatctgtcactgttcatgccactcattccatacatactgagtacctgctttgggccagggactcagtgctgggaaaacagcagtgagcacaacagctgaagccttgttttctatccgtaaatttgtgcattaccaaaagaggtaagatttttagaatatacatatgggacttgttctgtatatttaacaaaatgaaaatgtataaattgcaaaacactaaacatatgaaatgccaaattaatcaaaattgttctaatggtttccaagactgagcttgactctcctcttccaatttgcactacgtattaaaacagtataaaaacaaaatatacatactttcacttgaatcttttttttttttccagggaaccaatccactctacagaggatccacaagtacttttaaaaatgtaacttataaacacagggaaaaacaaaaggtagacctttccacagattgctagaactactttatgcatgaaaaaagtctgtttcactgatatgaaatgttaatgcactatttaatttttttctctttgttgcttcaaaatgaggttggtttaagataataataggacatctgcagataagtcatcctctacatgaaggtgacagactgttggcagtttcaaaataatcaagaagagaaatatccttagcaaagagatgactttggggatcatttgaggaatactaactctgttgcattaatgcttcaaaaaatcatcaaatgattcatgggggcctgatttgcatttgaaaaatgtttgaaattagagtctcatttgtttcaggaatgcagctacctgagttttttgtctcggcaaagtcacaaagcccatatactcacattgtgtgtctatacttgccaattaattctaaacttgtaggaaatatgccctctcttaaaggagaattttttttaaatctctgagaaatgagattctgagtttatttcagctaaaaggttgcaattcttctgaagatatctcaaatataaggttgaaagttaagtgttaataatttttgtgaatttatacacacctaaacgttaagtacacaaatattttatttgttttacaaataaggaataagtaatttataaattaagaagttacctataaaaataaaaagataacaaccctatcatatagcttatttttaaattacctgaaaaacgatattctacactgtttcctttttgactctgagttttcaaactgttacttctcccatatttctcaatccatttcactcagttgcacagtcttttaaaccctgtaattgtcataccaaagtttctttttaaaaaaaaattactttaaatgcttagtttattcaaagagcgatccaataatataaaaggaacatgtgttaaacacaataaaattttaaatggctctaaatcaagcacatcaagagtatacaagtcttaaaggctttttaatacatactcttttcccatctatgtaacccaacttgcacatttcagctgcatgtggtgaatatgcatcatatatttactttaagaggtaagattttacttgcaaaatacatgtgcaaattagggatccatcagttgatggaagagatggactctagaatattatttcttgtggttattactcctttacaaagcactttcgtctcacttgatcctcataaggaaactaaggctcagaatgagtagagctgggttcagaatctagctcttctaactccaagccatctcctctttccactgcaggaaactgcctcttttgtcagtgaaataatagaaagattgtgttagttaagtgataactgtcatttgtttgaaaatgttcgagactgaacaaatagcatttaaactgctggcatatagatgagatattgtacttttgtgcaatgtttattacctttgattaaattgtaatgtgaagcttttactaggtgaatagttcattatgtagtggaggcttcgtggttgtccattgaattgtcacagcaaaatctataagtttcttcaattctacaagatagatccatatacctttgatcacttggagactctttttttgctggtttctagataactcaggtaaatcagacctttacagagtacagggctaggtgaaagaattactgaaaaatcaccttgaaaatccgaagggctgatataccctttatgttcctgactgatgcgcagaacctgggggaaatctacagcaatatacaggttgcaatgctgataacacaacagcaatcctctcctctacgtggacttactgttgtttttttaattattattggaatgggattttagaaaatagaagttacctttgtgtgtgttttagggaaggtagagaagaatctgctctttctctgaatactgttttgaccccaggcaggaccttggaaaggccaaaacattaacagtagtacttctgttcactgaagagttatgttacatgaagataaaatggttttgtcgtgtttattattgtattttgtgttgatataaataaacatggtaatttaaacaatgaaccttagatggatgatagtttcttttatttgcttggcacaaaaccctcttcttggatttctggattcctctgtgacctgttctgactgccttgatggtcttggtctggggccaaggagaagagcaaaaggaggcagccacagaaggcaagagacagcagggagcgggcctggacatcaccattttgtaaagtcaagttctttagagttagtgctataaactgaaatgtatcaccttccacccccaatagcccctgtccccccaaaattcatgtattgaagtcttaacccccagtagctgagactataactgtgcttagaaatagagcctttaaagagataattaaaggccgggcacgatggctcatgcctgtaatcccaacactttgggaggctgatgcaggcagatcacaaggtcaggagttcgagaccagcatggccaacatagtgaaaccccgtctctactaaaaatacaaaaattagacaggtatggtggcaggcgcctatagtcccagctacttgggaggctgaggcaggagaatcacttgaacccaggaagcagaggttgcagttggctgagaccacgccattgcactccagcctgggtgacagagtgagactccatctcaaaaaaaaaaaaaaaaaaaaaaaagagagataattaaaataaggcgatggagttgagccctggtccactatgactagtgtccttataagaagaggagattaggacacagacataaggaaaaccatgtgaagatacagggagagggtggccaactacaagccacggagagaggcctcataagaaaccaacccagttgccacctgcaccctggacttctggcccccagaactgagggaaaataaattcctgttgtggaagccccctagtctgtggtgctctgctcagcagcctgagcacactcacgcgctcagggagtctattcttctgcacatccatttgttcggtgtcatggtgccatgcttatcttctaaatcaggaaaatgaagcacaaagagaccaaatgctggaaaaaggagtcaatttaatctttctcttaggcccatttcttacaagaagacaggcaaagtcaaatcaagagtacttatattctgaaacacactgtctcttgtaaactaaaggccaaatgtctgaaaatagagaaacagctcccattttgaatagcaccaagaaagtcccttctcgtcttaatttttccatctgggaggtggaattcttgtgtcttctagcagctataacaattcctgacacagtagcaactcaataaattcattcaacaaatatttattgaatgcctggtatatgccagacactgttcttatgactgtggatacagtgaacaatgagcaaaacaagtaatctctatgcttccaaatgagagagaaaataataaacaagtaaatatacattatcagggtcctggacccagtttgtgcagaccccagatccacttggtcccacctgccttccaggcctatgccaggagttaccccagcaccaacctgcacagtctccttggtagtaaaaccccagcttcttcctaactcctaacaggttaaggagctgctgcaattcctgtgcccaagtccagaatggcttccctagctgctgccccaagggaccacataagacaacagggaggttcaggggagtcaacactctgaagaatgaatgtagatccataagagacagagataagaaggaaccagcagatgaacaggagatgagccaccagcgatgtcttctggggaagcagtggccagcttccaaatgcctcaccttgtacctgcgttccctcattagctgcctccctgccctttttcactgggctagcacccctcaataaaacattagcacataaccttgctcgggttcttattatataagaagactggactaagactgtctaaccgtcctaagaactatgcagaaaataaagcaggacaaaaagctacacaatgccctgtgagagtgcacccttag

SEQ ID NO: 762 - DNA, 43384 bp, Homo sapiens
agtggcacacacctgtggtcccagctactcgggggactgaggcaggagaatcacttgagcccaggaggcagaggttgcagtgagccaagatctcgccactgcgctccagcctgggtaacagagtgagactggctaaaaaaaaagtgaacgtgggctgggcgcggtggctcatgcctgtaatcccagcactttgggaggacgaggcaggcggatcacgaggtcaggagatcgagaccatcctggctaacatggtgaaaccccatctctactaaaaatacaaaaaaaaaaaaaatttgccaggggtggtggcgggtgcctgtagtcccagctactccggaggctgaggcaggagaatggggtgaacctgggaggcggagcttgcagtgagctgagatcgtgccactgcactacagcttgggcgacagagcgagactctgtctcaaaaaaaaaaaaaaagtaatgtagggcaggggatgggatggtgagggttctattttagaatgacaaagagacaaaacaatcaaatgcaataggtggcatggattggactcaaattcaaaaggaaacctttataatagacattttggagtcaactaagaaaatttgaatatggactgaatcacacatcatttaatggagacattatttccttaggtgtgaaaaggggccgggctcagtggctcacacctgtaatcccagcattttgggaggccaaggcgggcagatcacctgaggtcaggagttcaagaccagcctggccaacacggcgaaaccccgtctctacaaaaaatacaaaaatttagctgggcgtggtggcatgcacctgtagtcccagctactcgggaggctgaggtagaattgcttgaacccagaagacagaggctgcagtgagccgagattgcaccattgtactccagcctgggcaacaagagcaaaattctgtctcaaaaaaataaaggggggtattgaggttacgtgggggactgttcttgagagatacatgctggagtgtttaggatgaaatggcaggataagtgcaacttcaaatttaaaaatatacaaatgtttaacaaatatataaataaatacagcaaaatattattcttgagtctagttggtaaaaatacgggtgatttttgtattctttcaactttttggggcatggtggctcacgcctgcaatccttgcactttgggaggctgaaacgggaggattgcttgagcccaggagttcaagaccaacctgagcaacatggtgaaactctgtctctacaaaataaaaattaaaaacttatccaggatttgtggcacacacctgtagtctcagctactcaggaagctgaggtgggaggatcactggagcccaggaggttgaggctgcagggagcctcgatcgtggcactgccctccagcctaggcagcagagtaagaccctgtctcaaaaaagagggggcctattgagcaaccccttggctctgaggagaaaacaaaccccaggattctgcaccggagaggcctctgcccccagtctgaacatgtggttgatgcgggctctccagacaggtcactggactctttccaccacacatcccctgtctatttattctttaacttgttcttttataaaacaggtgccaatctaccaataagtaatgtacattctcaagtataagaataggggctcagggctgggcgcaatgactcacgcctgtaatcccaacactttgggaggacaaggcagacggatcacctgaagtcaggagttcaagaccagcctggtcaacatggtgaaaccccatgtctactaaaaatacaaaaattagctgggcatggtggtgcgtgcctgtaatcccagctactcaggaggctgaggcaggagaatcgcttgaacccaggaggcagagttgcagtgagccgagattgcaccactgcactccagcctggacgacagagtgagactccatctcaaaagaaaaaaaaaaaaaaagaatagggtctcagctagcacctacctcgagaatactcagcctactttggagacccctggtttgaactgggagtgaaggaagcaggccgtagttctcgttcatcttggtatccccagcatttggcataggagctcattaactgctcataaaatgaataaataattgaactaatgaatgaacaagtctgacctactggaggccacatgaggagtgcaggggagtggaggagcaacaatccaaggtccttgggctcggtcctgttccaggggcctcacctctcttgcagagcctaggaagccccctatgagccaacctcactctggccctaaggctgcagagatagtggggtttattttagttttataaaattcacatgcaggctgggagcagtggctcacgcctgtaatcccagcactttgggaggctgaggtgggtggatcacttgacatcaagaatttgaaaccagcgtggccaacatggtgaaaccccaactctgctaataatacaaaattagctaggcgtggtggtgtgcacctgtgatcccagctactcgggaggctgaggcaggagaatcgcttgaacccaggaggcaggggttgcagtgagccaggatcgcaccactgcactctagcctgggcaatagagtaagactccatctcaatgacaacaacaaaaaaaatcacatgcaatatttaaacttctggggccagtaacctatttgggaatccagtgtaagctaaggctcccctcccagcaaacccacattctgaaatcagatactcctcaaagtttgcacaagatctgagatggttcagggactccccactgccaagtccacatgcgggctccaggtaatgaaccccaggactccgagaagccaaggaagctcatggcttatcttacttagtgagacctccctgggttgacatctcgcctctcagctgctacagggctccaggccccctagtcattttcagaagggtttgcaatgaagagaggaaggggctgctgagcccagtggcctggggcatcgccagctctggacctgggtcttctctaggaagaagcctcagcccccacccacagtggggtgtatatgaccccctagttctctaatgggtgctgctggcagacccaggcccctcaggcaagctgtttttggccgttctctgagctcctgctccatgtttctgttttttggggtggataggtacctgctggagtgactcaggtccacagggcacttgtgctggcctgacacacacagatctgagtgcttcaaccaaactgggactccttccacattgttcccaaatccaggagcaagcctctctgaacactttctctgtgcagaacagctctcagatgaccaggaaaggtggcgactcacacatttgcaaccagcacccctgcaatcactctgagaggtagcagtggaggaatctgtttacagatgacagcatggaggctcagggaggctgtgtgaccatcccattcactcaaccacccttttattgagcacctgctatgcaccaggcatggtgctaggtgctagagagtagctgcccttggagtcacagtccaacagtgtggcgagattcctaaacatcatttcaaaccaatgtggcaaatgccatgtaaaagccatggcccaagggttatggggacacataaaccaacttggggtgtggagaggtcaaggaaggctctctagcacgtggttggtgcaacgtcttcaaggacaagaaggataaactgggctcaatgtcatgggaagggaccagcctgttgaaaaagcacggtggcttgaaaccgcatggtttggacagtgctgtgccagcagtctggtgttgtttggcattgctggccagtaagcctagagaaaaatggagccctggctgggcatggtggttcacgcctataatcccagcactttggaaggccaagacgggtggatcacctgaggtcaggagttcgagaccagcctggccaacatgatgtactaaaaatacaaaaattagccgggcgtggtggcgggcacctgtaatcccagctactcgggaaacaggcaggagaagcgcttgaacccgggaggcagaggttgcagtgagccaagattgcaccactgcactccagcctcggcgacagagtgagactccatctaaaaaaaaaaagagagagaaaacaaaaagaaaaagaaaaatgaagcccttctctgacctgaacacccgtggtaagcagtggcaatggagagactgctctcagaggactgacgggagggaggggccagctctgtaaccagcttgttaagaacaactgtaacaaggcatcgagtgccaatccatgccaggtcggcactgacctctccagggtatcactgttcacactgtaaggagatttaagtagcttgttgaagggtgcaccgaggacccgacccttcctcggctctccctctggatacaacgtgaggttaggggttggaggctgagaggaccccgtgaactgcagagcagagctgggacggggagtcaggcctcccgaccgggccgggggcactccctgggcccatgcctcgcgctggcacggagagcggggaggggggtacgcggctgacgaccgtcggggcagcagcagcagcacagcccggcgttggctagcggcccagagtcggggcagggagggttcccgtgcggacgggggctaagaggccgcctccagcccggggcagtccgcgcacccgagcctggagcccggagcctggaggggtggggaggccccgcgcccagggccggaccggagggagagggagagcggtggctcctcccccggcccccgccgctagccgatcggggcgctgggcgggcgccgcgggagccgcagccctttccggggggcggacccggctccggcggcggcacccagctcctgccccgacaggtgcgcgccgcgcgaaggaatgcagccggtctgactcaccagcgcctccttcctacctgcgcgcccgccccataaagcgctgcccgcctcgtccccacccccccaacccccgcgcccgccctcggacagtccctgctcgcccgcgcgctgcagccccatctcctagcggcagcccaggcgcggagggagcgagtccgccccgaggtaggtccaggacgggcgcacagcagcagccgaggctggccgggagagggtgagtgcccgccccagctgggcagccgcgcaggggagctggtcgggcagggccggtggcttttgtctccccttcccctccctgaaggctgacaggccccggtccctctgtccacgctgcgcaggacaggtgcccagcctccccggggtgcgccgggggcagctggcagccaaggggcagggcagctagagaagggtggtgcccatcagacctccaggccagaggagcgccttgggtgcgcctgcgggagaagtgggcagaggccagtggctggtagccctctggggctgggcccctccagggtttgcaaagaaggtggagtagacaccagcctgagtgctgggcccagcccatcatggcgcatctaatgataaaccaacattcctgacttttatgtgaaatttcgttctttctaacattggctcctacttttaaaagccaccctgagaggcagacgccatcccggctccaggcagggcttgctctatgcggtgccacagtccatctggggctggggagtccctgattttccttttctcttggccaagcacaggcctgccttcctcccaaagtcagccccaggcgccttccttcaggaagctctacaggcctcacccaccagccccagggctgtgcccaacactgccacctcctgcagcatccgccctctttcccatggctcagcctctggggtggccctctggctgggactggggctctggggctcctggtgactcccaggagcagggacagggcttctcctctgcccccatggccttgccacaccctgaggacaaggaccaggcacaggtggcatggttgttgctgtccgaaacagagctggcagtgaaggcttggagtctccatcctgggggctgagggaaggacagcaggagggacaggaggggaggtatgtctgtctactcgaccctgatttctcagggagacagaacagccaagggcctggggtccccagacttctggccagctgcctctctggggcgaggaagggcctgggtccctgaggggaggagatgtgacagcgggagaggatagtggacaggagcaggtgtgcccagaggggtccccaggggttgggatgggggccaggggagctctgagcctgtgggtgggtgggcatggcctgtgtgtgtgtgtgtgtgtgtgtgtgtgtgtgtgtccctgtgggggggaaactgcctgtgctgcagtgtgatggcattcagggtggcagtcacacactccagggacctgctggtacataaagtcggggcagcctggtggggtccgggccgcctggagagtaggtgtcctgagcgctgggcccagcccatcgtgatacatctaatgataaacacaaattcctaacttttatgggaaatctcgttgtttctaacattggctcctacttttaaaactttctaaacaaatgaagccaaacactcttgggtgcctcgccaaccctctaactgccattttgtagcttctgcgtggaggctgccatggaggttaaaggcagggcctgcagagcagggccctgtcctggccctcccagtgctgtccgcgggatggggaagttccacagccttctgtgcctggtctctcatctgggaaacgggcagaatgaaatcatctcccgccgggctcctgtgctgagcaatctcctccgtgaagccctgggctcatatggcagtcacagtgtgggaatcagcactgcctgaggggctgtggccagggacagtgggaggaagagctgggctcagctctccaggcctgtacctgcctgtgtaatgatgcctgggaggcctgagcctgcagcctgtattgtgtagcatgtgggtgtggcggctacaccccgaggctgcaaggaagtcatttccctctaggaaccctgctgtccccaccctttccctgctggctcagggctgcctcccagtccctgtgccacaacaggtctgacctgcatgtgttggcgctgctgtggcctcctccaggctgcacgccttagaagcaggctacgccttcctgcccttggcctgagaagggcttctccagcacctcggggaccccagcccccagaccctggggtggccactgccccagaagccgggctgagacaggattcaatggggagggcccgtgggcagggcagaggcttgggcccctgggagacctggccctagagaaagaggcgcggtgctcacctttgccccggccttgcaggcctggatggctctgccgccagcctcttttcttgtccaggcttcaggctgagcatctcttagagggcctcagggatgtccagtcctgccctgaaggccgctgaggacttaggatggtttaatactgaacccacagccgctggggacgccttgaggggagccacagtgtgtgtgcatgtctcactctgggctaacttgtgaaagggtgaacagctcaggggcccagaaaacttaactctggggcaggcagaggtacaggggagggcagatgattcagaccccaccctgatgggccgggcagtcactgcagaacccaacccggtgcagtaagccactgcgggcagctgtggcccagccccaggccccagatattgggaggggcccctctcctcccggctgtgccaccctcaccaaagggtaagtgggccaggacagaaggagcaggaggcagagctgcggccccctctcagggaggcaccctcattggatgaccctgtcatggccaagcctgacccaggctcactgggagctaaaaggcaaagaagaataaacccacatctgccctcagggagcccagtgctgagaggcctggcactgggacaaactcgcaaaccagagtccttgagggctggagggggcctcccggggcagggcataggccactgcagggatggcacggaacagggcagcggaaaaggcaggagtccgaggcccagggccctgcctctggcggctgggcgcccttggtcacattgttggtgctcagagcctcagttcccacagctgtgcagcgagaggaagctgacggcaccgaccatggctgtggaggcctcatgtgtcaattgttgctgttctgcaggaggaagaggatggcagggccacgccccagcccatgggccaggctgctcctggcagccttgatcagcgtcagcctctctgggaccttgggtgagtccacgttgccctgcagccccctcctggcaggatcatcccttgggcaggcattgcccttgcacggggatctcacggtgtctcacctaaacacgcttggccattcagcaactgaccactgcccaccttcagggctggaaaacttgaggctccaagctcttcagcctagagaagcttgagccctgaccacggggcctgagaataggagcgaaggaggctgtgtctagaggaaagaggagacacccacccaggactgaggcacccagaggatgcactgaggccccagaggtgtagtcaagagggttataggaatttggagaagagaggcactgctgacgtgtcacttgctctctgagtgtcactagtggacaaatcactggagccagctcctaccacttgaattttgtctgttagagggggtcctgctggtggcttgaaatagaccacgacagaaatgtttacaccacagaaattggcaaacgctacacgtcaagcaccagagaccagagccgttgttatttttttatttaattcaatgtatatgtagaaacatgctctcactctgtcgtcccggtgaaatgcagtgatgccatcgtggctcactgcagcctcaacttcccaggctcaagcaatcctcccaccttagcctcccatgtagctaggaccacaggcatgcaccaccatgcctggctaattaaaaacaatttttttgtagagacagtctcactatgttacccaggctggtctcaaactcctgagcttaagcaatcttcctacctcggcttcccaaagtgctgggattacaggtgtgagccatcgcactggccaccacagccattgttaaacactgaccagcacaccattgcctgaagcccaggagacctcttactgtgtacaccaggtgcacacagtaggtcctcactgtgatttttaactgagcagagccaaagggaaatctagagttttacttcattcgttactgaggacccactgtgtgccaggtgtgccgggtgctagggctaccgtgataaacaagacaccattcccttcaccctagaaggggctcagaggacagacaggccatgtggcagtggtctcgccgtgaggcacaagctgtgatggaggaggtacctgaaaagggtgctaggtgcagctcatcaaaggtaatggggaaggctgaggaccgtctggctggacctgaggaggcagcaggccagggggtggccagggtgtgccagcaccgagtgtgccagtgccactgtctcagtccccaccttctgtccttctggcttgagtgggaagtcccaggtttgaaatcacagcttgtttctagctgtgctacctggggcagatcacatacccctggcctctgtaaaatagggaacggctgggtgcagtggctcacgcctataattcccagcactttgggaggccaaggtgggaggatctcctgaacccaggaatatgagaccatcctgagcaacatagggagcccctgtctctacataaaataaaaaattagctgggctacttgggaggctgaggtgggaggattgcctgagcccaggatgtcgagactgcagtgagctgtgatcatgccactgcactccagcctgggcgacacagcaagaccgtatctcaaaactaaataaaattgaaatgcaggttgggcacagtagctcacgcctgtaatcccagcactttgggaggctgaggcgggcagatgatttgaggtcaggagttcgagaccagcctagccaacatggtggaaccccatctctactaaaaatacaaaaattagccaggcatggtggtgcccacccattatcccagctactcgggaggctgaggcaggagaatcacttgaacctgggaggcggaggttgaagtgagctgagatcgcaccactgcactccagcctgggcaacagagcaagactcgtctgaaaaataaagtaaaacaaaataaaaatacaacaacaacaacaaaccaaaataaatacataaggccgggcccggtggctcccacctgtaatcccagcactttggaaggccaaggcgggtggatcacaaggtcaggagatcgagaccatcctggctaacacggtgaaaccctgtctctactaaaaatacaaaaaattagccgggcgtggtggcgggcgcctgtagtctcagctactccagaggctgaggtgggagaatggcgtgaacacgggtggtggagcttgcagtgagccaggatcacgccactgcactccagcctgggcaacagagcgagactctgtctcaaaataaataaataaataacataaggagggaatccccatctctccaggtgaaggtgcaggtgggaaagtgcttgcctttgctgagcgcctccccattcatgtgcccacatctgtccccccagcaaaccgctgcaagaaggccccagtgaagagctgcacggagtgtgtccgtgtggataaggactgcgcctactgcacagacgaggtgaggacctggcccgggttggtgtggaacaggcaagggtcgggaatagctggtggaaatgaatctagggttggggcagccagggaatgggtgctgccccccagtgaccccctgtccttctggccagatgttcagggaccggcgctgcaacacccaggcggagctgctggccgcgggctgccagcgggagagcatcgtggtcatggagagcagcttccaaatcacagaggtgcctggtgtggggactggggtgggggctccccatgctcagcctggctatttatgggggtgtatagtgccccttggccgggctgggcccccatcgggcctccggagtgaccctctagccagctgtccccttccactggctgcaggagacccagattgacaccaccctgcggcgcagccagatgtccccccaaggcctgcgggtccgtctgcggcccggtgaggagcggcattttgagctggaggtgtttgagccactggagagccccgtggacctgtacatcctcatggacttctccaactccatgtccgatgatctggacaacctcaagaagatggggcagaacctgggtacggcagggccagagtggaggacagcagggcaggagggggacaggtgggcgtctgcttgggaggccaggactcaggacagctgcacccacccagaaggaaacactggacatttgagcccccaaaaaccttcccttccattctcaagggaagaatctcggtcagaccctactcaccactggggacttctgagaaggcccagggcaggcgggcagtggagccatctggccctgacaaggagggcaccccctgccacgaggctgtggggaagcttctgctcctcagagctgggctgcattcccagccaccctgcccttgctgtacgcataactccagacccccagtcccatttccctcatccataaataggaacagacaatgttgtgagcatgaacctttgtccagcatgcaaagcgttaacctccctcttcctcccttctgagccagcccttggtggggggcccgtgtttatgccaggcatcagggctcagctatcccctctctgtccttttgacatccagctcgggtcctgagccagctcaccagcgactacactattggatttggcaagtttgtggacaaagtcagcgtcccgcagacggacatgaggcctgagaagtaagtgactgtgtgggtcccgcaggtgggcaagggtccaggccatgtgacccccactcctctttcacccacaacttaaaattatccttctacggctgggcacggtggctcatgcctgtaatcccagcactttgggagaccagggcgggcagatcacctgaggtcagaagttcaagaccagcctgggcaacatggcaaaaccccatctctactaaaaaatacaaaaattggctgggcgcggtggttcacgcctgtaatcctagcactttgggaggccaaggcgggtggatcacgaggtcaggagatcgagaccatcctggctaacacggtgaaaccccgtctctactaaaaatacaaaagattagccaggcgtgatggtgggcaccggtagtcccagctactcgggaggctgaggcaggagaatggcgtgaacccgggaggcggagcttgcaatgagccaggattgcgccactgcactccagcctgggcgacagaatgagactctgtctcaacaaaaaaaaaaaaaaaaaaaaaattagccaggtgtggtggtgggcgcctgtaattccagctacttgggaggctgaggcaggagaatcacttgaacccaggaggcagaggttgcagtgagccaagatcgtgcataccgcacaccagcctgggtgataaagcgagacttggtctcaaaaaaaaaaaaaaaaattctccttctagttgaaacgagccaggggcactggggtctgcggcgtcttccccctgtgacactctctctccctcccacctctgcccaggctgaaggagccctggcccaacagtgacccccccttctccttcaagaacgtcatcagcctgacagaagatgtggatgagttccggaataaactgcagggagagcggatctcaggcaacctggatgctcctgagggcggcttcgatgccatcctgcagacagctgtgtgcacggtgggcactgggaagggtgctgccagcctaggccaggggtgagcacttctgggcaagggcctgagctgccccctggcctgctctggtgccaggctcacaggccctgagggaaagcctgggagcctgcaaccccttcaccctgagacaagctcagactctgtgagtaggtctcagttacaatctgagttcagatgtgcctggagccacggtcccctggcctgagcagtcacagcctggtttcgtatcagctaccaaggcagacctgggctttagcgttctggaatctttagtaccctgaacccaccagctgcccagactccacctgttctgggcatccaaataagccatttcctttgatatgtacatccatttgttcattctgaaaatgacatacccatattactaggttagaaaacaaagagctagccaaggcgtggtggctcacacctgtaatcccagcactttgggaggccgaggcggggggattgcttgaattcaggatttgagaccagcctgggaaacatggcaagaccctgtctctacagaaaacacaaaaattagctgggtgtgatgcacgcctgtggccccagcgccttgcgggggccgcatctccagctcctgtttctcagcgttgtcactcagtcatgtgccgtcagatgcatctttcatgagggcacttgctgtgaatccagtggcttaagcccagccccatgttgggacccgcgttccccgtcctacacgacgccgtgatgcgtgtcagcaggcagcctgctcagtgggcacgccccgccttgccttccccagagggacattggctggcgcccggacagcacccacctgctggtcttctccaccgagtcagccttccactatgaggctgatggcgccaacgtgctggctggcatcatgagccgcaacgatgaacggtgccacctggacaccacgggcacctacacccagtacaggacacaggactacccgtcggtgcccaccctggtgcgcctgctcgccaagcacaacatcatccccatctttgctgtcaccaactactcctatagctactacgaggtgcggggcccaggtcccacgggtgggaggtggtcaaggtagggggtccatggagcttctcagacacctctccctccctccctccctccctccctcccttcctcccttcctccctccctcttttcctccctttccttcctcccttcccaaagcctttagaccccccaaaatgtgggccctagtgggaaggggaggtcatgtgcccatcttccaccccaactcccaagcaggtgggggctaagagggcaggctctgcgacaccacagtaggttccaggcctcagtttccccatcctcaaagtgggaagaatcctagagctgttcagattcatggagatgcttagcctgagacctggccttctctcccgcagaagcttcacacctatttccctgtctcctcactgggggtgctgcaggaggactcgtccaacatcgtggagctgctggaggaggccttcaatgtgagggcagctcaggctccagagtctgagcccttctggggcagggcaggaagtgggcagggtgggcaagaggtgtcttggatcacggtggagaaatgggtctgggacagaccagtgaggaagggtctctagctatccctgaggccccgaggggccacctgggcctggccctggctcctgcaggctctgtgataccccgcatgatgccagccacacttggaggttggggtggagcacagaggccccccacagagcactgatcaacctccttcctcctttagcggatccgctccaacctggacatccgggccctagacagcccccgaggccttcggacagaggtcacctccaagatgttccagaagacgaggactgggtcctttcacatccggcggggggaagtggtacgcctctgtgggggcagcggggtgggggataggcacagcgccccacaccgagtggaatcgtttaaaacagcggtcaagagcgtggcccctggagtcaggcaggcctgggtgcagatccctgggcctagccgctcggatgagcctaggttgctcctctgcttgttggtttcctcggcatgcaagcgtcgagcccggaggcttgctggggcagtaaatgggttagtgtcacgaagcccagaggccctggccactgtcattgtcgctatgattgtgactgcgctgggaaggagggagtttccagccctgagggaggtgagcaggagctcatttcagggatccagacatctcctaggaacttgggggccgagggccttcaggcatcgatggccccctggtccttggggctgggcctgccttggctgaccacggggcccctgcagggtatataccaggtgcagctgcgggcccttgagcacgtggatgggacgcacgtgtgccagctgccggaggaccagaagggcaacatccatctgaaaccttccttctccgacggcctcaagatggacgcgggcatcatctgtgatgtgtgcacctgcgagctggtacaacgcagccccgcagggcgggaggggagagctgagccaagcacccagggaccctgaggaatgaagcaggactcctgtgccccatatcccttgtggggtttcccgaggcacacaggagagcggaagtgtccagtggccccggtcctgctcccccgacgcaccccaccatggtctctctcattccagcaaaaagaggtgcggtcagctcgctgcagcttcaacggagacttcgtgtgcggacagtgtgtgtgcagcgagggctggtgagtggggaagggagttgggcacccaggacaccagtggcccctgatgggaaagctgggctcctgcaggggcctggccctgggtgcaccttgtacacctggctgggggtggggcggcaatcaaagaaacggctaagggcggggcacacccagttgttggtcaaacccaggtcaaagcactttgaaatacagagatatatgggctgtctctagaaagaggtgtgaggattgagacggggttggctgttggggctggggtctggatcttgggggacaggcacacgaggcttcctttttgctccatgcctttggtattctgagtcctgtgtcatattgcctgatcagaagagagctcgtaaatgcacggcagtaagggctttagcttcaggacactgggcgagcttgccacaacttgaggcagagcagtggggaaaggacactggaaggggtgacatgacagggcactggggtttaggtctcagctcagccacttctgtctgcatgactgggagctgcctcggccctctcagagcctcagtttcctcatctgtaaaatgggacagcaggccaggcgaggtggctcacacctgtaatcccagcactttgggaggccgaggtgggtggatcacctgaggtcaggagttcaagaccagcctggccaacatggtgaaatcccatctctactaaaaatacaaaaaagtagctgggcgtggtggtgcatgcctgtaatcccagctactcgggaggctgaggcagaattgcttgcacctagaaggcggaggttgccgtgagctgagatcgcgccactgcactccagcctgggcaagaagagcgaaactctgtcttgaaaaaaaataaaataaaataggccaggcgcggtggcttacgcctgtaatttcagcactttgggaggccgaggtgggcggatcacaaggtcaggagatcgagaccatcctggctaacatggtgaaaccccgtctactaaaaatacaaaaaattagccgggcgtagtggcgggtgcctgtagtcccagctactcaggaggctgaggcaggagaatggcgtgaacccaagaggcagagcttgcagtgagccaagatcgcgccactgcactccagcctgggcgacaaggcgagactccgtctcaaaaaaaaaaataaaataattaaattaaattaaattaaatgggacagcaaaagccccagctttcctcctgggctgtttcggggaatgaccagttcctccttcaggagtggccagacctgcaactgctccaccggctctctgagtgacattcagccctgcctgcgggagggcgaggacaagccgtgctccggccgtggggagtgccagtgcgggcactgtgtgtgctacggcgaaggccgctacgagggtcagttctgcgagtatgacaacttccagtgtccccgcacttccgggttcctctgcaatggtgagcacaacaactgcggccaatgctgatggcggggtagggagtggacagcaagcatgactttcccgtcaggacccaggttgggagagccagacttggaatcagaatccccaagttcaggcccagcccactctggatgccctgagggccgcccctgagtcctgccccaacctgggcctgacttccctcatctgtaacgtccatgcccaaggtcactgttggcaggactttcccctggttttaagattccaactcccctgaggttctctctggaagttcagttctatgcccaccccacttctccacacccctatctcattagagtgggtgccacccagctcagccctccaatggctggcaggtatatggcattatgatctttcctctctccaaagatgctaaatttctgtgggttttttgttgttgttgctgctgttttttttttttttttttttttttttgagacagagtttcactcttgtcgcccaggctggagtgcaatagcacaatcttggctcactgcaacctctgcctcctgggttcaggcgattctcctgcctcagcctccctagtaggtgggactataggcatgcaccaccatgcccagctaattttgtatttttagtagagacagggtttcaccatgttggccaggctggtctcgaactcctgacctcaggtgatctgcccgcctcagcctcccaaagtacacatctgtaatcacacctgggattacaggtgtgagccactgagcccggcccaaagatgctaaatttctacctggaaggcctggagcttcctctgtattcccatgggtccaggccataggcatacagtctggccaggaacatcagagctgggcaggatcacagaactcagacaaggggacatagggaaggattggtagttgaatggaggaggatgaatgaaaatctactcatcaaatacttatgaagccctcactgtatactttccaagcccctgcttttctactctttcttctgttcttgcttttgttcaccatttcttctcttcgactgtctgtccctgagtgtgctcagagaaacagaagagagaactgggcaccactggagaaaggcagacaagtggcacagagggaggtatgagagaggaagggaggaaggtgcctctggggaaggaggcagggccagagtacaaagggcttcggttctagtccagagcaggacttcatcctttggacaaaagggggtcactggaggttttactttcattttctaactatttgcatattaaccttgtatctagtcaccttgctaaacgcacttatgaaatctaataatttgtctgtagattcttctggatactttgtgacatgttcctcacacttgcaaataaagacaattttattgattgattgattgattgatttttgagacggagtcttgctctgtcacccaggctagagtgcagtggcatgatctcagctcactacaacctctgcctcccaggttcaagcaattctcctgcctcagcctcccaagaagctgggattacaggggcccaccaccaagcccagctaatttttgtatttttagtggaaatagagtttcaccatgttggccaggctggtcttgaactcctgagctcaagtgatcctcccgcctcggcctcccaaagtgtgggattacaggtgtgagccaccacgcccggctgacagttttatttcttttttcttttctttttttttttttttttttgagacggagtcttgctctgtcaccaggctggagtgcagtggcgtgatctcggctcactgcaacctctacctcccgggttcaagtgattctcctgcctcagcctcctgagtaactgggactacaggcatgcgccaccatgaccagctaatttttgtatttttagtagagacgaggtttctccatgttggccaggatggtctcagtctcttgaccttgtgatctgcccgcctcagcctcccaaagtgctgggattacaggcgtgagccaccttgcctggacttatttcttaccttctaatgcttatacatcttatttctttttctgaccttattgcattggcagggacccattagaggttcttagccaggggagcaggagccacatgattggatttgttttgagataattactcaggctgcagagtggaaggtaggtaggatggaggcagagatggagggaaggagattccaggaaagtgaggaagagatgacttctaccccaggctagcggcaccctggctcccacagctctgttcccacaggccctccctgccaggtgggcagcctggactacaggcacagatgtagctctcatctcccttccttgtccctctctgcagaccgaggacgctgctccatgggccagtgtgtgtgtgagcctggttggacaggcccaagctgtgactgtcccctcagcaatgccacctgcatcgacagcaatggggtaggcctgggcataagacagacagtgtctgtcagcaccacccaccctctccagagagaaccctatggagagaggagagggagcaggcagggatggggcacagctggctcactggtgccccctcctaccccagggcatctgtaatggacgtggccactgtgagtgtggccgctgccactgccaccagcagtcgctctacacggacaccatctgcgagatcaactactcggcggtgaggctaagacctacgaggtgtgggcgtgggaacagggcaggcacagggcagtgtgggcaggaggggctaagcctgatgccacaggagctggccaagggcaagaggtttggggagcgggggtctggcagaggcccacccaacacagtgcctgtctgccccgcctttccccgccaagatccacccgggcctctgcgaggacctacgctcctgcgtgcagtgccaggcgtggggcaccggcgagaagaaggggcgcacgtgtgaggaatgcaacttcaaggtcaagatggtggacgagcttaagagaggtaggggcaggggctgagggttggggttgctgagagcctaggcagcgggcatccaacggggcaagggtgtcatcacctggacgggggcttgcagtctgggctaaggtcacacagtccggacaggaactccagagctgggagggaccacagaacccagatagaggacaccgaatcccagaaaagggtaaaagcctgagcaggaggcacagaacccaggcggtgggacacagtctggcccaggaagggaccaagagtcttggtgggaggcacctgacttgggcaggggcatgcacccagcaggggtacatggtcacgctgtggagacacgcagcctcccctcctcgagatcagatacgttttctggaccctgagttcctgggtgatgtccaggtcagggaagtgggggaggtaggtttctaggctctgatgctcctgagcaggggagcccccaccacacccgttcctgtgcctggtgagagcacggctttgcaaggacttccactcttccccaggaggccctgccgtgggtgaggcagatcgcagagtaggggccccctcaccagaccctgggtcctctggggcggaggggtgtggctggggtgccctgctgactggctgtgggtacagccgaggaggtggtggtgcgctgctccttccgggacgaggatgacgactgcacctacagctacaccatggaaggtgacggcgcccctgggcccaacagcactgtcctggtgcacaagaagaagggtgagctggtggggccgggcgcagggagggggcgtgtggccagagctcggtggggaggacaggcaccacctccccctgcctcctcctctccagactgccctccgggctccttctggtggctcatccccctgctcctcctcctcctgccgctcctggccctgctactgctgctatgctggaagtactgtgcctgctgcaaggtgagcacccagggtgcctcccaaggccccacatcccagggtccccaccccaacagggcccccaccctccaccagggtccccagtccccgcctgagttctcatctccccagggtccccaaccccttcctgggtccccacctccccagggtccccatcccaacagggtccccatcctccaccacggtccccacctccccagtgtcctcaaccccctcctgggtccccacctcaccagggtcccctctctgacagggtctccaccctccatcagggtcctcctcagggtccccaacccccaccagggtccccagcctctccacccaccatccccactcctgcagctttctagccagaggcttcagcccgtagagtccagctgtctggattctggtcccagctctgtgaccttgggcaaattacttaatctctccatgcctcagttccctcatctgtaaaatgaagatcatagaattgacctcagaaagtggagctgaagcttaaattagtgaagttcagaagggactgacccatagcatgcaccatcgcccccacccccaccttggcaagacccacaccaaccccatccagcttccggagtgacagtaatgatgatgacacccatgagctcttagcccgagtcatcctggagccccagcccccagctcagcccttgccagcatccgttctctgcttagctcagtgttcctctttgtgctgtcgccacagcatgtccacgtgactccatttccccgccccccatcaccccatgaggtcagtggggcaaggtcaccatgccctatgacagatggagaaattggggctgagaggcaggtgataaatgcacagtcctcagaaggggctgaggcaagctgagcccacatcttccccagctctagtgcccgcccaggacccccactccatcagccatcagtggccagatccctgagagcacctgctctggggtcagccacgtgcaaaaggcctgggagccacaacagggaagaaagggccctgcccgcccgcagctggcggtcactggggagaacagacaagagaaagcgtggaggatggcatagctcagagtagggattgtaggcggcagaccacactccgtagtaacccccagtgttgtgggatattaatgtgcattacataggcaaggagttatgtgatcaaataggtttgagctaggcacggctgcgcgtgcctgtagtcccagctactcagaaagctgaggcaggaggatcacgagtctgggagtttgaggctacagtgagctatgattatgccactgcactccagcctgggtgacagagtgagactcaaaaagaaaaaaaaaaagaaggtttaagaaacaagtttcttaaatttaagttacagtggctcacacttgtaaccccagcactttgggaggccaaggcgggtggatcacttgaggtcaggagttggagacaagcccggccaatatggtgacaccccatctctactagaaatacaaaattagctgggcatggaggtggatgcctataatcccagttactaggggggctgaggcaggagaattgcttgaacctgggaggtagaggttgcagtgagccgcgatcgtgccactgcattccagcctgggcaacagagcgagaccctgtctcaaaaaaaaaaaaaagaaaagaaacaagtttcttctctgcaggacttctcagaggctttgataaagtcctgtgcctaacctgcaagaggggcatggggaatgaattcagtgcttcccaagtgaacctgaccacagaacctttacagagcacccggcaggatgagagttccacggcgcaaactttgggaaccctctgcccccatccccctctatgcccttgtgtgccatgcttacaccctgctaccacctggatattctggtgtctggggaggcactgtcacccctcttgaccattggcatggggcggggtggctggaagggcttacctgggccagggcagctgtctcaggcctcaccctcacccaccttgtctcctaggcctgcctggcacttctcccgtgctgcaaccgaggtatgggcctggcatcgcaggggcagcaggggctctgactgctctttctctgagctggggtggagggaagctgaacctggaacggcagaggctggaggctctggggtcccacctgaagaggttgggctgtgcgggtctagggaggggtgccgtgctgaggaccccatcctgcaggtcacatggtgggctttaaggaagaccactacatgctgcgggagaacctgatggcctctgaccacttggacacgcccatgctgcgcagcgggaacctcaagggccgtgacgtggtccgctggaaggtcaccaacaacatgcagcggcctggctttgccactcatgccgccagcatcaaccccacagagctgggtgagggcggggctgggcgccacagctctgggcagtgcccttcgggccctctgttccagatctgggatcacagcatgcctcttctctgggtgtggggtgcaggcacagggctcagccaccttttgccctgtgctgatggtgctatgaacctcatgcctcggtgtgcgtggcctgctggccaggcatcccctgatcctagcatggttgctggagggatgctctgtggtgcctgtcatgcagggggctgaccacctccatctcaccccctcccaccgcctttccttagtgccctacgggctgtccttgcgcctggcccgcctttgcaccgagaacctgctgaagcctgacactcgggagtgcgcccagctgcgccaggaggtggaggagaacgtaaggacccaggaactaggcctggccggagatgtgggtatgagggcgggtgaggtgggcagggcagagcgaatgcggtcgtggtaccgagattcattaactaggggagaggggtctctctggacctgtgcctggcagggggcatcctgggatctgtttccagagggcagaaggccagagcctgggcccaggatgctgccccacggggcatgccccagccaaccctgaggatctctgggtacagaggctgcctggctccctgggtccccagcctgagggcttgccacggggtggcctaggcccagcctcacgcccctcccttgcctggcagctgaacgaggtctacaggcagatctccggtgtacacaagctccagcagaccaagttccggtgagtcccggggtgcccgggttgggtgggggagccgctcctaccgggactccaggagccgaagcccccaggccgatcaggcctccacttcagggctatctagctcacagcgccctctttgtccccacaggcagcagcccaatgccgggaaaaagtgagtagaagactcgtgggtgagagggcccccacttcctgcccgcctgtccccagcccagccactgcctcgtccgtccctactccatctccatcccataggaagggagggtcagatgtgtccgtcaggttcggaccttcattcgttcctttgaccatttcttcaacaaatgctaatgtgaagtgcttgctatgaagtggcccctggactagagcaggcaaaagcaaatcaacccagtccctgccctcatataggtgactgtccagccccccacccggtaccagcgatagcaggtacccatctccatccgctccagtgtccaagaccctgatcttgggtgcacctctggggaccaggcaggttaccgagaggatgggccagcaggtcacacaccttttttcccaggtcctacatcgagtcctggcccttcatggggagagagagggagtgaggagggggtcttgatgcagggacagaagagctagaatctcagcacatgaccatcagtaagaaccgttggctgtgcgtggtggctcacacctgtaatcccagcactttgggaggctgaggcgggtggatcacctcaggtcaggagtttaagactagccaggccaacatggtgaaaccccacctctactaaaaatacaaaaattagccaggtgtgttggtgggcacctgtaatcccagctacttgggaggctgaggcaggagaatcccttgaacctgggaggcagaggttgcagtgagccgagattgcgccactgcactccagcctgggcgactgagtgagaatccgtcttgaaaaaaaaaaaaaagaatggctgaccagcatttcttatcctgctacgggccaagcattgtcctaagggctttccgtgtgtggtcatcttatccaaccctctcgtcaagcctgtgaggtagagatcactgctgttcccattttgcagatgaggaagctgaggctcaaaagggttaagtgacttgcccaaggttacccagctatcgagaactagaaccagggctagggccgcggcagcctggcctgagcacacacacccttagcatctttgctgtccagcccttgatgaggtgggcagagaagcccatttcacagaggaggacgctgaggacagggaggcgccatggctgggctgaggctgcagggtaaagggtatggggctggcataggcctggagcactgcctgcctctgaagaccctgcacttcttgctgtcttacatcctggcccctgaaggggagaagacaggcaggagggacagggcagcaggtgccagcctgacccctccgctgcctgaaccttccaccctcgacccaggcaagaccacaccattgtggacacagtgctgatggcgccccgctcggccaagccggccctgctgaagcttacagagaagcaggtggaacagagggccttccacgacctcaaggtggcccccggctactacaccctcactgcagaccagggtaggagggcgggtccgctgtgccactgcctcgcacctcccgcctgtgtggccctgtgacccacctctgaccacctccgaacccccacccagacgcccggggcatggtggagttccaggagggcgtggagctggtggacgtacgggtgcccctctttatccggcctgaggatgacgacgagaagcagctgctggtggaggccatcgacgtgcccgcaggcactgccaccctcggccgccgcctggtaaacatcaccatcatcaaggagcaaggtgggtctgggtggggagagtggggaaggcagacgggggctcgggggcactggttcctcctgcttaagtggaattgcgacctggccacgtggcctgggctagtcacttaacctctgcaagccttggtttctccatctgtaaaatgggtaagggctcttttacggaatgcgtggctgttcacctcgccacagtgcctgcctggtggtgagcgctcagtaaatggaagcttctgttgcatcctcataagggccagccccttgctcctctctatctagaaaaagggttggccaaggcatcacaccgtggacatctgacccctcctcccacctgtgccggaagccacaggcctcaggcctgttcctgctctcctccagccctggggctgaaggctccatctctggtcctgcccgtgactggcctccctcctctgcctggcccttccaggatgtctgctggacactttgttccagaaccacttttttttttcttgggacagagtcttgctctgccacccaggctggagtgcaatggcaccatcttggctcactgcaaccgctgcctcccaggttgaagtgattctcctgcctcagcctcccgagtagctgggattacaggcactcgccaccacgcccagctaatttttctatctttagtagagatggggtttcgccatgttggccaggctggtctcgaactcctgacctcaggtgatccacctgcctcagcctcccaaagtgctgggattacaggcacaagccactgcgcccggcccctcatctttttctggaaggattttccgtttcgctcctgtgcccttcccagagggcaatgcatagagggaaccaagcggactcctggattctgggctgggctgggcagggtcacaggagagcaggaggtgggaagggactgggcccagcacactctgacaaatgcccgggctccttgcagccagagacgtggtgtcctttgagcagcctgagttctcggtcagccgcggggaccaggtggcccgcatccctgtcatccggcgtgtcctggacggcgggaagtcccaggtctcctaccgcacacaggatggcaccgcgcagggcaaccgggtgaggctgcgccacagggtcgagggtgcagcccggggggctgcgtgggcaccgcattgggttcccaagacaaagcagcacatggcagctgcttgagtccctggatactggccgtgcccctggctggcctcccaaggacacgtccacctgctcctgccaccctgtggcaggggagtctcacctgcccagggtgccagtgacacgctggatgaggctccattgctgccagggactcaggccaagagggctcgctcttttttttttttttttttttttgagacagagtttcgctcttgttgcccaggctggagtgcaatggcacaatctcagctcaccgcaacctccacctctcgggttcaagcgattctgctgcctcagcctccctagtagctgggattacaggcatgtgccaccacgcatgtctaattttgtgtttttagtagagacggggtttctccatgttggtcaggctggtctggaactcccgacctcaggtgatccgcccgccttggcctcccaaagtgctgggattacaggcgtgagccaccgcgcccggcccaagagggctctttcttccttcatgggccagggacctgcccagaccattcctgtcccctcctacaactcaggatccacagggtagccaaacctcttggagataaactccccctatatgccccagtccagggggctttgggtttcttgagctgggatcgaagaccccatgtccccaggccagactccccaagggctgtcacaatttgccaagcagcaggagcaacccttcaaggcagggagtgccatggctggaccagcatcaccttcactgctgagccccagtgctggggtacagccaaatcaggtggcacacaggctggactgggtttacaggcttcatagttttgtttcttttgttttgtgtggggattttttgcttcttaatttttgggggagacagggtcttgctatgttgcccaagctggtcttgaactcctgacctcaagtgatccacccacctcggcctcccaaagtgctgggattacaggagtgagctaccacgcccggcctagtttttgtatttttagaagagatggggttttgccatgttggccaggctggtcttaaactcctgatctcaagtgatccgcccacctcggcttcccaaagtgcagggattacaggtgtaagccagtgcacctggcctttctagtttttaaatgttggcaacaaatccataattaaaaacaaaggcggggcatggtggctcacacctgtaatcccagcactttgggaggctaaggtgggagaatcacttaaacccaggagttcaagaccagcctaggcaacgtggtgagaccatgtctatacatataatttaaacattagctgggcatggtagtgcatacttgtggacccagctacttggaaggctgaggcaggaagatcacttgaggccaggaggttgaggctacagtgagccatgttcatgccactgtacttcagcctaggcaacagagtaagaccctgtctaaaaaaataataataattaattttttaaaaatcaaacaaaaaaacaaagaaacaaaacctggctcagtgcagtagctcatgcatgtaatcccaacactgtgggagggcacagtgggaggatcacttgagcccaggagttgcaggccagcttgggcaacatagtaagaccctgtctctattttaaaaaaataataataataataaaggccaggcgaggtggcgtatgcctgtaatcctagcactgtgggaggccaaggcaggtggatcgcctgaggtcacgagttcgagaccagcctggccaacatggtgaaaccctgtctctactaaaaatacaaaaattagctgggcatggtgacacgtgcctctaatcccagctacccgggaggccgaggcaggagaattgctggaaaccaggaggtggaggctgcagtgaaccgagatcatgccactgcactacagcttgagcgacagagtgagactctgtctcgaaaaaagaaaaaaaaaattatctcaaaagtaataaagtctcgcctccctgggcccacaggcccattcagcaaacataggggagcgcgtagtcagcaggcccgggctgcctggccacatcctaattttatttacttctttttattgacaggaactgttctcattatttttccaatgtccccccataaaaattccaaagaataatttttttcttttaagagacaaggtctccctctagtccagggtggagtacaggggcacagtcctagctctctgcaatcttgaactcctgggctcaagcagtccttcaacctcaacctcccaagtagctgggactacagatgtccaccaccgcacggctaattttgtatttttttttctttgagacggagtctcactctgttgcccaggctggcgcgatctcagcttactgcaacctccacctccagggttcaagcgattctcctgcctcagcctcccaagtaacagggactacaggtgcgcaccaccacacccagctaaattttgtatttttagtagagacggggtttcaccatgttggtcaggctggtctcgaactcctgacctcgtgatccgcccacctcagcctcccaaagtgctgggattacaggcatcagccaccgcgcccggccattttatatttttagtagagatagggtttcgccatgttgcccaggctggtctcaaactcctaggataacatgatccttttgccttgccttctggctaccctgttacacttgtataaagatgctttgaggctgggtacagtggctcatgcctgtaatcccagcactttgggaggccagggcgggcagatcgcttgagatcaggagttcaagaccagcctggccaacatggcgaaaccctgtctgtaccaaaaatacagaaaattatctgggtgttgtggtgtgcacctgtggtcccagctactcgggaggctgaggtagagcccagtaggtggaggttgcagttagccgagatagtgccactgcactccagcctgggtgacagagtgaaacccctgtctcaaaaaaaaaaaaaaaaaaaaagctttgatatttgttttttaaaacattttaatttctcacctttttatttttaaaaacttcaacttacagaaaaatggaaggaacagtaaaactagcacccatttaccctttacatagattcaccgattgctaatatttgctttctctctctttctatatagatagcaacatagaaatataaatagagatgtggacatctgtatcttcacattgattatactagtacctaaaattagtccatattccagccaggcgtggtggctcacacctgtaatcccagcactttgggaggctgaggcaggtggatcacctgaagtcaggagtttgacaccagcctgaccaacatggagaaaccccatctctactaaaaatacaaaaattagccgggcatggtggcacacgcctgtaatctcagctactagggaggctgaggcaggagaatcatttgaacccagtgggtggaggttgcagtgagccaagattgcgccacttcactccagtctgggcaaaagagcaaaactccatcccaaaaaatatataaaataaaataaaataggtccatattccaatgtccccttgttcggatgtcccaataatgtcctttatagcgtttttccccccaatgcaggaactaatcaaggatttggcattgacttttgtcacgtgtcttgactcctttaatctagaaaagtttcctggctttgtcttccgtgacactgacttttgttaagacaaggtctcgctctgtcacccaggctggagtacagtgcctcactgcaacctctgcctcccgggttcaagcaattctcctgccttagcctcccgagtagctgggattacaggcaccggccaccatgccgggctaatgacactgacgtttttgaagtatccatgtaggttgcttgcaggcagctccctggtttgttttttgtttgtttgttttacaactatgggtctcactttctgagttgggtggcatgaggttgcctccccagccatcgccctggctgctgcgcctggaattgaaatcttgccctgaagtgccacctagtggtcttctatgtgaaggattttctttttcctcccagttcttatcctggaaagctcaggcatgctccacggcactgaaaggaagatgggtggctcacgcctgtaatcccagcactttgggaggccaaggtgggcggatcgcttgaggccgggagttcaagaccagcctaggcaacatagggtaaccgtgcctctacaaaaaaaaaaaaaaaaaaaatagccaggtgtggtgcacgcctgtagtcccagctactcaggcggctgaggggaaggatggcctgagcccaggaggtcaaggcttcagtgagctgtgattgtgcccctacactccagcctgggtgacagagtgagaccctgtctcaaaaacaaacaaacaaacagaaacgtggctgggcatggtggctcatgtctgtaatcccagcactttgggaggccaaggtgggaggatcacttgaagtcaggagttcgagaccagcctggccaacatagtgaaaccccatctctactaaaaatacaaaaattagctaggcgtggtggcaggtgcctgtaatcccagctactcaggaagatgaggtgtgagaatcatttgaacctggaaggtggaggttgcagtaagccgagatcatgccactgcactccagcctaggtgacagagtgagattacgcctcaaaaaaaaaaacaaacaaaaaaaacacaaaaacctgaacctcgtgtaagtactccacccagcaagcagggatggtctctgcagtgtccatgaggttgggagggagcgtgtggccatgactcttgcctcagcccccagccatgaccctgaccctgaccccctccactcccaggactacatccccgtggagggtgagctgctgttccagcctggggaggcctggaaagagctgcaggtgaagctcctggagctgcaagaagttgactccctcctgcggggccgccaggtccgccgtttccacgtccagctcagcaaccctaagtttggggcccacctgggccagccccactccaccaccatcatcatcagggacccaggtaggcagagcctgggggtcggcttaagcaggaggagagggaagactggggggtctctcaactaggtctgtcagacttagcaaatccaaacacaggacgcccaggtaaatctgaatttcaggtaaacaacatacacgttggtaggataagtatgtcccatgcaatatttggaacatacttatccttttttttgcaaaatgggctgggtatactggctcacacctgtaatcccagcattttgggaggccaaggtgggaggatcacttgagcccaggagttctagaccagcctgggcaacatagtgagacctcgtctctacaaaaaataaacaaattagcttggcatagtggtgtgcacctgcagtcccagctattccggagactgaggtgggaggatcacttgagcccagggggtctgggccgcagcaagctgtgatcgcaccactgcacagcacctgggccatggaatgagatcctgtcccccaagaaaaaataatcttgttgtttatctgaaattcaaatgtaactaggcatcctgcattttatctggcaaccctacagctagagaggctgttgtcaccacacaataggaattctcccatcagaccctggccctttggcttcagcctcaattccaactaacatgcagatgcttgtggaaggaaggagtgggccagttagttcctatcagccctcagcctcccaactgggagaaagcctgccaggaagatgggagaggagggagatactcagggtacagtgtggagatggggtggggagcaaatgttctcatgtggaatgttccctgagctgccaagggagaaaggggcagaccaactccctcccgcttctgttcctccagagaccctcctgggtcctccgccaagcttggcaggatgctctatgtggcagcaatggggcaccaccaggtctccagagacgcgggtgggcaggtctgagttgaatgcgctgggtagagcgccctgggtgttgaagtgggtctctggcgccccctggtggtgaagggggatctgagtggttgcccggccccaacctgacccgttagatgaactggaccggagcttcacgagtcagatgttgtcatcacagccaccccctcacggcgacctgggcgccccgcagaaccccaatgctaaggccgctgggtccaggaagatccatttcaactggctgcccccttctggcaagccaatggggtacagggtaaggcggggggctgagggtcacgacaggtggatgggcggtctggcaccagcactcacagaagaggtgggccgtccaaggccagggccccctgagagagagcagacagtggaacctagcacaggtggtcagagggaaacccggtctgtgctgggaaagagggaagacccattcctgagtttatcagacatttgccctccttcctagaatggggccccctcccacccccgcatgggagatacccccacctgctctgccctagtcctgacgtgtgcacatggcagatctctcagcccctccctcgggcctcatctgtgcaaagaggacagtaagggcagaggtcagaggagggacaggcagcttgggtgcctgctgctccctgctgaccaggacccctgtccctgggggtaggtaaagtactggattcagggtgactccgaatccgaagcccacctgctcgacagcaaggtgccctcagtggagctcaccaacctgtacccgtattgcgactatgagatgaaggtgtgcgcctacggggctcagggcgagggaccctacagctccctggtgtcctgccgcacccaccaggaaggtgaggcctcgccatgtctgtccatttgtcccctggctgccctgatgccagcatgcccagacctccctccctctgccactgacagcactcttcctgtattccccgctccctagtgcccagcgagccagggcgtctggccttcaatgtcgtctcctccacggtgacccagctgagctgggctgagccggctgagaccaacggtgagatcacagcctacgaggtctgctatggcctggtcaacgatgacaaccgtaagaaccagatccttctttcctgcccacagggagaacagccatggaaggggaggggacaaagctggagggagctcttggtcactccctggacctgctgtgcagggcactcgaggccttcatcctggtcagcggataagcctgaggcatctttagggttttggccagatttgggctgggttgcattctaagaccaaacccagaaggttgcagggtgggtggttacctatgtggagtgaggtcacaggcccaggggtacccctccccatgcaggtaaccagggagctcacacgtgcatggttttcttagggtgagaggaaagttaccggatttagcaaacagaaatacaggaggttctgaatttcagatagcactttaaaagattattttgtacattgagaggccgaggcaggtggactgcttgaggtcaggagttcaagaccagcctggctaacatggtgaaaccgtttctactaaaaattagacaggcatggtggctcatgcctgtagtcccagctagtcaggaggctgaggcaggagaatcacttgaacccagaaggcgcaggttgcagtgaaccgagatcgtgttaccgcactccagacagggtgacagagccagactccgtctaaaaataaataaataaaaaggattattttatacattattttatctagcagcccgagatcagaggtgcctagcagaacagttatttctccagtcctggaagggaggcagggtgggcaacccctatgcgtgcccttgccttgtgtggaggcaccgtggatatatgggtagaggtgacatcgaggccaacttgagtccagccctggctctgccacttactcagcagagtcccttggaggactggtgacatatgtccacgccagtcatgctgacgctcagggctccgcaggcggcaattcagcagtggctggctttgccttgcttccccagcccctgggtgccatccaggggatgcacggccgtcctgctgtgtcaggggtggtgttgggaccaggctgggacctgggtgaccctctgaagcactctctctgccccaggacctattgggcccatgaagaaagtgctggttgacaaccctaagaaccggatgctgcttattgagaaccttcgggagtcccagccctaccgctacacggtgaaggcgcgcaacggggccggctgggggcctgagcgggaggccatcatcaacctggccacccagcccaagaggcccatgtccagtgagtggtgggcagggaggtgaggggcagaccgggcaggggggcagggggcagcagccagggccctggctcactcccctgccctgcagtccccatcatccctgacatccctatcgtggacgcccagagcggggaggactacgacagcttccttatgtacagcgatgacgttctacgctctccatcgggcagccagaggcccagcgtctccgatgacactggtgagtggagacctgggacccacaagaggacagtgggggtcttgggtacagagtgagtccactgggtccagagagggcaaaggggccagcaactagaggacatggaggttaaggcagccttggacaaatgcaatggagtgcacatctgtgcatggggcacaggaaccagtgcctgggggacagacacacacagccttgtgcaagcgcacatgagttcatgcccacgggaccacgaagaaacacagcttcacaagttgaaggttcaccagctgtgccatgcacacaggacactcaggccaccccccaggggcaggcctggcccaggagccctgggcagccaccaggcggccacctggcaggggtaggggagccaaggagacaagaacacccccaacagctctgtccttcctccttgattcccagcacaaagtgctgcggagcccttagctgggcctcctgagtgctcagtgtcagctgtggctccacctgtgggacatcagatgaatcactcatcctttccatgcctcacttttctgctctgtataatgggataccaatcacacagtaccatgagtggaaaaacctctggggcacgtatatcttttgtattttcttctgtccctgccgatgcctcaagctgcccccggtgaacacatactggcccccacggggctcagcttgggcttaaggagccattttgaggggttcaggtggagcgcagctggtgtgactctggaaccccagctcagctgcttctaacactacctgcgaagcgctcggtggcttgcggaacggtccctgggaggcgggcaggggcaagattcctctctccattgtacaaacgggaaactgagtctcggagaggttaagtaaagcaagggagacctcacagctggtgacagagcccagacttcccccaggtttctggcgggtccgggggtctctcctccccagctgtgccgaggctgcactcgctcatctggaaaggcttcagccgcgcaagggtttcacctgccgcggccttcccgctccggccgtgcgcatctacccccgcccccaacacacaccccgggatcccgggagctggagacgggctcccctcgcagagcctacggccttcccccgcctggccctgctcggcccggcgccccccggcggtgccaacgcggcccttcgttgttcccaaggctgcggctggaagttcgagcccctgctgggggaggagctggacctgcggcgcgtcacgtggcggctgcccccggagctcatcccgcgcctgtcggccagcagcgggcgctcctccgacgccgaggcgccccacgggcccccggacgacggcggcgcgggcgggaagggcggcagcctgccccgcagtgcgacacccgggccccccggaggtgacaggctcacccgccgccccccgatccgcgcccacccagcctcactcgcgcctgagggcctggggtgggcgtctgcgctgcctcgggggccccagtttcagccaggcccgggccttggcggctgggagcacagctgctcagaggcagggcccagtgccaggggacgcgtgaggcaggcgcttgggcccttatggtgcctgcctggccagggggtgcaaattcagaagtctgcccgggaagcggaccctggcacccaagtagacccctcaggggcctcaaaggacaggagggaaggcttggggatctccccagggcagagctgactgcagacgcagcaaacccccgccactgccagggtcagcagtgctcacaccgatagagtggccggccagaggatatgggctgtggaagcctgggtggcccttgggctcctgcagggacagagggcctctgtccctagtggtttgagggaaactggttgtatttaagcaaaagccacccagagggtgggtgaccaggaatgtgcagggcccagcctgccccacggggcccgggtctggggcaggcctgaccaagggaccctgctctccccctgcagagcacctggtgaatggccggatggactttgccttcccgggcagcaccaactccctgcacaggatgaccacgaccagtgctgctgcctatggcacccacctgagcccacacgtgccccaccgcgtgctaagcacatcctccaccctcacacgggactacaactcactgacccgctcagaacactcacactcgaccacactgcccagggactactccaccctcacctccgtctcctcccacggtgagtgacctcagccaaccctgcctctcccactaacccttcctctcttccagctcctggagcctcgggcttctgtctgctgtccccaccgcccattctccaacatacacacacgcatgcacacatgcacgcacacacgtgcacacgcatgcacacatgtacacagacatgcatgcgcacacgtacacacatgcatgcacactccctgctcctctcactcttgttttgtcctgccctaggcctccctcccatctgggaacacgggaggagcaggcttccgctgtcctgggccctggggtcccggagtcgggctcagatgaaagggttccccccttccaggggcccacgagactctataatcctggctgggaggccagcagcgccctcctggggcccaggtagtacaggggtggccatcctgtctccacagctgtcctgctccatctgtcatccagccaccatagcagccgccagctgtgcccactgcttcccctccattccatccacaggacccccgcctgcccacaggcgctaaccacctgccctaccatcagtgctgatgcctaactctgcctctgccctcccagggggcggggctggggctggggcaggagaggggccaggccagctgagcagttgagggggtggggctggcagactcacggggctcactctcttttggcacaagcagggcctgcaccctgctggaggatgtgcggtaggtgctgggcagcctggacagggtgttgcagggtgagtgagttgtccagccagcggtcagtgtagacatgccagctgagggagggaggtcagggggcagcactgtgactcccactgagaccctagcccctgcatctctggctgactgcggcctcctgtccccagactctcgcctgactgctggtgtgcccgacacgcccacccgcctggtgttctctgccctggggcccacatctctcagagtgagctggcaggagccgcggtgcgagcggccgctgcagggctacagtgtggagtaccagctgctgaacggcggtgaggcatggtggctgccaggctgcggggtgcagccctgcaaggcctggccccagtgtgacacatagggtacctcagctgtgtcaggaacccacccaagtcccttgagcgctaaagcccccatccagcctgagagggtctcccaccccattctccaccccacttctttgcctcccctcttctgaggtctcacccacctccctgggcctctctcctggtcattctctgctaggttttgcctaacaaggcccctttgggctgggatcctagggcctctgctggcctgagatgcctttgggggaacaaggaagtggcacttccctgggcaggcacattcaaagcagcatgaccaggatgcaggatgttgcctaaacatgagtgggattacaggctccactcttgtatagtacacaatctgaacaaccagccataccatactgtacccaacctgtacccaaaccacagctagtcctgggtgggtgataactaggtctcgatggcagcttagggacgaggaggatcaggccaggggtgggagtaacactgcactactgtgtgcccccacctgatccccccaggtgagctgcatcggctcaacatccccaaccctgcccagacctcggtggtggtggaagacctcctgcccaaccactcctacgtgttccgcgtgcgggcccagagccaggaaggctggggccgagagcgtgagggtgtcatcaccattgaatcccaggtgcacccgcagagcccactgtgtcccctgccaggtgagttgcctcccccagccccagagctgcccccatcatgcccaccacccacccacaggctgatgctcttcctctactgcccccaggctccgccttcactttgagcactcccagtgccccaggcccgctggtgttcactgccctgagcccagactcgctgcagctgagctgggagcggccacggaggcccaatggggatatcgtcggctacctggtgacctgtgagatggcccaaggaggaggtgctgcccaccccgggggcaggagtggccaggggaggggtaaagagggggccgcagacgctgaaggcatcttccctgctcagggccagccaccgcattccgggtggatggagacagccccgagagccggctgaccgtgccgggcctcagcgagaacgtgccctacaagttcaaggtgcaggccaggaccactgagggcttcgggccagagcgcgagggcatcatcaccatagagtcccaggatggaggtaggcacctgtcctttccttcacccccacccctcctcgggccgtgcctccttctggcaccaccctctgactggcctatctgcccaccccaggacccttcccgcagctgggcagccgtgccgggctcttccagcacccgctgcaaagcgagtacagcagcatcaccaccacccacaccagcgccaccgagcccttcctagtgggtgagcactgagggctaggggatcccggctctcctgggacagggagctagcagagggagaagggcagaccccaagccaggtcatctaatgcctcctcctccacagatgggctgaccctgggggcccagcacctggaggcaggcggctccctcacccggcatgtgacccaggagtttgtgagccggacactgaccaccagcggaacccttagcacccacatggaccaacagttcttccaaacttgaccgcaccctgccccacccccgccacgtcccactaggcgtcctcccgactcctctcccggagcctcctcagctactccatccttgcacccctgggggcccagcccacccgcatgcacagagcaggggctaggtgtctcctgggaggcatgaagggggcaaggtccgtcctctgtgggcccaaacctatttgtaaccaaagagctgggagcagcacaaggacccagcctttgttctgcacttaataaatggttttgctactgctaggccctgccttgcccattcttctggggcctgagaggtgctcccctagggtaggggagcggttctgacatcccccattctctgacacccaagcatacacccacctctagaggaggcaggtaccacattggaggcacaagtttattgagcacccggatatggaagatggcaccgggcacagagccgtgggactggcctgcaggccccgcaccctcaccgtgtgctgtcctgggggtgcctcacaagcacagcaccttggctccatcggctgcttgagagaggtagaaggtggcagtcccgccgtagtgctcctgtaagaggcgggctgggggtgagtggcagggccccgggaagctgccgctcctgcccgcccaggccctggtgcccgcccacctggatgtgccgcatggcgtggggagcagcggaggcctccagcagtgtcaccgtgcagccaccgaagccaccgcccgtcatgcggctgccataaaccccaggcacagcaagcgcagcctccaccagctggtccagctctgggcagctcacctcatagtcgtctctgcagagaggatattgaaggggtgggcctgggccggcctgtgcccggcaggagcggggcgcccagagggcctcacctgagtgagcggtggctctccaccatgaggcggccaaaggctctgtagtcgccacgtctcagggcggccgctgcctgggccgtgcgccgaatctcccccaccacgtgccgggcccgccggaagccctctttgctcaccaggtccctggcagctggggaggaaagaggagtcagcagccgccttctcactgcctggggccccgacgcctgtgaggaccagcaggcggtgatggcagtggccctggctggacggtgaagggtggaaggccgcgggggcagggcagcctggctctctcagacgtgggtctgaagagcccctttatcacagtgcctcctcccccgactgtaaaatgggacaccttggtccttcagggagcagtgagggttgaaacactccatgctttccaaggtgagtgctgccctcaagaggccaccacagagcaggaggagaagaagttctgctgagccacatggagcctccagggctggggctccagaagagggggcagaagcagccagggaccagcaggctgtcccatctgactggagctgaggctggaggggtacctgggtcagtaccagtactgactcagtgtactgcgcccggccaaacccgcaggtttaagggggaaggttgttagggtaggtggcatggcgggatggaggggcaagtagattcaaaggactgagaaatgaatgggtgggcgcggtggctcacacctgtaatcccagcactttgggaagctgaggcaggcagattgcctgaggtcaggagctcgagaccagcctggccaacatggcgaaaccccgtctctactaaaaatacaaaagttagccgggcatcgtggcaggcgcctgtaatcgcagctactcaggaggctgaggcaggagaattgcttgaacctgggaggcggaggttgcagtgagtggagatcatgccactgcacttcagcctgggtgacagagtgaggctccctctcaaaaaaaaagaaagaaagaaagaaagaaatgaatggaaatgagacagtgggtggtgttttaggagggaagaaaactgagcatgtcttggaggctgagggaaggagccaggcagccaggcaggggatggaaggagagggattgcgcttctagggcaggactctggaggaggcagggtgagctgctcctatgcagaaggagacctggaggaggggcaaggacaggctggggtggggaggagggaccaacttgttccagtgtgaaaaccttggccaagggcatctgcacagagcaggcagggcaggtctgagcactgctctggagaacgtgacacagttcacaaaggaaaaggacagggaggtccctcggagctgtctagtgtccctgagatag

SEQ ID NO: 763 - DNA, 272469 bp, Homo sapiens
gtgtcctcattctcattactcatctttatatctctggcatccaggactgtggagcgtagttgtttcctggatgtttggtttagacatttaatcttcagagagatgactttactagcaaatattaactttagatatgaagcttttatttgatcatctttatagctgttctcggtgggcaaatacacttaatgtaccttgacatcgcaaagttatttttaaactgcaatgacaacatgaagtcaatgatatcacttaccctctgactagggaatgcaataaaacacattaaagagaaatattgtcattgtacagtgcaataaatttgtatatcatgctgttaagtgttgccgtttatagcaaaatatgaagccctgtaaggacaaagccttgatttgaatccagggatggttgtagctgctgccgaggtttctgatagcatcagaacatctcagcaaaaggacttggcagtgtggaagagttactggccagggcagaaaacaactttttaaatttagactttgctttcacttttacatgttaataaaatagttttggaatcttagccatttgttgaatgctttccttcaaataatcttgtctgagaggactttaaaaagtacataaaatctttctcactttttttttttttttgagtcggagtctggctttgttggccaggctggagtgcagtggtgggatctctgctcaccgcaagctccgcctcccgggttctggccattctcctgcatcagcctcccaagtagctgggactacaggcgcctgccaccacgcctggctaattttttgtatttttagtagagacggggtttcaccatgttagccaggatggtctagatctcctgacctcgtgatccgcccgcctaggcctcccaaagcgctggggttacaggcatgagccacagcgcccagccctttctcgctttttatcaatcttctttcatcaatttaggtaggaccatatcacttagggcaggactattagagtcagtgctgggtactcattcagttgatttaatagaatattttgaaagtttttattaggacaaaagcaatatagtttcattcttggagaaattaaaaaatataagcaagcaaaaagaagaaaataaacaaacaaacaaaaaatcccctctctccatcctatctagccacttgaatatcctattgtaaagctttcaaaaattctggccaggcgcagtggctcatgcctataatcccagcattttgggaggtcaagatggatggattgctggacctcaggagtttgagactggcctgggcaacatggcaaaatcccatctctacaaaaaaaaaaaaaaaaaaaaataataataataataataaagaaaattatccaggcatggtggcacatgcctgtagtcccagctacttgggaggctgaggtgagaggatcacttgagcaccacaggttgacactgctgtgagccatgattatgccactgcactccagcctgggaaacagagtgataccttgtctcaaaaaaaaaaaattatttgtctgctttcacacacacgcatacacacacacacacacattcatatacagttcttttttttttttttgagacggagtttcgctcttgtcacccaggctgaagtgcagtggtgcgatctcagctcactgcaacctctgcctcccgggttcaagcgattctcctgcctcagcctccccagtagctgagattacagtcatgtgccaccatgctcgactaatttttgtagttttagcagagacagggtttcaccatgttcgccaggctggtctcgaactcctgacctctggtgattcacccgcctcacctcccaaagtgttgggattacaggcgtaagcccccacacctggccacatttcttatgtttagtagatatttcagttctgcaaaaatccataataacagctttaagatataatttatataccataaattcataaagtgcaccattcagtggttttagtatattcacacaattggtgatgtgatagtggtgatgcatagcgtgatggttatcatcaccactatctaattccagaacatttttatcactccaaaaagaaaccccatagccaatagcagtcactccccatacaatatgtggtcttttttgtctgacttctttcacctaccataacgttttcaaggttcttccatgttgtaagcatggatcagaacttcatttctttttatgtgtgacagatattccattgtatggatatactacattttgtctatccattcatcagttggggaacattaggttgtattcatttttttattatatgactaacgctgctataaacatttatgtacaagtttttgtgtggatatatattttcagttctcttgagtatgttcttaggattggaattgccagatcacatggtcatgttatgtttaagtttttgaggaattgccaaagtgtctgcaccattttacattcccatcagtaatctgtgagggttccaacttctccacatcctcacaaatacttgttattatctatctttttgattataactatcccagtgtgtgtgaagtagtatctcattgtggttttggtttgcattttcctgatggctaatgatgttgagcgtcttccatggtcatgcttatcgaccatttttatatttgcccactactttttaaaaaatggttgagttgtaagagtttattctggatatgaatttctaattagatatatggtttgcaaatattttcttctatcttgcggattgtcttctactttctttttttttttttttttgagatggattctcagtttcccaggctagagtgcagtggcacaatctcagctcactgcaacttctgcctcctgggttcaagtgattctcctgcctcggcctccctagtagctgggatttcaggtgtgcaccaccatgcccagctaatttttgtatttttagtagaaaatttcatcatgttggccaggctggtcttgaactcctaacctcaggcgatcaacccatcttggcctcccaaagtgctgggattacaggcatgagccactgtgcctggccatctttcgctttcttgagggtgccttggaagcacaaaagttttaaaatttggtaagtttcaatttatctttgtgtgtgtgtgtgtgtgtgttttgagacagatttttgctctgttgcccaggttggagtgtagtgccatgatcttggctcactgcaacctccgcttcccgggttcaagtgattctcctgccttggcctctggagtagctgggattacaggcacatgccaccatgcctggctaagttttgtatttttagtagatacagggtttcaccattttccccaggctagtcttgaactcctgacctcaggtgatccacccacctcggcctcccaaagtactaggattacaggcatgagccaccgtgcccggcccaatttatatttttcttttgttgcttgcgcttttgatatcatagctaagacagcattgctaatccaaagtcatgaagattttctcctgtgtttttcccttagaattttatagttttagctttatagtttagctctctaaatgtaaaatttagagatcttaaatccattttgagttaatttttgcatatagtatgaggtggggatcctactagattattttgggatgtccagttttcccagcagcgtttattaaaaatattattcttttcccattgaatagtcttggcaccctgttgaaaatccagtgaccataaatgtaacggtttatttctgagctctcaattctattccattgatctatgtttatcgttatgtcggtactacactgtcttgattactgtagttttgtattaagttttaaaactaggaagcgtgagtccactgacttcattctttctcagaatcgttttggattttctaggtctcttgcatttccacatgaattttaggatcagcttgtcaatttctgaaaaaaaaaaaagtcgggattttgatccctatcaaaatccattgtgttgaattgtaggttgctttaggaaatattgccatcttcacaatattgtctcctaatccatgaacatgggaggcttttccactcatttaggtcttttaacatttctttcaaagaggttttgcaatttttattgtacaaatattgcattcctctaatttcttcgagggcctatgtgggttctgttttagtagggtgttctgcatataagaccaagcatcagtccggggtcgtggggggagggggtcttctctgttctgaggccatcatggcaggtggcgtacctcactcaatctctgttagcttatttgtaaaattgagcagattaggcatctaaaggatttcctctaaggttcctttccaggttggcaaattacaacttgcattattggctgtcttttaaatatgtacgttccaccactcccagttccctggctcagcctgtggctgcagtgccacagggatcctaggtgcacagtgttgaggagttgacgactcaacacttggctgggaaatcgaaatgtctttgatgtgagttctgtaggtagtggcagtttcctctgctctcaaccaaattcgtttacaagcctcctttactcttaggtcacaggtggcttttctggctttgacctgagcggtgagtatccagagaggagaacgatctaattaatttctgtcctggcgcctggagggttcgaagatcccaggctcccgttcccgccgcctgggtgggagcccgggaacgcctctcccattccccgcccgcgaagtttgcagcgcgcctcgcgcgggagagacgccgtctgctggcgcgcggctgagcgctgtcagttcctgatccggctggtgcccgctccagccgcggcaggttccagagctgagaggccacccccacgccgcgggcttccagcgcgtggagcaaggggagcggccccggcgccgcccatatccccggctgcgctagtcctggcgctgcaggtccgggaggcgcaggcggagagcggcggtgcccccgagcccctctgcggacggctcaggcgggaggaccccgcgcggctggatggcggcggccgcgcggcctcggggtcgggcactggggccagtactgccgccgacgccgctgctcctgctggtactgcgggtgctgccagcctgcggggcgaccgctcgggatcccggggccgcggccgggctcagccttcacccgacttacttcaacctggccgaggcggcgaggatttgggccaccgccacctgcggggagaggggacccggcgaggggaggccccagcccgagctctactgcaagttggtcgggggccccaccgccccaggcagcggccacaccatccaggtgagggcctcggagagagccggggtgggcgcgccttttccttcccgcgccggccagacacccggagaagggatcgggccctttcctcacgcgcgctagtggctccgggcgactgggaagggcagcccccatccccgcgcgcgagggcccacgacccaggagcgatctcgtggaagcaccgcaccggcaccaccggcccgaggcgaggagggggagcacgcgaggtgacatgaggctgtggtcaggttcgggctggtggaggggaaagtgtgaggctgcgctctaagagatgcaggcgcctcggcccttcccgcctccgtcacccacggagcgtcccgccaggcttgagtcctcgagggttcaggggcgcctcctgccccacctcccgggccttattcggagaagtcggtggcaattaccttctgtggtgtattttaagagagaatttttaggttataacagcggtatcactctaatgttactgaaaagattcacttcactgcactgcctgaagtgccaccatccagtcattgggggcgaatgagaccttaggcggacagagatagaaaggctctcagagatccgagcctcaccgcgaacacccggggcaaacgacattgcggtgcatgttaagcagcatcttgcagtgcctggcccttactcacaggtctcagccaggcaagagtgcagtggtgcgatcacggctcacggcagcctcgaactcctgggctcaagggatcctcccgcctcagccttgggcgtagctgggactacaggcgtgcccccccgtgcctggcaattttttttttttttttttgagacagagtctcgcactgtcgccggggctgaaatgcaatggtgcgatctcggctcactgcaacctcaggcctggcaattatttatttatttatttatttatttatttatttatttatttatttatttttctgtagagacagagtctggctattttgcccaagctggtctcaaactcttagcctcaagctgtccttctgtcttgacctcccaaaggggcaggagaatttgaatccagtcctgacttcaaatcctggacactaagcccaaattgcctccttcttctgcaaagtattgttgaggaacaggaagtgggaagagggagcgattttggagcttgggttctaaaagagcaaggttatcattgggtgtctagattagtgttttagaaactcttttgaccatgcacttccataaatgacaagttgttgaacatctagtgccatatgtgcttatttacttataaactacatgcatgtattatattgatatgtgttgtgcatattttaaaacatgcaaaaacagaaatctaaaagacaaaataacaatgatgaaaatatttttaccatatttatatattatctatattataaaacatgcaagaaaagaaactaaaaatataaaataacaatgatgaaaatacttttaacagtcctcaaataattttgctttctctattttatgattgtgtgtttataaacacacaaatatgcaaatataattgtgtgtataattatttttgagaaatttagtttagctcttataacaattcagtttttaatttaattttatttttgagacagggtctcactctattacccaggctggagtgcagtggtgctatcttggctcactgcaacctccacctcccaggcccaggtaatcctcccacttcagcctgccaagtagctgggactataggcacatgccaccatgcgtggctaatttttgtatcttttgtagagacaaggttttgccatgttggccagactggtcttgaacccctgggctcaagcgatctgcccaccttggcctcccaaagtgctgggattacaggcatgagccactgcacccggcctgattttatgttatacttgattttagtggttgttatagctgaaaagatacctaaaaaaatatgtagattcaaatggaagaactgcattgaccagtcacataatttacagagttcagtgcaaagtggaaatgtagaaccccttgttaaaaaattattttaaatatcaagatggtgacagcacagcattgaagtaagcgaggggcccttcgaagtgagaggccccaagtgactgtacacgtcttttgctgtctaagctactaaatcatggtactatagctctagctctgccccatccttcggttagcctaaaaatttttagaagtagaaacttggccggtaattgttcacttccaagttgtattcagcattcctagtagaaaggtattacgttttaatgttttgtattgttttgtttttgagacgaagtctctctcgtctctcccaggttggagtgcagtggcacggtctcagctcactgcaacctccgcctcctgggttcaagctattcttctgcctcagcctcccgagtagctgggattacaggcgcctgccaccacgcccagctaatttttgtatttttagtagagacggggtttcaccatgtcggccaggctggtctcgaactactgacttcagatgatccacccaccttggcctcccaaagtgctaggattacaggcatgagccaccgcagccggcccgttttgatgttttaaacaatagattcaagactcactgcaaatcttttgttggaaaatattaatgttagaaaattttgtttccatgagaaaagacttatttctgtcattctgatgcttgttttctatatgccttatatattttttggctactctcaattcttctattattgtcttctggtttaactgatttttaccattttgattctctcctcatttccttttctatatatatttagtttttttttagtacttattctgaagattacgattagtatcctaaatatataacaatccagtttgaattgatactagcttaacttcaacagcatcccaaattctgcttctgtataactctgtcctttacattattgttgcaaattacatctttatacatgattgttcattattatgaatttataattattgttattatatatgcatttgtcttctaaataatatacaaaaaaagcagttaaaaaccaaaaatatggagaggcatggtggctcacgcctgtaatcccagcactttgggaggccgaggtgggcggatcgcctgaggttggacgttcaagaccagcttggccagcatggtgaaaccccgtttctactaaaaatacagaaattagccgggcgtggtggcaggtgcctgtaatcccagctactcgggaggctgaggcagcagaattgcttgaacccaggagctgagatcgcgccattgcactccagcctgggcaacagaggaagactccatctcaaaaacaaaacaacccaaaaatacaataatactggtttttatgtttacatatgtagttacctatactgttgttctttcttagtatggctttgaattactgtctagtgtctttttatttcatcttgaatgactccttttagcattccttgtagagtagatctgctagcaggattccctcagctcttgagagtgagactctgtatcaaaaaaaaaaaaaaaagagaaacgtacagtgcattatatactgaacacatttgccatgctaaataatccactggcatacagacttctatagccttctatattatagaaatagtaacttgttttagtactgttttaataactagatattatttgtttaaagatacttcttatcagctcaaataatattttggggggagattttaatttttaaggttaatttagtggcaataatacatttttccaaatcatacatttattcctggttgtaatttaggcatttatgaaacctttgttaactctctgcattctggaaccatttgcctagttaggaaaagatttactaagtggcacctgagtggtctaagtcaatggagctgcctatggttgtgctacatacatggattcctggccaagcgggtgagtagggtcacctgggcagggctgcatctgctcagaggcagggagtctttttctgctttgcaataaagaactgtttgaatgaggtcataggacactgattagatccctcatgtcaacagggtggaaactgccctgaggaaagccagctccttgagtcccatgtgccctgccagtttctcagtgtcaaaaacatattgtattccctcagtggttttcccatcctagaagctcagaaaatacatgtggagttaataaatgaatattaactggagaataatacgggtttaaagtgattatgcacatcttaattgtgagaggtgggaaatagaagtgagttctccattactttcaagttgcaccatatactgtgcatactgtgtataggagtgataccaaatatagggggcagaatggtgagaaggaggaatggcctagtaatgaggggctttgctcccctgcttaatgcagggtattgatttaacacacacagacaacacttactgatgcttggcacaggtctaaagcatattacacattgagttcttgattgtcacaacaatttatgaatgtatgaaggaggtacaattagcatgcttcttttacaaatgaggaaactgaagcgcacagaagttaagtgatgtgtccaagatcacacacttagtatgtggtaaatccagatttaaacccaggtactctggctgcagaattcacgctcttacccgctatactactgtcacagacatgctaactactccttcctctgagttccagctaaactttgcgttgccttgctaatgccacttatcaccttggagccatccattatcatgtctgtctccttattaggatcatgagcttcctgagggtggggccctgtcttcctgttcatgtctggacagagtattgagatgccccatagagtagaattcctgtgcaaagtatgctgcactgtttccttgtggaagcttgtcttagacaccccatcaatgctttttgaagaaatattcaaaaggcaacaccaccatagaatttacttatcagagcaacaccctgatggaattgctgtttgattttaaaagtacctgaatttcaacaatctgtcttctggaagacaggtgtggccctgctgtgtctgatgcagtggctgaacccaatgcccaggactggactcccagaagctggaagaggcaaggaaggatccttcctctacatatttcagagggagggcagtcttgctgacaccttgattttggtcttgtagcctccagcatggtgagagagaaatttcagttgttctaagccacccattttgtgctactttgtatggcagccttagaaacttaatgcagtaactttagcttcaactcagttaaccagcagttgtattgaccattcagtgtatgcgtgttatccctgtttgggagagcagcagagaggggaccctgcatgaggctctgtgtgtagttctagggtcctggtttgtgagactttgcaacctgataactcaaaatgtggcccctaaaaagaatgagaagagctctaggctgaacaaatatttagagatcacgcacattatgagtcatccttaaggccaggaatggtggctcatacttataatcctagcactttgggaggctgaggcgggtgaatcacttgaggtcaggagtttaaaaccagcctggccaaataaaaaataaattagctgggcatggtggcgtgtgcctgtaatcccatctacttgggaggctgaagcaggagaattgcttgaacccagaggtggaggctgcagtgagccgagatcacaccactgcactccagcctgggtgacacagcaagactccatctcaaaaaaaaaaaaaaaaaaaaaaaaaaaaaaaaaaaaaaaagaaatatgtgcacttctttatggcagtaagctgtgttgtgtgtgtcttacccctgatccttgcttaatgcatgtggggtggcccgagtttgggggtggtgcatacctgtgagccttggatccaccttttgaacagagcccagtggttggataattcctccactactagtgagggctcagagggctgctttaggggagggcagggatggaattgtgaaatgaaagctcctattccctatgtcgtgggattggctctgcagagactaaatattgccaaacatttgtgtgcatgaaagacattggtggcaaagattctatgcaagatagtttgcacagtaatttgatgagaatgcaaacatttcagacttttaaattttcttacatgtttccaggctgctttcctattttattatgaggacttagcatttactgtatctttaatgtatcattgaattctaaatgtttttgatgaactagaaaaagtagcagcatgttctgggagacttcattaggaaaatcactaaataagcttgttataaacttattgagttctctttcttttattttatttcattatcttctaggtaaacttattagacttttctttgaataaaaatatagctgttaaagtaaaattttctgatagaaatgctaagagcaggtgaaatccccctgttttttttgagacggagttttgctctgtggcccaggttggtgtgcagtggtgcgatctcggctcactgcaacctctgcctcccaagttcaagcaattctcctgcctcagcctctcaagtagctgagattacaggcatgtgtgaacacgcccggctaatttttgtatttttagtagagatgggtttcaccatgttgcctaggctggtcttgaactcctgacctcaagcaatccacttgccttggcttcccaaagttctgggattgcaggcgtgagccactgcaccctgatagatgaactctttattctctttctctgagcaggtgctggcttagaagagattctttcaacctttcctatacttgatgctacctgcagcatcctcattttctttgatcacttgccttggttctggggtgtggtctttctctggctactccacatgtgactgtcactgcagcttaagaaaattgtagctgaagcaagccacagtagaactgcctgactaaatatgaggaagaggaggccaaggacctttagaatcattacaaagatgtttgtaagcagcggttctccatcttcatgggagattaaataggaaggagggtgtaatgttgcagcacaaagtactgggatttgctacagagaagaacttcctgtgctaagcatgctgcaccactgaaatgatttctgaagaggagggtgaggacttcatctttaggtcaaaatcctctgtgtgatcttttagcccccaacatttgcaattacaaggctttacttgggaggcctcatgggggaaagctgccctccccatgcctgacttggtgcacagtgaatgcattgcaattttctggagggagttttggtcaacgacgcaggctgtactggctcaggagcctctcatatacatatctgcattcctgacccaggagcctctattctgggggctcccttatcaggagccttggctgaggctcttcccaggtgcctccactgagacttccttactggtacaccatacaggttgggaatccctcatccaaaaatccaaaatcccaaatgctcccaaatccacaactttttgagtgccagcatgacgttcaaagaagtgctcattggagcttcctggattttggatttttggattagaaatgcttaactggtaagtataatataaatattccaatacccgccccccgccccaaaaaaaaatcccgaatctgaaacatttttggcctcaagtatttcggataaaggatactcaacctgtgtcagtttgctcggactgccataacaaagtaccacagcgagggtggcttaaatagcacagctggattttctcacagctctggaggcttagaagtctaaggcatgggtatggctggtttctgctgaggcctctctccttagcttgtagacggccaccttctgcctgtgtcttcacatggtctcttctctgtgcgtatgtgtccccaactcctcttcttatagggattccaggcgtattggattagggcctgccataatgacttcattttaccttaattatctctttaaaggccctatctcaaaatacagtcctattctgaggtcatgggggttaggacttcaaactatgaatttgtgggagggggtgggtggggtggtggggggaaatggaacactggggaaccagcctgtttctcttcttcttcttttttttttttttttttttttgagacggagtcttgctctgtcacccaggctggagtgcagtggcgcgatctcggctcactgcgagctccgcctcccgggttcacgccattctcctgcctcagcctcccgagtagctgggactacaggcgcctgccatcacgcccagctaatttttctatttttagtagagacggggtttcaccgtgttagacaggatggtctcaatctcctgattttgtgatccgcctgccttggcctcccaaagtgctgggattacaggcgtgagccaccgcgccccacctctcttcttttttatctcttgcctgcactgtcacagtaagttaataaagtctgggttggtgcttcatttggactcattgtcttaattgaccgctttaacagctggaagctcaacagaggctggaagactgacttttgaggtgattcttaaagtagattccaatcaactaataagaatggtgctgcctggagacaagcgtgcccacgcacttgtgggtaatgtccattcacttctatatttagcaaatatttattggcatctactatgtgccaggtataggggatggtgatataaggggctggaagtacagttacaaggcagaaaagacccctgtcctcactgagctaacctcccatggggagactgtagccgttgagtaaatataataattgtaggttgttattttgccttagagagaataaacaggattctgtgataaaaattaaagaggagatgatggccagggtgcggtggctcacgcctgtaatcctaacagtttgggaggctgaggcgggcagatagagagagagagagagagagagagagagagaaagaaaagaaaagaaggaaaggagatgatgttggtgcagaaacctgagtaacctgagggttgagaggaaggcagcctcacaacgaggttgggagagggcgaccctggaggcctgaggcccctgaggcgggaacatgcttggtgtgttccaggaactcagaaagccacatgactgttgttgttacacgttttgaatgttgtccctgagtgagacctctgtggtctttctagaatttatacatatttcactttatttttgtatgtattgataccctttctggtcctcaaaaatatttaagtgagtgataaaactaaaaagctgagatgagggaattgggaatgtgggaaaagaaagcaggaaaaagtgtaattgtttcataaaggggttaaaataataactgaaatagaactgagagggaaaaacctggtttgaggaatgcgtcaggttggggtcagactatctccttgaggaaggtgtctggttctcatagatcagtagttgatggttgattgtgtaaactaccaggaaagacctctttcataaatctaggctaagaggaagtactttgggtttggggtattaattgggcaggcctagatgtggcctggcccacattgtaaacttgcgtttgccttggagcagatgacttacatatcattaaagctgccaaacaccccactgacagtaatgtcagaggcgttcgaactagagagactccatcttgagtgacagctaggaaaataaggctgggacgtgctgggctgcattcccagaaagctaggtattcctagcctggagatgcttacagttaggggaatagattgataatgtttactaagcagacccagacttgggagtgtcctaatatcctgatatcttgagaacaaaggcattcctaattttgctttaaagataataatattgattctcgcaaaatatagtaattacgaaaattaatcctttatcacaaacccttgcagcagagcacatctccccatgatctttttttatcctatataaaatattttatttatccttatctaaagatccatgatctttttttgtccttaccttacctaggtaagacatgttcctcctcttactttcgggaatgccctactctgtttatggagtagctgttccttcaccacattactttcttaataaacttgcttttgcttcgcactgaattctttcttgcacgagatccaagaaccctcttggagcctggattgggccccctttcctgtaacagtaacatgccaacactacacatagggaacaggaaaatagcgagagaagtagaaggaagaggattgcatggaaaccgttgaaaaattgggctttaagacttccagaaagaacttcttgagttctttcaagagggaaccagttggtaccaggagcctaaagtagatgtacagtgtcataattaagagtatgggctttggaattaatagagctggctttaaatgtattccttcctaaagacatgaccttgagtgagttatttaacttttatgagacttggtttcatcatctgtaaaatggggacaccatacagttattatgaggattacatgaggtaaatcataatgcatctggaacacagttagtgtttaataaatggtaacttttttcttttcttttctttttttttgaggcacaatctcactctgtcgcctgggctcgagtgtggtggcatgatctcagctcactgcagcctctacctcctgggctcaggtgatcctcctacctcagcctcctgagtagctggaactacaggggcgtgccaccatgcccagctaatttttgcagtttttgtagagttggtgtttcgccatgttgcccaggctggtctcaaactcctgggctcaatctatcctctcatctccgcctccaaaagtgctgggattacaggcatgagccaccacgccctgtcataagtggtaactctaattaaatattgttgagaaatctattttggtaagaaagtcaaaataataagacactgataaaaggggtcagatgtgatgaggtgcggagattaggagaatgaggcattgttgcctgggaaacctctttttgaatggaaataaatcataatgaagaaatatattgtgaccaaaagaataactctcacttcctttttcctctctgatttggccatgataagcaaggaaggtgagtacctgagaagtctctgaaactggtgagactctgcccagagatggaagagctgagttgggcatgagtggagctttctggccagagcgggcaagtggtcagaagttaggagctgagaataggttctggggaggccctgctcatggaacacatggatttccattagggtagaagaagcgagtctagatttcattagactgtgctttctaatagctgaatttagtgacacaggtatcagtctgcaattactgccttccttcctgtggttggttaaaaacttctgagtaactaaatatagtttctgccattttaatttatgaatcaaatcaactaatactgagtgcctaccctgtgccagataccaatctaggtttatagtagtgagcaaaattgatgaagccctgccctcagagcagttataatccaataaagaggataatttaaaaaggaaatgatttgcaatttccgctgaggatgaagagaagcgggtaggggaatagacacggagatagagggcagcactgctttagatggagttgctaaggaagactgccgaaaagagacttcagtctgggagaagcgtgttcctgggagagcgaacagcatgtgcaaagaccctgaggcaggagcagccttggagtgattgagaaacagccagagagtcagtgtgggtcaaatggagtgagtgggggaaaagtgcgaggttgtttcaagcacatttgttttaatcctgatcggaatgatctagaagaaatgagatgcagtggggagagagagaggagagagagagacagagagagtgagtgtcaggggacaggagcttctccataccaacggtaggcaggtatatgggtacagatgttgtgaggtttgtagattatgaagatgagcaagttaagcaaattcacgaggtgaggggaagggggtgggagtttgaggagcaaggagaatgtgtgaaataacttccaggagagtgaaagagtaaatatagtgaaatattacatcaatatagaaaaacacagttctcagttgtctatggagggagaagactaacggcaagcatcttcctttctaaaggaagcttctttcttctttttctaattttagagacagcgtcttgctttgttgcccaggctggagtgtagtgatgtgatcatggctcactgcagcctcaaactcctgggctcaagggagcctcagcctcccaagtagctgggactacaggtgtgcaccaccatgcccggctaattttttttgtgtgtgtgtggagaagggggtgtcactttgttgcccaggccggtcttgaactcttaggctcaagtaatcctcccaccttggtctcccaaagtgttgagattataagtgtgagccaccacgcctagcttaaaaatatcctccttacctggttgtgtctgactcacaggctggtggtgcccagcaggggagatacatgttttctggccaagcccaaatctctggtgcccaaatctctgaggcacccgcagattcagatgctacacctcatacggctagacagctattccccctcttccttgtctcttgtcttcccttctccagcatcccctcttgggctaattctcaggttctatcttggctctaccacttagaccaattgctccacctctttgtgtctgtttccctctctataaaagggtctgatgcttgtgtctaccttgtagatttgtcatggaaattgagttaatgcatataaagtgcaaggggccacgtctggcacatggatgtttccttttgtcattactaccatcaatgtagctacttctatgactgctgcagcactgtctatggctagtggtgcacccatatgtgccagtcgtcactgcctctgaggttcccagactgcagtgggcagaagaatcctttggagtgcttttataaaattctgatgcctagctcccactagagatgctgattctaagtccagaagcgtctgcatttccagcaagcactccagtggttccaatggtggtatgatcacaccacctggtgtctacttcatggatgacatctcatttaatcttcaaaccactgcgtaagataggcagtattaacccattataataaagagaaaatggagctcaagggagtctacataattcaactaacgttccatagctgtgactggtagccatcaggatttgaatttccatctattctactccaaaatgtagagtagttaaatgagttaaatggaatgagttgaaatgaattcaaaggactcccccacctagaatttggagttttgcagacaattgcttaactgcttctttttaaaaaggggtgtgtccaacatggcacatgtatacatatgtaacaaacctgcatgttgtgcacatgtaccctagaacttaaagtataataataattaaaaaaaaaggtgtgtgtgtgtgtgtttaaatacctggaaccaactttgagtcccttgttttagctctctcccaaatccctatctctaggaaccaggcacattagagatgtcatcttccaccccctggtgccatgaaaccttgtgtgtgggagtcgcagagctgggtgttcaccactcaccccagtatatttaggatacgttcaggaaattcacagaacacttgcccaaatcttcagtaaccacacctaaatgcctttgtgactctcaaaagggagaatgctctgaacaaggtctttgcaaaggagcaattccaagttaggaagggagcccaggatgtcctatacatcaggcctccagctggcttgggtttgggcacttgagacaccatggcctccggaaccttagtgagtgatggctataggagcagaggttcgtggaaacatgaatgtggtaatttgtagtggggctgttgatggatgaacgttggttaaatgcttatcttgccgggctttttgtgcctgccacaagggcgtgcatctgaacctctgccagacagatttctctccccagctgggtctcttcccatacatctgatagtgggcaggtgtatatagagtcatataattgtcattccagggctgtttcacaccgtccaaatctaagacagcaccttttgatgtagctcacaagagcagcttggccaggaggaaagtgttccaggccataagtaacattatcaggcacacacgcagttcctggccccagcacgacctagctgtgtggtttgagatgaagcacttcacctctctgagctgtttcttcatctttaagttttgaatactttgatataaagttcacagtgttctggagattaagcaaagtaaagcacagtgttcctttgctgggctcccacaccccagtgctagcttgccccagcatcttttggtaatgtgcagtggttgagttacttctcttgtctcccactaactttctttagggacagatccagctcttagtgtttgtttgtttgtttttaccacagtatctaacatagtgctctacccatggtaggtaatttggataagttgaataaatgaatgaatgttcaaacaaaaacccccagaaactacgttagggagcactgctataatcatcctctagcttcttggaggaatatagtatttacattgtgaattctaaaggctttttagttaagaaagatcataaaaaatgttaggaactaggagagactacttttttccatccttctgaaaaagggtaggtcattctgtgggcttctggtttattctctggagactgccaaatttggagctcaactctgcttagttgtttatgggaacagtcctatctcctttcttcatagccccttccattacattttctgtttcccatctgaataggctaataatataatagccttggtgcaattccaagtgtgagtcccttgttctgtttatctttcagtgttctcatctctctgtctagaatggcatttggtacagagtagatgatcatcataggtttgttgcatggatggatgaataattgaacatgggagttctctgttccttttcttctctgacttctatcagtttttgccctgctttatttatttatgggtgtttttaaaatatcggacatcaggcacggagttagattatggattagtcataacactcagtttatgagatatttatatacacaaatatatattgcatacatctgcccactaccagatgtatgggaagagacccagctcgggaatgtattatcatgacatacacacacacacacacacacacacacacacagacatatatgcatatatatatacacatacacacatatgcacacacacatacacatatatttgagacagggtctcactccatcacccaggctgtagtgcagtgatgcaatcatggctcactgcagcctcgacttcccaggctcaggtaatccttccacctcagcttcccaagtagctgggatgcatgccaccatgcccagctaatttttgtattttttgtagagacggggtttcaccatgttgcccaggctggtcttgaactcctgagctcaagcaatcctcccaccttggcctcccaaagtgctaggattacaggtgtgagctactgtgcctggcctatatatgtattttaaatagtaataagcattcatgaacttgctaccaaaaccaaacatagagcttggataataatttatgtctaaatgtatggtctgcccacccccattccctctgtctcttacattctggggaaataatcatcccaaatcttttattaatactttgcttttttagtatagtttttattacatctgtacgtatttcgaaaaagtaggtgctttttattttgcttgctcataactttataaaaagtatatcatgcttttttcacttaatattatattgctgagattcatcaatattgtttcatccatattgtttcattgtatatattcatttactcattattgcttatatagttattaattgtgtgaatataccactgttagttcatccaccctcctgtggctgggcaattaggttattcccaggattttgctcttatgaacagtgctgctgtgaatagtgttgaatataataccatcaaatttgtgcaagagtttctttttggtttatgagtttgagagtagaatgccgtatcataggaaatgtgaatttcaactttaggtggtaatactaaaacagtttccaaagtttttgtaccaatttatactcctactatgtcttttctaactctggttatcatcaaactttaaacttgggtctactgaatacgtataaaataatattgcattgtggtctgccttgatcactaatgatggtgatggtgaacatttcttgaaatgcttattatgtttattgtgtttatatgtgtttcctcttctgtgaaatgcctacttttgcccgttttcccattgaactatttatatttttcttattgatttgtaggattgttaggaatttggtatgtatttctgttgagagttcttcgttgattttaagttctttgatcagttattgattcttgtgtaataaactacccccaaaacttaggggcttaaaacaacaacagttttggccaggtgcggtggctcacacctgtaatcccagcactttgggaggccaaggtgggcggatcacctgaggtcaggagttcgagaccagcctgaccaacatggagaaaccccgtctctactaaaaatacaaaattagctggacgtggtggcacatgcctgtaatcccagctactcaggaggctgaggcaggagaatcacttaaaccctggaggcagaggttgcagtgagccaagatcgcaccattgcactccagcctgggcaacaagagtgaaactccgtctcaaaaaaaacaaaaacaaaaacagttttttctctcacaattctgtgggttgactgggttcagctggttgattcttctgctccatgggttgtcagttggggtaactcacttagttgcattcagctggtggctaggatggactggatggcctaagaaggcctcgctaacatacaaggtagcttggtgctctcccatttgtcctctccagttggctattttggactttctcacagaatggtgattctgggtggttggacttcttgcctgctggcttccaagaggaaggaagcagaatcttctagcccttttaaggcctaagcttgaatgtcccagaatgacacatctgctataacaaagcaaacaatcaagtcagtctggattcaagagcagagactagcctccagggcaaacagcatccaccttttgatgggtgaaatggcaggcacagagagagagagaaggaattgatggcagtcatcattggagactatttatcacttttgcattgtaaatatcttctagttttaacttttcactttttaaaggtgtctttgatgaagcaaacttctttatacatattttatttatttatttatttatttttcgtagagacaaggtttcactatgttgctcaggctgtcaccaactccctgggctcaaggaaacaaaattctttttttttttttttgagacagagtcttgctctgtcgcccaggatggagcgcagtggtgcaatttcagctcactgcaaccttcacctcccaggctcaagcaattcccgtgtctcagttacaggcatgtgccaccatgcccagctaaaggaagcaaaattcttaattttaacatagtcagatttatccatctcttcttttgtagtcaacgctttttgtatctttggttaagaaacctttccttgctctcagttctaaaaggtagacacctttttttctactatgagagtttgaagttttatttttcacatataagtccttacttcatctgaagttgaattgcatttgcgacttgagtagaactctgattttattatttccccctggatctagaatattccttcctttcccagcggtctgacataccacctatgttatatactaaagcttcttaaatgcatgggctgcctgttctgtccgataggtctgtttgtctcattttgcctttccttaattacaatagcttcataataagccccgattccttgaagggcaagtttcctcctcccggtcttcttcttcagcaatatcttggtcctttaaagtttcatataaattttagaattatcttactgtactttaagaaagtccttattcaggttttcactggcataatattgtctctatagcttaatttggggagaattggtaagtttttgatattatcttctagctaactctccatttatgtagattttcaaaattctgttaatactgtttaaaatttttatttgtcaaatttcttttgagatacttgatgttctctgagactattataaatggcattttctctttaattaaattttctagttgtttgctgctactctacagagatgcaatgacttttttattttaatgtcacatccagctaccttgctaaaaatctcccagtatttctaaaattctctttagcagatacatttgggtctttattttctttttttattttttatttttatttttttcagagtcaagttctcaccctgttgcccaggctggagtgcaattgtgtgatcatagctcactatactacagcctcaagctcctgggctcaagcaatccatcccagtctcccaagtagctgggactgcaaacacataccaccacacctggctaattaaaaaaaaaaaaaaatgtttttcttgctatgttgcccaggctggtttcaaactcctggcctcaagtgatcctcctgcctcagcctcccaaagtgctgggattacaggtgtaagccactgtgcctggcttcatttggaggttttttcttttttctttttttttgagacagggtcttgctctgttgcccagactggagtccagtggtatgatcttggctcactgcaacctcagcctcctggactcaagcgatcctcccaactcagcctcccaagtagctgggactacaggcaggcaccaccacacccagctattatttttgtatttttagtagagacggggtttctccatgttgccgaggctgctctcgaactcctgggctcaagcaatctgcccatcttggcctcccaaagtgtagggattacaggcgtgagccactgtgcccagcctcatgtggagttttaatgtaaataattttatctttaaataaataataacagttttatttcgtttattccaaatgttatacatctgtttttttctcctgcctttaaaaaaatccttcttgttcttgtctcttgcccattttttactttcaattcttgtggaaaacaccaggttgagtcagaaatagcagagacttataaatatataagaccttttattttgtgtatgaccatgaagcagtaaagttggtataagcgtctgttggaagatatggctacagaaaaaataaagtggcctgtcccagtgatactcatgggaaggaaagagcctcctcaatgatcttccatctgagaagtcccatggattcttttctcttctgctccacaagtttgattgtcttttctttctttctttctttttttctggtgaattagccagccagactcagtttagatgatcccaattttgttggcaacatccaaagcattgtaatcaggagccagttgaacatatgccttcttctctccatcaggcctaatcagggtgttgactttggccacatcaatgtcatagagcttcttcacagcctgtttgatttggtgtttgttggctttaacatccacaacgaacacaagtgtgttgctgtcttctatcttcttcatggcggactcagtggtcagcagaaacttgatgatagcatagtggtcaagcttgttctcctgggggcgctctgccgaggatatttgggctgcctctggagtcgccgtgtcgtgggccgccggaaggtgggtgacgtgcagatctttttttgtgtggctgtggacacctttaaacactgccttcttggccttcaaaaccttcgttttggcttcagctttaggagggacaggagcttccttcttcgccttcggcgccatcttgtgaaaagaccgcaagtttgattttcaaaagtattgtcaggtattgcccttttaaaaagccccacgaggttatcttctctcaaaaccttgttgcttggtgccaaggctttacttgcaggattagtcataaccttggcctccctgagaaagttcttcaaccgcaagtctacttatctaggtagcatgtccacgtcgacttaattctccatgaagagctcaagaaaaatgattaagaaggctgcaaagagttttaacacttaagaaagtcattcttctgattttttttttcacttctagatccacagtctgatttcctttagggcactactaaattctttttgattcttcatataggttgatttgcagtaaatatgacattgagatgtaaggtaaaaattactgaaagttcaggagtaaaacaaatgaaagaaaggacaaggaatactttaataaaacgatttgaataaaaaattttcaccctgaccgtttaagagtaacttaaagaagccaaactttctaattattaatttttaaatacattattaaatttttagaataaatttttctttctttttaaagtcaatgtttacactgatctttttatttttcaaacagaaagtgtatgttacacttttgcttgttaatgtttaacttaagcttgtggactctttgttagaaattattttatatggcaaaaaatttatcacctaaacttggctaatacaaagttaatccagaaaaaccatcatctagggcattactggtttgacaagttgtttttgtagattctttgctgtctgtcaaggttttttccaatagtccttagaaataaacagaaagtttgactcatttttattacctgggcaaagctcgctccttggaattcacctttaacttatgtatctattatatcagtcagacttccaaatgtcagtgttgacacctgtgatgctgtcttgcctatacacttattttttaaatatgtgctttcaaattatttattgctcagacttgaaatatatatttgatatatatagtttttagtgcctactaattgtgagatcaagggctaacgtgagtgctaaagctcctgagcctgtgttcttacctagtctgctgaatgacatggacaggagctgcagagggactgctatatcagcagaaaggctaagatgattctaaatgaaagagaccttcaggctactgtgaaggctaccatttaaaacaaattacaggaaataacgtatgttagtgattatgcatggatgtataataaaccagagttgtagctgttagagagttacagggtagtgttaacttgttatccctggactctggacttaggtcctgattctaccattgaccagtggtgtggttcttgggaaaattacttaacattccactctctttcctcatctgtaaaatagaggtgataataataatcttagtatgaaaatataaactgggtggtgcccagtgcataataggtgctctacaaatcttcatcttaattattattattactttgaaattgagaatcactctaacaacctagaaagcaccttctgcattcctcacatcaataatgtggagatggagataaatgtaaatcataagcattcccattttggggagagattttgcttctagccagatgtaaatcttctaaactttgaggaataataattaaattccctcatcaaataactaaatgttctggtaaaatgttctctagggagaaataaagatcatagaagggaaaatactgatagtaagtgtttagatgtcctagcttaaaagttattcatagctgggtgcggtggctaatgcctgtaatcccagcactttgggaggccgaggcaggcggatcacctgaggtcaggagttcaagaccagactgaccaacatggagaaaccccgtctctaataaaagtacaaaattagccgggcgtggtggtgcatgcctgtaatcccagctactcgggaggctgaggcaggagaatcgcttgaacctgggggcggaggttgcggtgagctgagatcatgccattgcactccagcctgggcaacaagagtaaaactccgtctcaaaaaaaaaaaaaaaaaagttattcattaagcaccatattatgacaatgcattttatagaaagaatcaacatttttgagaaatggctgatggaattattccttggttgagtttctagggggtgcaaggcagtgtgttgggttgaagtgatagagggaagagcaggaaacatatggcctccgacctcaggaagtggcggggccacatacacccaaggcactgcttctgagttatagaaccatttttgtataatgtcgaaagataaagatctacacagatacctcaccatgcatgaaagaaccatgagttgcatactagatgaaaacatgtggtcacacctttggttacataccaggatcaaatttctctctgaacacttaagaattaacttctaagatgctggctaggggcagagctacctctttgtcacagcacattccttgggaggctgtgggtataagtttgcctctttgtccccctcctatgtgatggttataccctaagagcatttagtttgggagcagatagttcagtatgtgaagtccatccctgggaagcatgatcctctgacccacttaaaatacattcgacatagaagaaaggcctatgttcaggttttagatagtaaatggctgcaaaactatgcaaaaaccaaaccaaaacaaaaaccagaatcaaaagaatctgcctagtaagaaagagtaattcaataagaagttagagattataataccaaacagattatcaccacaggtaaaaatggatccccatttacttactgaattaatactgacttctcagtgctggtattcacagccagccacatctctccatgtacctggcaagccttgtctctcaatgcttgccctcaaaggtgaaacaagaccagccggcccctgtgcccttgctcgtgctggttcctctacctggaatgctttccctgtttgtgctcactgccacttaccaaagtcctatccgtcctcccaggcactggacatgccttctctttcaccatggaatatctaccgccattggccacagccatctactccatggaggcacttgctgtacaccccttccctgatggttgtttggatccttgatgcaccactgggactgtggggagggatcttttttgtaccccagtgccgcacacagaattgcacagaggatgacttaatgagtgaagtggatttgttgaagtgaaaacctcttttcatcccaaatacaacaggctcttcttgaagtgttgtatgaaacaaaaacatagctgtaaagatggaagataaatagaccccatatcctaaaaacaccataatcagaggcataaatcggtgataaggtttaagataaatgaaaaagagaaagccttactactgtttcagaatacattccagtgaattttaacagctgacttctctaagctgtataagatagtctttgtttggttccctgtatttgctatatggataagaaaaaattacttgaaagtaaaaaaataaaaaacaaaaaacaaaaaaaacccactttttttttttcagggccagttctgtgactattgcaattctgaagaccccaggaaagcacatcctgtcaccaatgccatcgatggatctgaacgttggtggcaaagccctcccctgtcctcaggcacacagtacaacagagtcaacctcaccttggatctggggcaggtgagctacacttttaactggaatgggaacatgagcttagatcactgtttctatggggatttctgatataataattattgtaaaaaaaaaacaaacttcagttttaatcccctcatcattgttaaacctgttacattaacatttgcttcccttaaacccagaataggccaggcacagtggctcatgcctgtaatcccagcactttgggacgccgaggtgggtggatcacttgaagtcaggagtttgagaccagcctgatcaacatggtgaaaccccatctctactacaaatacaaaaattagccgggtgtggtggcggatgcgtgtaatcccagctacttgggaggctgaggcaggagaattgcttgaacctgggaggtggaggttgcagtgagccaagatcgcgccactgcactccagcctgggcaacagagagagactccatctcaaaacgaaaacaaaaacaaagcccggaacagtgcctggcagcatgcagatagatgcccatccctgtctattaaatgagattaaaaaataattgtaaatagtttcattggcaaagatatttttattattatttttaattgtggtaaaagagacacaacataaaatttgtcatcctaaccatttttaagtatatggttcagtggcattatgtacattggcatcattgtgcaaccatcgccgtcatccatctctagaacccttttcatcttgcaaaactgaaactctgttcccattaaacagcaactccccattcccctttctcctgccgctcgcagccaacattctacttctcttactgtgaattgacaactctaggaagctcatataagtggaatcatatagtatttgtctttttgtgactggcttctttaacttggcatgattttttaaggtcttgaaaacatcagggaaagtgaaagaagctggaaataaaagactatcttatatgattccatttatatggaatgtcctgataggcaaatctatagagagaaaagtagcttagtggttgtctagggctaggggttttggaggaaattggggcgtgactaataataggtatgtttttggagagagggtgatgaaaatgttctaaaattgatgatgatgatggttggacaactctgtgaatatgccgaagaccattggcatgtacactttagatgggtgaacagtatggtatgtgaattgtatctcaataaaactgttaaaaaaaaaaggattcatggaaagagagtgtttcaagaaaaaaaaaaaggagggagaaaataactgtgtcaaatgccattgataagccaaatagcaaaacactgataactgagcagcaaatgaccattggatttgccagtgtggagatcactggtgactttgataagagagcattgaaaagttaactgtagggaaattaagagagaatgtgagaggaattgaagtacctaatacagaaatcaattttaagagttctgctcaatggggcaaaaagaaatggaggagaatcattgaaaagccaggtaaagagatttctttgtttatgatagagatagcaacatgcttgtgtgcttgtgtgcagatggtaacgtaaacagcaggaagaagactgtagctattattagaacattttcataactgagtttgttatgttgatactaatactaaaactaatgctaatactaatattaatgtttatactattctttttgctgggaacagttaagcatagagtacagttcatataaaaaatactacttgaaagaaagaaaaaggtaaatgcatcccatagcatagaaatggaatgatactgagatttcttagaatgaatgtgttcttttcatttcgattgggcagttttgtgacagaagggctttcaacctctttagtccatgtgttgtgctaaattagacctctcctgagaatattttcaccattaatttgtgtctgcaggaattcacagagagccttcatggttcaaaagactctaataagcctcctttcaactataagttagtcttatccctctgatacctaaccactagcattcattcagtagcttctgacaatactaaccaagaattacctaccatatcgatttttttttttttagacagggtctcactctattgctcaggctgaagtgcagtggtgcaatctcggcttactgcaacctctgcctcccacgctcaagtgattctggtgcgtcagcctcccaagtagctgggactacaggcatgtgccaccatgcctggctaactttttgtattttaagtagagacagggtttcaccatgttgcccaggctggtcttgaattactgagctcaggcaatccgcccacctaggcctcccaaagtactaagattacaggcgtaagccaccgtgactggcctatatcgcttatttaactgagggtttttataggtaacagggaattttaatccttcaaaatgacccatactgaacttacccatgtctgctggcttgttcttttttctttagaactttttttttaaacctactttaaaagcctccttttgatgtactgaaaaattccctaattaagacaattaagaaaacatcaacataggaacagttcagtactttgctggttgctgacaaacgtgagtcatggcatgcatatgcataaggcctgtgtccacccacccgctctgctctgcgaggctgctgagaatgtgggttctggagtcagcctggccagtttgtcctgattgctctgctcacttgctgtgtggccttaacaaatatatttttctgctccctgcctcagtttcctcatttataaaatgagataattgtgcatccctcataagattattatgagttctaaatgagttaattgcttcatttaaaacttctttagagcagtcgtattttttatttaataaaataaagtgaactttaataaactctcattaaaaagaacagactgatcacatttgtgcctctagaaaacactacctataatactgtagaaaatattctaagaaagtctaggagcaggaaaagcatgatcagttatgtcagactgaagacatttctttcctcttctgtgttggagcatgacatgttttaacaagcatgttgtgtcttgtaagattcctattttttgccccattggtaagatctgtgttttcttccttttgctggaattaaccatgagaatgtcactgagaggttagatttcataattaatagtaacattaagaccttagagggagagaagtgggaattttgaggcatggttgagaaataaaatgcagatcataaatttgttactacaaaatcacttcacctgctaagaactgaaatttgattttgatgtgctgttgtcaatttgacagcttatgctgttgtgagggtcttgttttcttttagactagttggtgtttttcattgttatttttttggccaataagtttgacaaataaaaacattaccttctggacttgatcttttttttttttttttttttttttttttgagacagagtctcactctgtcacccaagctggagtgcagtggcgtgatatcagctcactgcaacctccgtctcccaggttcaagtgattgccttacctcagcctcccaaatagctgggattacaggtgcccaccaccatgcctggctaaattttttttttttttttttttttttttttttagtagagacagggtttcaccatgttggccaggctggtctcgaactcctgaccttgtgatccacccatctcggcctcccaaagtgctgggattacaggcatgagtcaccgtgcctggtccacagacttgatcttaaaggacagtttccccttaaaacgtggtaaatgtaggacagttctgtgattcactagaggcatcatactttccggggttgttcaagttcatttaattatacattatgcagtagtttcaggctatagaatgagaacacgatgtctttcaggaagcttttgtatcatctggccagatataatgagttcatttttacatttaaagcatgtagatgtccagtttttaaaaggagaatctttggaatctaggaagctttgttctgcctggattcctggtagggcatgggctttggagatctctcccgtgagatcggaaggtgtagtggtgggatctacatatacactctggacttcctccagaatccaaactccagagttctattctatgggctccctatgttcaccttccagctccctccccagggtgaggtatagagaaaaacatgaggaggtgggtgcggagggagttcctatggtccatgacttcagcccccgcagagcaagcctgactcattgtgttccagggaacaacaacaaaattatctgaagaattttgaggcttgtatgcaatgtgtaatgtttccaagagtattattttgttatttaaacctgttagtagtaaaaataaacaaagacaatccctcacccccaacatcaagccctgaaaaggactgagtgttggcttcagaggatggaggtgtgaggagagaaggtgacgttgcccctgctctgcagggctgcgggggagtgaggcctggagacagcagatgtggctgcaggagcagagctgctgagatggtcctttgggcctcgtagaggcaaaggctgtgatgtccacagctccctggtccccctctgagtggcagctgggatggatagttcccacacctgttcccttgtcccatctcaagggcctgcatctgactttgcttcctgcctgaaggctctttctagatttacagaggcttctaaaagctgtgtctagagcagcctgcaagcccagcacttaatgccccaaggggcaatcctcatcccaagagggatgatagttggtgggaaaataccgcatttccctgcctctcaatgggccagttctaaagtgccttctacataattcctcagagtgtccctggtaggatggagccgtggttgggttgctctggtggcagcctactcattaacacattgatttttggcttttctccctcccttatgttcctctcttcccagtttgtgcttcttgaggtcaactcttaaataaactacctctactcaagtctttgcctcagggctttagagagggcccaaactaagacagaagaaagagagtccagatggacatagtggttcatacctgcagccccaaccactcaggaggcagaggcacgaggatcacttgagcacaggagttaaatccagcctgggcaactcagtgagaccccatctctaaataaataaataaacaaataaggaaaggaagcctagattgagaccctgaaaccccctgcaggtgttaacacaggcaaatactatgaaaatgttatttaaaatgcaaaaaatagaaaattcagaaattgtttctaaagctccaaggttaaatgtaataggggaaactgcattataaattttaaggaaaaatattaataggtcacaggagaaatgccccattactctacctttctaatttttcatgaattcatcacagacagtgaactccccaggagccagatgcaaatacaggatccaatcatctgagagtgaattcagtatgtagttgcattctagaatctttttttttttttttttcctgattcccttcaacttttatgagactttggtgggtgaatccaaaacattctttgtagctgactcagatgtggagggaagcctgggctagtttctgatacttttggggcttgaggactttggagattaacttggctctacagatggttggctgatgaggtcactaaggagggtgactcagctggttccccgggtggacacagcccaatccagaaggtggatggctcttggttttgacccagtctttctggattcctgaggaattgtgtagactataagcttcaggaggccagggactatgtcttgttttgttcactgtgttctgttcactacatgatgttttgcttccaacatcttgcacagtgtttagcatacaatagttgtttaataaatatttgctgagttaatgtagaatgaaccaaggatgactcagcatcagcctgaactttcccagggtatagtagtaatggaaacatattgctgtgagaccaaatctctgggtgagggtggaagagttttagctctgtaattaattacggttcgttccatttatgacacttgagtctctctgcaacattttaagagtattttatagctataacaaaattagaaaatacagaagattatatttagaacaattttgctattaataaatggtgtttttttgtttttgtttttgttttttttgagatggagtctcactctgtcaccaggctggagtgcagtggcgcaatctcggctgactgcaacctctgcctcccaggttcaagtgattctcctgcctcagcctcccgagtagctgggactacaggcacggaccaccacacccagctaatttttttgtatttttagtgtgatggggtttcaccatgttgatcaggatgatcttgatttcttgacctcgtgatccacccacctcagcctcccaaagtgctgggtttacaggcatgagccaataaatgtgttattaatgaacatcatcatgaggcacagcccttgaagtcaaacaattcattagtgggtagaaaaacaggtgccaataaaatcctctgggctactagggatagaatattatcctttatggtcctttagtaacttcaaagtgttaatttggggtgctttgaagtaatttatacattaggaagaatctggaaatcaggtgttttcttttaatacatgaaaaactcattctgggtgcagtgtctcatgtctataatctcagcactttgggaggccaaggtgggaggattgcttgaggccaggagttcaagatcagcctgggcaacactgtgaaagcccctctctataaaaaaataaaataattagccaggcatggtggcacacacttgtagtcctagcaactcaggaggctaaggtgggaggactgcttgagcccaggagttggaggctgtagtgagctatgatagcaccagtgaactccagcctgggtgacagagtaagaccctgcctctattaaaaaaaaaagtctctctctctttctctgtatatatgtatatatacacacattcaattggttctgtttctctggagaacgctgattaatactgtggctaaatacaatgaaggtatatttctcatcatgtccaaacacagctgatcctggttaagcagttcccctccaaacagtggttcaaagacgtaaactccttccataattgggtctgccattttcaacacatgggttcccaatgttgccccgtgggtcatctttattctaaccagcccgaatgaggaaagagcatggaagattctgtgtgggaggtttgtgtgggcaagactagaagtggcacatcagctcagtagcttcatattggccatggtgggagcatttacactatggaaatcagcaaatgttacaaatcagggctgctcctttccaagagccagtttacccaatatctctctcggtctcttccatatccctccacttccctctccctccccacttaccatttagtaaactcattatgtcttgtgccgtattatctctggagtctggctcctcctcccccttgatactgcactattgtagtggaacccatggcagctctccccatgattagtccaccagtcttctaactgatttcccagcatctactctcagcttaccctgttttagaatcagcctgaaaggaacagaatccatagtggtgagctgagaaagattagaaacaatcaggttggcagtcttccaagggtctacctatcaatcaatcttctcattactaccagcgcaaaacaaagatctcagtgtgttgttctccctgattagtatcctttagtggttttctattacttttggaataaggtccaagtttcttaacatgtcacatacgctccttcagtctagcccttagactttttgccagcctcatcttaaaaggcactttctcctgcaagacctatgctatgtcagtagagacctaactgtaattccctggatattccatgatgttccctggttctgggccttattttggtgctattcacagttcttggaattccttcccaccttgcctggtctggctatcttctttctgagataactcaaatattgcctgctggaaacccttcctggctgcctgcttccctctgagctgtttctgtttactcagaggcacttgctaagctgtgccgtaaaggctgatccaccgtgtgctccttaagctcagcagctgtgtgaacatattctttttgtatccatggggcttaaaagtcccagaatatactgtgtcctccactaagatggaattaaatggaaatgtgaattccaatactgttgttttcttattattccactgaattatatgtcttgctatcatcatggacagctctgctctattttaagctaacatttacatttgttggttttcataaaactagcaccacaaatataacagacataacagaaaatgaattaaatatgtttccttccaaaacactcagtaggctgtaggcagtcaacataaatccaagaaataggaagaaagataaaaactgtactagggaacagcaacactaggaaacaaaacactttcttctggaatgttctctcagtctatacagatagaagttaagatgataaaatgataaacggaggtcactgtgacctccttggtgagtcttacgatgcaactttgggtcaacacacaattatgaccagcatttggccacttcccaggattaaggccattgtaaagtcgtcagagggatctttctcatcatgaagggtgaaaaccagagtttggcatcacatgggaaagggcagtctgtgggctggggagaggaaccagagctttacatttacatatcatctatgatatggaattttattattattacctagagaagttgtcattgatcctctcactctccctgttaatgagcttaggctgccttatgtcttctggggagtgaagtatctataaacacattcacacgaaagttctgggaactcagtactgatgttacttcccagaatatttgcattaaaaaaatttctatctttgacatgaaactactactctgaatttatccaaaggaattcatgagataaatgctctaatgtctgatgcaagatactcaccaaagcattataaaaatagcatccagtgggaaacaatctcatgtccaataaaaggggactgactcagttagtggattaataggcaccacatgatgccatagaatggtctttatcgacacaacatgtgtctgtgctatatggtgaagaaacagaccaaaactatatgtaaactagctagactgtatggaatgatcacatttagtaggaaaaaaaaaatgtgcctatataagcaaagaacaaagtctggaaagagatacttgaacatgctaagagtgcttctcggtggatggggagatcagtgatttttactttcttctgtaaatctcacagtgtatgtcagcttgctggctctgggtttttacctaggtaaacatctcactccacagcttcctggctgtgtgtaattggatggtctaacgaatgtctcggggtcagtatcttcatctgaaatccagggataaatctagtaccaacctaggagggttcttgtgagaaattaatcagataatacagaaaaagctctcagaatagtgccttacatgctgtaagaactaaatccatgttacctatactatctgtattttttttaaaatttttatttctataggtttttggggaacaggtggtgtttggttacattagtaagttctttaggggtgatctgtcagattttggtgcacccgtcacccaagcagtatacactgcacccaatttgtagacttttatccttcatccccctcccaccctttaacccaagtccccaaagtccattgagtaattcttatgcctttgcatcctcatagcttagctctcacatatgaacgagaacatacgatatttggttttccattcctaagttacttcacttagaataatagtctccaatcccatccaggttgctacgaatgctattaattcattcctttttatggctgagtaatagtcaatggtatgtacgtatacatctttattttctacaatgagcatgtattacttttagaattagaaaatcaataaagccattttctctttggagaaaataaaagggttctatagaaagaggataaaaggaacaatgatttctggtagaatctgagttatcaatgaaaaagcttccttggagttttcctgatgtcctctgtctccccagtatgaactatttcctgatgccctccatgccctatctcaccccctgccaccccgtccccctgatatgagcttctgactgttttgtctcagaatgaggctggtttgctagagatctttcaatgccaacagaatcagaaaaatactcagtaaatggaaattgattttttaaaaaagagcatatttcattccttagctaatcttgaaaactattttatatgcttcttcccttgtggaacttttgcaatttcaagcacacttgggctttaaatcatggccattttcctattactattaatggcaagcatatataaggaaaaactgaatttcatgaattcttcatgacagttcacggaagcttgagttaaatgtggcgtctcaggggagtcactgtgcctggcacctcttctctgcctgctgtcctcagggcacctgcccagcccccacagagcccttgctccttctcatatctgtgaccctgcagccttcctgcaccaccaaatggtcttccttcactctttccttcctgatgcttcttttttctctattcctgtttctgtgattcccctctctctctttttcactttttactcccatcgcatttccttactttaggaaaaaacaagaaccaaaccaaaccaccttttctaagtataacagtataactcaccattctttttttttttttgagacagagtcttgctttgtcacccaggctagagtgcagtggcacgatctcggttcactgcagcctccgcctcccaggttccagtgattctcctgccaaagcctcctgagtagctaggattataggtatgggccaccacgcccagctaatcttttgtatttttagtagagacggggttccaccgtgttggtcaggctggtcttgaactcctgacctcaggcaatccacctgcctcggcttcccaaagtgttgggattacaggcatgagccaccgcgcccggcctaacccaccattcttttctggtggtcactgccagccttgaggagggtgccatgctgtgtccttggcagagtggtggcctgctgagtcactgggggtgtgtgtgcagagaggggagtggaggtgggtggggagtgagctaaggaggtctggggctccccataaggggggctccagcaagaccaagctctttgcctgtctagtacagttgtactgggtccccaggcggcctcagggcacagacaatgtgaccatcctgcctccccaggacttgcgcagctcactctagaccagaggggccaggttttgtctcctccacctggcagcttctgctgctcttcctcacaaggttccctttggtcttgtagcctccagataagggtgctttatgtgcctgtgtctctctcatttgagagcaaacttctgagctgttgcacttctctctttaattcttaaaccacaaatgcaaacattctatggcttaggaattccagattcagcgcaccatgcatgacatactctgttccataggttttaagcactttgagtgataaaattgtatgtttacctttatcactcctcagcatcacagagtaaccagcataaccagcatggaacattcagttctttcccctcccttcacagtcatccttgctgggcagactctcaccatcccttgagccacctcctacaccaagtatcctgggagctcccaaagagatggggagggtgagtggggcaaggaagcccagagccgggaaatgcagcacccctcccctctttggaatcagtttaaattgccatccaggtgggcccaggcagctgaaatccaggtggtgtctccagcacagggtcccaggtgggcagagcagctggcacagctctcatgagggcaagagcgcccagccagagcctggcccaggtgagataaagcacatgagagcagagtccagcctccttgctgtggagtgaggcgagggcaggaagactgtgtggacggctgttttgtaaatccctgtgttcatggggaaggcattgcacccgcactgccaggattgggtgtcttttggctcaggcgctgggcagggctgggcctgaaggtgcctggtatttagagcaggtgggcctgacacctggcttgggctgcccctacttgcttctgagggcaggtggctatagtgttcacacaagcccctgtttatttatttttatttattttttatttttttgagacaggattttgctctgttgcccagctggagtgcagtgacatgatctcggctcactacaacctctgcctctcaggttcaagcgattcccgtgtctcagcctctccagtagcggggattacaggtgtccgccactgcgcctggctaatttttgtatttttagtacagacggggtttcaccatgttggcaaggctggtcttgagctcccggcctcaagtgatctgcctgcctcggcctctgaaagtgctaggattgtaggagtgagctaccgtgcccggcccattgcccactttttaataaggctatttatttgttgttgttgaatttagttccttgtagattctggatattagtcccgtcagatgcagagtttgcagatattttctcccattctgcaggttattcactctgttgattatttattttgctgtgcagaaactttttagtttaattaggtcccatttatatattattgtttttgttgcttgtgcttatgaggtcttagtcatgaattctttgcctaggccaaagtccagaaaagttggaaataaaacctaaagacatacaaaatataagcctcatttaaaaatcagatttaacagatatcagcttactcttttaaattgttttaaggctttctaaatgctgactctcaatttctgtccttgtttgattgattgattgattgattgattgattgatttttgagatggagtctcactctgtctcccaggctggagggcggtggcatgatctcggctcactgcaacctctgcttcctgggttcaagccattttcctgcctcagcctccccagtagctgggactacaggcacatgccaccacacctggctaatttttgtatttttactacagatggggttttgccatgttggccaggctggtctccaacttctgacctcaggtgatctgcctgcctcggcctcccaaggtgctggattatgggcatgagccacctcccctggccccttgttttattgtgaatgagtaacaaacagttcctggaccagcactggtccatggaccacactttgagtagtgctgctctaggccatgtattgtaacttttcttttctttctgttttattttgagataggaccttgctctgtcgcccaggctggaatgtagtggcgtgatcatagctcactggagcttcgaactccagagctcaagtgatcctcctgcttcaaccaccccagtagctaggagcacaggcacgtgccaccacaccccactattgattttattttatttttgtagagatagggtctcactatgttgttcaggctggtcttggactcctggcttcaagtgatcctcctgcctcggcctcccaaagtgctggcactacagctgtgagccactggtgcctggcctactgaaccttttcttcagagcttcagagctattcagatacatcctgaaaaggcctcctcttctctgctacctcaagtctctcctctggctcagatttggtgatgtagttcaagatacatttgttcattatttgaaactttaaacagcccaagccctcttgtgacccagatagtctccctcctatctgtccacttacgcctgttctgtgcccagtgacccaggctggtgaccttcctggacagcagcaacaggctggggggaggtatcccaggtgctcagggggtaggagggcaaggacaatggggcatttggtcccccagctgcctctgttggcccataggctgcagtatcccagctgtttcatcctaaggaggatcttggctcctggcaggcaactcactgtaaggctccagctctgtctgggatccagcatctgttccctctccttccccttcagcccagggtaggagaggtcctcagatcttcttagctctgagatgcttccccattaccagaaggcttccctcctgctgccactgcctttgtcaatgctgtaggtgctttattaagctctcctcaatcacttccttctagtaggaaggaagtgtctatccctgggactatgagtgacacgcagccttctgacttgcttttctactggctgaaatttgccaaagctctccagttgtcatcttttaaagaatgaagggaaacggctggtgcagtggctcactcctgtaatcccagcactttgggaggccgaggcaggcgggtcacctgaagtcaggagttcgagaccagcctggccaacatggtgaaactctgtctctactaaaaatacaaaaattagctaggtgtggtggtgcgcacctatagtctcagctactcagaaggctgagacggggtaatcgcttgaacccgggaggcagaggttgcagtgagcggagatcgtaccgctgtactccagcctgggcaacagagcaagactccgtctcaaaaaaaaaaaaaaaaaaaagaatgaaggaaagtattgaggggtgaccatactgaagtttttaaaaagtgcatatgatgtattgtgtgtgtatgtgtgtgtgtgtgtgtgtgtgtgtgtgtgtttgtgtgtgtagagagagagagagacagagagatctcaactgaattatgactggagtacagaataatattctgtccctttctgtatccccaccacctaggagaatgtctggtatgtagaaataatccagcaaatgtatacttcgtgtatgaatgaatgaagatacagagacttccttacttatgtctgccctattctcatatgtccctcatatacataccaaagccatacatatgcaacagatagtaaaaatatttgtcttttataacttggaacacactgaagacataatgaaaaggttggatctttggtcatttagagtattaattgtattaatttaaatatttcaaaaatagatggtagggagaaagtatgttgctcttttgtggtagataatcttgtaagtcttcgaaaactcttcaacatctgcttcaaaaggtaatcatttagaatttaaaaatgattatatatatatatggcagatataacataaatttactgttaacataattcacatgctagaaattgacctaagcactttaccattattaactcatttaatcctcactgcaagcttatgaggtgggtccccacgttctagaaggggaaatgggaagcccagagatgtttcatagcctcacagggttgtatgggatagacccgggatttgctcccccaagtctggcaccagagccagccttaggcgctgtgtgatggcaatgtacgtgacgctcccgtcctgtctgtgctgggcttagctggaatgctcatggcccgtgtgggtgtttggtcataattgctgtccctctcgcaggatgctgtcatgatgttgttcatcactgcccactgtgttcccctgcaaagatccatttggacaatccctttagtcccggaatagttgtgcttctttaggacattaaaaaacgaaataaaacaaaaatgtatggaccctgggattaagtttccctctttttgctggctactagaagcataggggcaaatgtatggctccaccatgcaggtggacacagcttcatggcctgcattattttgtgtgcaaacctcattacaggttccaacatttcatccctatctgtaattttgcttttactccttttttttgtttttgatttttggtgatttcacattgccattttctttccatccttatacactgccctcaatctcctccccagtctttttttctttttctttcttttttttttttttttttgagacggagtctcgctctgttatccaggctggagtgcaatgtgcaatcttggctcactgcaacctctgcctcccgggctcaagcgattctcctgattcagcctcctgagtagccgggattacaggcacccaccatcacgcccagctaatttttgtatttttgtagagatggagtttcaccatgttggccaggctggtcttgaactcctaacctcaggtgatccgcctgcctcggcctcccaaagtgctgggattacaggcatgaaccaccgtgcccaggcttcactctttttttcttaaacaaaatgggatgtagatgaatacaagcaatatattgatgaaacagtgaaatataattgctgttttcatttcagtgatacattttttcttacttagaatacgctgtccgggcatattttacctttatgattattctaagcctgaaaaatttgtatattcatacagaagtatttcttgttttacattgttaaatatttctgagtcatgttgagaagtatagtgcaattctgcggaagactctgaaactttatgagcttaccaaggcttatttcttgggttttttctaagtggattgttacagagaagctcaacagcaagcagaatgactgaacatcaaaggctgtctgaagacggtgccaggttataattttccttttacaacccctaatggacaaagaacctgcttttactcagctgttgccttttaaaattgatttggttgttttccccttgagcaaatatatcctttaattataagacctcatgagctattgtactacttcattcccagagaattttttcttttgctcttaaatgtttccagtgacagtgggataataatatgtgtgttgctagctaagagtgggattctaaatatacagggattcatcctaagcatctagaacatgacatataatgtcttgaggcattcttttaaaacacccctcccacccacattgtacttcttcctagtcattttttctcttcttgttaagatttattgcttctttggaggacagctggggactaaagtgtgctctacagtgaaattctttgctcaatgtattatcttgtggcagatagacctgcacaaatatactgtactttgtactatctacctgaagacacttactttgccccacaaactggtgtgcagtcatggcatgaagaagacatacacttcacaggcaggaaaacagggccagctttccagggagatggtctggcagctgttggcatggtgtaatttcaggaggtaagagtaggtttcccatgagcctggaattcctttagctgaggataaagcttttaaaaggctcatgtctttaaagatggcaacaacagccactggggactactagaggagggagggaggggaaagggttgggaaactactgggtaccatgctcactacctggatgatgggatctgttgtaccctagacctcagcatcacgcaatatacccatgtaacaaacctacacatgcacttcctggatctaaagtaaaagttgaaattataaaaaataaaataaaaggctaatggctttaggagaggtaagacattgacttcagagtcacatgagatcagctttccttaggagaaagggcagccctggcaatgtgattctgatggaacaagggtgtgtattatgggctgaaccagtgcttcccaaaccttagtgtgcatctggatcatttattaaaatgatgattctgattcacaaggtgtggctgtgccggtagatcctgcatttctaagatgccccttgatgaggtcaaggttgctggtctgtgggccacattctgagcagccaggggctagaagggctcagagggaagagaggagctgaggcaaaggctggggctagtagtaggatgggcagcagggaagaggcgagagctttggtgcagaaagatgagatccaggaggaggaggaggcaaagcctcccaagtgactttgagggtgggaatgaacatggtatgttagggacacacagactcaaagattggggtaaaacttctcacacccagctaactctttccattccttctgtttgatcagtaaacagaaattggctttcttgggtatgttcacatgggtgctgcaaaatcagtctgtgcagcaatccctcgcggaaccacccagggaggaaaggctccttgaagaagggacctgcagggtgcgcaggttttcagcatcaaactccctcgcattggctctatctcaacctgtagctgtttgagataccagggaagctaattgcttaagagcacaggcttcggaatcctacagatgtaggtttacatccttgctttgttacctactcactgggtaactgtaaacatgccatgtgtcttctccaaactgcagcctctgtatctataaattagagataataatagtactgacatactaggggtgttgtaaaggccacaaaacatgtaagcattagtacctggcacaaactaaatcctcaacaagtgctagttctcctctttcttgtccttcttactattaatttaataattctgcttgactaatccttctggcaggtgccactgtttttgacttttacttgctactgcaatcacctgcccacttatcctctcttgacctgcatttcctcaagctgaagaatcccagcagatagagctccaggtttgggactaatcagcagcccagggagccaagcagaggaggcctaggtttctagttcagtgggcagctttggcttctggggtttcacatgcttcttggagagtcaaatgcatgcacaaagattagggtatccctgataagtgtaactaccatggagggaggcattatctttgcttggaatattttaggaagtgtattagtccgttttcatgctgctgataaagacatacctgagaccgggtaatttataaagaaaaagaggtttaatggactcacagttccacatggctagggagacctcacaatcatggcagaaggcgaaaagcatgtcttacatggcagcagagaagagagaatgagaaccaagcaaaaggggttttcccttataaaaccatcaggtcttgtgagacttactaccatgagaacagtacgggagaaactccctccatgattcaattatcttccaccaggtccctgccatacaaagtggaattatgggggctataattcaagatgagatctgggtggtgacatagccaaaccatttcaggaaggtttcgcaaagaaggagcttttccatttgtctttagaagataaatcggagtttattgggcccttttcatagggtgaccagttatcccagtttgcctgagattgaggggttttggagatgcaggatttttagtgctaaaaccaggacagtcccaggcagactggaatggttggtcatctctactagtctgtcatgaccagggctacctgatcatgagtcaaggtcatgagtactgatcatcagtacttcctgctgatctaccgaatttgagctctctgaatttctactgaattagaatttccagaattatagcctgggaatctgcattttaacatgctttctggttgcttctaatgtacactgaagtttcagagtgctgcagtgacattttccctgcatcagggattcactctgtgttctctcagccacggtgatcctccatggccagcgtgggacacgtgagtggagaaaaagtgacgcaacatctctgccgtctcaacttctaccaccactgatttccaacttagccaggacagtggggccaaactggtatgcagtggggtcgcctaaacatcattgtctgtactcctggctcaccaggatttccaggtctcctttcaggctcagggtattctgaatgtcctgtgtctttaacagaaaacgggaccatggggcctgctttggttccccatgcaccacagttccttccctctgcctcagggatcttccggacaatacagcctccatcagtttgtgtccttgggtgagaagagcatggagcagagcccaccttcagtacacatggggcatgggtgagatgcaaacattatttgaagccactgaggttttggcatgcatggtcactgcaaccacagctaacttaccatgatagacacaaactccactctaacggagtgtgcctctaactatcctcagttcctcagttgtaggacaaaaggcagatggacagaactttccaaatagattccctggaatggagcagaaaaaaagcaaagatttccttttagaactccatgaacagaaactgagattctgaccgaactacaataaaaagatagccccacgtggccatccttaggcctttgtgcctgtgcaccaggagtttcaaggagcaaccagtcctgggtttggtttatggaaaggtctttccagcctgagtagaatgccaagaaaagaagaagccagaaatttacagggtcatggagatacaaggcagagctgtgggatctggacggccagcaggagcaggacctggccgtccagatggatattttaaagctcagaaagttttcccaaatttgggatggacttagtccctgggcaattgaattgcaattcaagtggaagctgtcttctttctttaccagtgaggcggttaatatacctatttctcttagctaacaagagtgagttaaagaataatctcaagtactgactgccaaaaccacaagaaggaaagggttcctcgtagactgcatgtgactcccccttgggtacatgtgcccactggcaattgcatttatgaggctctccccgttgtgccatcttctctctaccctgaaccaaaggtggctcctgaggctggcctggaaccaggacaaggggctatcaacatttcaaaagattccctgggatttttgccaagtcatttgaccagaacatgcagcaatatatattttgtgattactagagactgctgttccatttagttttgagtcattctgtctccacaggaagaagttgttagagagttgtagagctatgcgtgtaggcttctaggagtgagctgctcatacgtcttcgttcctagcgtgttgtgagctgtgcctgtctcttgttttatttctgttttcctcctttgtctaagatccccattcctgatcccttctccttcataagcatctgctctgacctctttgctacttatccttaaacacgctcccttgaggtgcgctcactgctgtgggctgagcacctactgtgtgctgtgctctgtgtcaagagtcccgcaggaatgggctcttactcctcacgccaaccttgcgtgttacatgtgcaccaatgtctctttcaatgcagagcgtccccctaggcatgctcctggcctttctctgcttacttttttccagatggtgagtgtggagtctagagctgggcatgcacagctctgcctcatcccttgggagcagcccagtgctcttctctgtttcaccctgagcagagaagagccacatgggctgcccggccacagggtgtatcagcaactacaacctgcatcctctaagacccgcttccccagaaatatggtcttttgccctcatctgccctgctcctctttcttatttgttaattggttcagaaccagataggaatgagggatggtttttattgggccctttcaaaaacttcaacattaagtattattattatttctttatacagacaagtgtagtaaggcacaaggagattgagtgaatctcaaagcttaatttcttaagagatggcacagtttggaagctagcaccagacattctggctccagattctgcactctaaaccattacaatacactgctcataaaatatgaagtgcttttttaatgtatgtatttttagactttgtataaatgtgctatcacatctagtttgacgtcttcaattttcctgtgctttatattatgtgggttcacccatattgctggatatgcatctatttctttgcttttgatgactatagggtggtatttgtatggtcaattagtgagactatctttcacattgatcatattgtcccatttcaacattagattattttatataatattgccttgggggaaatcatatacaggtataaatgaggtgtgtaccgaaagttacatcagatatttcaaacttaaattgcattttttccaataaaactgttacaaattagaattctcccttaagctatgcccaaaaaactcaactagtcccatgtagttataaaagctttaatatttcacatttgcaagatagagtggtagaagccaatactgattttgggggaaaatcctaaatcctctctgtgtagtatttgggttacagggagcacagaaggctcccaggattgggaaaagcttaaggaaggaagacaaagggatgagagattaagggaagggggtggagctgggtccaaggaaggtgtgcaggggaagacctgtcattgtgtggacgctggggatgagggaccttggggtttcccttactccagcccagaggcccctctccagaatgctcagccactaccacctaccctcttaagacccagactgcattcccctagaagtagctggattgtttttagtgggattgtccttgctggcatggaaaatgcttcccccacccccaccactagtcccctcctccagtgggcagagtaggatatgttgcccccaggctcgctgggtgtgcccagagccaagactgctggctccagtttctctgtttaatccacaccttctgaggcagatctgtctggcttacctgtccacctccctggctcctgttgtactccatgtcccttctggggtaggctgccatccctgccctagttcccagcagtgacatcccagagctggatttcaggaaactgaggctcagggacattccaatcaagtcacctggctcccagcctatgctgatggggcggaaacccagttctgttgtgcatcaggcatggaatccacccgcacttcactccccttcccagccaccttccctcaccccattccgtggtgacctttcatagcccccctgccctgcgatgtcactctgacccacacatttgttctgctatgaaagatgcctgctggggtccttggaagagccagaacatttatgtgggggcatttggaactcaagggaagttctgacatcctgatccaagagttcacctgggatgtgccttctcatcacagtgaaagtgactttgagctgtcctgttttacgccaagtaagtggaatccttagggttctggctgactctcagcatcgccctcatccaggcaggttaccggccctgccctggcccacagcagcattggctcagaggattcctgctgcaggtgagaagcgagccagaagactgagtgcgtgttttgtattcacaaggccacgtgcattctagacttgactatttaatcactcttgtgaggagtgttttaaaggagaagtgcagtgctgcacaaagcagagaatgcagacaactacccagagggaccgctcagcggaggcctgagcttaagtaggagttatcaggctccagggggctggggtcaggcttcagtttgggtcacgctgagctggggtggaagtgccgtgcctccaggaaatccggctctgaagtctctgtgagaagtctgggctggaaatttaaatcaatcgtcggtggtataagatggaagtagagtgtggagggaggcaagcctggactgggacctgaactctgagagaactgcaagagcagaggggagtgagtccccgcacagcagttgaagtgtggatgtgtggggagaagagaggtggggtagggctggaagaggatctggatggaaggagaggcgttttctttgggatgggagagacacttgcaagctgatgatgggtgggtccaacagaaggcagggaagtgcaatctagcaagcagagggagggattggcttttgacaggaggaggttcctccctccctccttctggagagaagaaggagcggatgtgcagatgcaaatgtattcgtagacttgggaaagtaaaggaagcggttccttttttgtggttttgattttgctagtgaaagaaaaacagtactcaatgagggtggagggagcataggtgggaagtggtgggagtttgaggagcatggagaatcaggcccagaaaatgagcagaagtgaagaaggctgcatagtcaggaccacagcagcagaaggcacagagcccacctgtgaggacacagctgtgttcgaacactacctgccgtggctagtcctgaccacacgtcagccctgagcctggacaggggactcaggacacccctgctgggatcagccattgtccctggaagtgagatggtgctgccatcacagccacttccagaaagaattcttcagtgtctctgcctttttgcatcacttgctctagatgcagactcttggaaggaatcatgcaattcactgagcccagcgggtgcatccctgctgccttacctgccaggggagctgaaaaagctggtattttcagcttctaaagttggagttgcattctgttcccagcaagattcatacggtggaaaggggattcagatccttggaagtcaaggaaacaaaagacagatacctgcaccatggcttcctctctggccttactctggacagctgcccagtgtcccttgtgctacacccaagcacccagagagtggcctcctaatcctggaactgtgaccttcttagagtgcaggttggtgcctctgcagatgcacagcctcttaccttatttgggcttgtcattgtgacaaccaataaaatatccccttcaattttccagacaccccagaccacggtacgacaactaccaaattaagggatatagtgttcagaaagcaaaggcagcttttgggcaaagggcaagttttaagaagaatatttaatctgtagcccagctgatttgaaatgacactccgacataaagctcactcccaaaataaatattctgactaataaaattaaacatactgagccaatttaagtgagcttcgttatgccctttagaaatgtagtcaaaaacgtttctgaagtgtcctgacatgagtaagggcattggaaaaacagcaaaggataatttcagccttaagtaaaactctgagttagccaaggatgctgaatcttaagaaagatgtaacagaaggagaagggaatagatatgacaattaaaagttggaaagaaccattatgagtgcagaccagaaatgttaacactctttagatagaagcatattggccaagaggaggaaactggagtgttatggagggtatgaacttacttatgaaaaacaacaataacatcatttagaatctaatttaggacaaattatcatcactgagaaatattttgttgaagcctattctggtgtaagccacttataaaaatccatatatttttaggagttgtttggtctaaaaaatataaatagattgaaggaggatttaggtaacttggttgctggttattaaagttgagttagttaaatctctttgttttggaagaacatgactatagaattttctttgttctgtaaagttcgtcagacacattcttaggctactcatcagttcagcaaaaaagtgtgaatgagaaaaagtgagttttacagggagaaccaggtccgagacaaaacaaatccatgacagttgaaagtcattacagagagtaggataaacgacaagactcagttatgaaattgagctcagagctgttgggttccggcagacctcagtttatttatagtcaccaccaaatctatttgtaagttgttagttgtggataaaatgctcttgagtaacagtttggtctcaagttctgcaagtctatttagggagtaatgattaaagaccactaggactgaaaattatgccatatgtcatcaatccttctctttcctcccctagagttcaaagtttatacgtataaaatctatgtgtcatgcctaacaacttcccctttgtcttaccatttttttttttcctgaaatctttcattaagattgtcattttccaagttgttgtggtgacccaaatctttagactgagttttggtgtagggattttatttctcaggctcctgtggttcttttatattagaaagtgagacactctctcttctcctttccagtttccaccctaatctttgcctcctgctgacttgaatctcgatttttttaaaagaacctagggagacagggtgtgggcatttaaattctgggcaggctgccatgtgggatggagagtagacatctgtgctactccacaggggaaagagggctgatgagagaaagtttttgacaaacatggaggaaacctgtaatggccagaacttgtcagcaatgcagtgagttcccctcagaatgagatgctagtgtgggaggggacttagggacctcttgaggcccttcctctaagtttctggagtgatccaccttccctcctctgggtgagcaggtacttctgggaaccagtaagaggagctgagagtcagtactccttagacctaaaccaagcacactttttttttttttttgagacagagtctcactctgtcgcccaggctggagtgcagtggtgcgaccttggttcactgcaagctccacctcccaggttcacgccattctcctgcctcagcctcccgagtagctggggctacaggtgcctgccaccacgcctggctaatttttttttgtattttttttagtagagacggggtttcactgtgttagccaggagagtctcgatctcctgaccttgtgatccacccgccttggcctcccagagccaagcatactctttctgatagtgccagggcctgagtttttcagcacagggtgatgataaacccaaaagaaagaagtgttcttgctgaactattggcagatggactctttgggccaggattaaaaggatcccttttcagactggttgggttgtattttcatccctggccttggttgttctgtgaggattgtacttcattttgtaaaaaaatgtcaaaccaggttaataaactgcagttgaattttaatcgccatcgtttcttctcaattaaaaaaactctataaaattggctcagttgatcagtttttcaaatggacaccaaccacaaagtaaatgtaattgcttggttctatatttagtgacttatttttcataatttgtatttgtattttgtacctgggtagtaggggcatttataatttagttaataaaaataaatgtttcaaagtgtctcccccaggttacttattaattacaaatgtaaaaaaggtaacttacgatggggaaatatgatggacatcttttgaagcaagtgatgaaacttagcattatcaataataggacagcttggcttcacgtgcttcttggtgacatcatgagaaggaagtgccacccacttagtgatctggccaagaatgccccacctgacagcactttgggaggctgaggcgggcggatcacttgaggtcaggagttcgagaccagcctgaccaacgtggagaaaacccatctctactaaaaatacaaaaattagctgggcatggtggtgcacacctgtaatcccagctactagggaggctgaggcacaaggatcacttgaaaccaggaggtggaagttgcagtgagccgagatcgtgccatggcactccagcctgggcgacagagtgaaactctgactcaaaacaaacaaacaagaatgctccatctgagtcaaattatgataaaataagcagacaaattcagactgtgggacgttctgtgattctgtgaccaattctatgatggaacattaagacttagaacagactgtgggacattttggactgttcaaaatgtcagtgtcaggaaggacaaaacatgttgggggactgctgtggattaaaggggacaaaagagacctgacgactcactgccgtatgtaatccttgattaaatcccgagatgggaaaataatacaatggggattattgagaggatcagggaaatttgaatatggacaatgtattaaatacaattttgaatatatggtaaaatttcttagacatgaaaatgttgaatttatatagaagaaatatccataaaatttcttagacatgaaaatgttgaatttatatagaagaaatatccatgttcttggaagataacatgctgaagtatttaggaggaaagtattatgatgtctgtaacttcctttcaaagaatcaaaaatgtgtgtgtgtgtgtgtgtgtgtgtgtgtagagaacaaaaaatatggtatattgttaatagttggtgaatctaggtgaaaagcatgtgagtattcattgtattgttctttgagctgtcctgtaggtttacaaattatgcaaaataaaaagttgggagaagtaaattatgaaatgctaccttgtggaatagtatgtttattaaattataaagctattgacagactgatctcacttttattataaacttagagttttctggcacagggagtactatttagttgagtaggaagcttattttgtatgtgactttaagtgtacttgcacagtattttgcactttcacaatcccgtctgttagtttaatttcaattcaacaacatgtattaagcctcttttctgaggatataggagtgattaagaccaaagatggtgcagcctagtgggaatgacagatgaaaacaggtaccgcagtgcatgacaggtgctcttttagaaggagaatatcaaatttgtatgaagtagatattattcttcattttcttaaatatcttttttgatcattttatgagcaaataaatgaaatctcagagtaggtaagtcatgtacttggagtcacatagccagtgggtgacagggcagagatatcccccccaggggagttgattctactacaacttagcttagacaccagggtaggaccacttcggggttcagctctgtctctgtgtttgccaaatggtacctgccccttgaactcagtagcagctacacagctttactatccatccatccatccatccactcatttattcattcatagcatgtattgaacacctattacatgcagtcagtccaggaaggccctgaaatgaatagaggacaggctgtaccaatctataatttcagaggcttcagagcatgcagcactggggtgagaaacaaggatcagaggacaccctcttgtcttccctactcaccctgaagtcttttgaagttgaagtgcctcacactcccccttttatgatcattatctgctttattaaaacattatttaaaagactactttgtttctctacctaaacaatcaccaacacacttcaagctatctttagcttattacaaaagcacgtggagagattacaactcagtccctctccatcatttctccccttatctctgacccccaaatacgatctctttgaaaatgcacaactttgcctttctacctacagtggctccatagcttggtgctttctagtctcacagagggtcctcgtttatatcagcaaatctctagcagcactcatgtgtgctttgaagtattttcagtggccaaagagtaaacataagtactgagagtaaaaaaggaatgtagcagaaggagtgattcaacaagcatataatttaaaattaccaaccaaaacagaataaatccctacctgttggcttaacatgcctgaacctggctgtgaacataattatgagaccactcactctgcctcactatgacattttgaatctgcaagtgtcagaggagatttgctgcagagctggagaccttggcaagattccagggcatgttacacagcaggggtggtgataaataacacatatagtcgcttggtgcaaatgggatccaaaccaaagagatacaccctaccaatattcagagcacataaacatacattggggaacctcagaaataattcctgagacaaaaatgggagggaaacattgaaaagtggcatgttctagctaattagtgctggaagatgagttggtgccatcagtggacttattaagttaggcctgggtggcaggatactgtaacaggcagaggggcacatcaattgctgctagagttgggatttttaagtgtcataatgcttcaaaagaatctggccgggcacggtggctcatacctgtaatcccagcactttgggaggctgaggcaagtggatcacgaggtcaggagatcgagaccatcctggctaacacggtgaaaccccgtctctactaaaaatacaaaaaaattagccgggcgtggtggcaggtgcctgtggtcccagctactcaggaggctgaggcaggagaatggcgtgaacctgggaggcggagcttgcagtgagccaagatcgcaccactgcactccagcctgggcgacagagcaagactctgtctcaaaaaaaaaaaaaaaaaaaaaaaaaatcaaacgttacctagaaacaagatgaaacttgtggattaaaggggacaaaagagacctgacgactcactgccatatgtaatccttgattaaattccgaaatgggaaaataatacaatggggattattgagaggatcagggaaatttgaatatggacaatgtattaaatacaattttgaatatatggtaaaatttcttacacatgaaaatgttgaatttatgtagaagaaatatccatgttcttggaagataacatgctgaagtatttaggaggaaagtattatgatgtctgtaacttcctttcaaagaatcaaaaatgtgtgtgtgtgtgtgtgtgtgtgtagagaacaaaaaaatatggtatattgttaacagttggtgaatctaggtgaaaagcatatgagtattcattgtattgttctttgagctgtcctgtaggagaggacagagaggctcccttctgagccactgaagctacttctttcatatagctttgtagtagcagaaagtacaactttagaaaaccaatgccctgaattaacacttgagatatatcataacatagctccccacccctgggctctctagaatagaattttagcatattgggaaataatgtttggcacttctctgacaacttcttccccccaagatgaaacacgtcaaatattcagtacctattaggtcctgtgacatagcaaacactcagtgggtggaatacacttaggctgagtgtttttatacctgcaaggtgtgggtttgttacttaacctctctaggccaaactttcctcatctttaaagtggggttaataaaactccgcttcttattatgaggtctaaatgagagaatgtttgtgaagtgcttaacatggtatgtggaaagacagtattcattattcattaaatcatgacctattagataaatagttttttagagggttatgtgtgctatgattgtgggagtttggtggaagggattaagaatgctttgaatgattactgtattcaaaaaagtttcatttgtagtctatcaaactcacataattaacagtggccttattttgatgtggtctgagagagatgtgcaaagagtttttagcgaaatatattagctctgattttccaaacatgaattcttggatttcctatgaattccttcactacataataatgggatgtgtctttggaaattgttacacctacgtttagagtattgctttatgattttcagagtacattataattcctaattagtttttatgaggttggatcactttttccacgtgttggtagacaactcgggagtgttaatctgagcccaaataagcacttttttcaagatcaaagagcaagtgtttgatagggacagaactggctgagcttagggtttccagtaatcagtgtgacaattcttccttcctcagagataagcaaaggggcttctttgagcaaagggtaaatctctgtgcctgagaggagtggttctcaaagtatggatgagaacctgtgagggtccccaagaccttttgggaggtctacaaggccaggggtcctccttcctccattacagatctatgtgaggccagatcttcaaatacttcagccaaacaacatatcacatcagagtgaatgaagaagcaggtgtgggaatccagctttctcctattaagccccaaactcagcgagcttaacaaaaatgtaaagcaatgccactgctctcaccaaaaatttcatgttttagaaaatatagtaatttttaataaaatatatttatgctaacatgtaaaatgtttgttatattaaatgaattaatagtatatctaaaagttttttaactttaatttttaatatggtgcacatcaatagatagaactcatacaaacaaaagtttttttaggtcttcaataatttttaaaaatataaagggggtcctgagaccaaaaagtttgagtctcattgtcctagattttttggcttctgctttggggtttggaatgtttacattagctggcagttctcagacttaaaaaaaaaaaacaacttaccatactactgtttgtgaaaaatattaagatgaaactcattttttttttctgggaaagaaaaggaacccacagggtctgagcactccctactccccaactagaggagcctgtggttcaaagggcattcttgggctagaggcgagtgctcctcagacagtcaccgggaaatctgttgcctgggggtcagggagcctggaagggggtggggataatcctcactcattaacacattaacatagatttgcttaacaccgtgttcaatgtcgtaccaggctctttgggaaataggacctcagggttcaaaattcaagccagataagttttgggggaaggaatgggaataaactgcaaaggctcctgggattcacacatgaggcaccatggagttgaagagtgggaggtgaagaaagaaggaccgaagccccacttcatctcttccatacttttgcatcatcctggccatgggcaaaagagtgatgagggcgaatgagaaagccaataagagggagaacaatcaggaaaagatgaggccggaggagatccacagggaaggagtgctaccactccatcaaatggctgcttgggtttcagttctggcagctgtgatctctccaaaacctggaaccagggttaggacactgctgggaaacactctgggctgttctcctggttcttggccctgggagggtttagcacgtaatgactactgcttgccatcagacttttctgaatgcatagactttaagatacactgtagactggttgcaatggaatggcatattggttaaggtgtgacaaagatgatgatcaatgtgtatatttggtggagaaagaaagataatgatttttgttttgaatttgatcagcttgagaggctgcagctgggtagagatgtccaatagacaggaatcaggatcgggatcttgagcaagggattgtggtgggacgtgttgccttgggaatcagcatcacatagagatggtagaagctgtgaatcgatgagatgacattaataactgtatctcttttgttttatcagctcttccatgtggcctatattttaatcaaatttgcaaattctcctcgccctgatctttgggtcttggaaagatctgtagactttggaagcacctactcaccatggcaatattttgctcgtaagtaatcttgcctaccatgttatgcatggctttaattacttggaacagataaagactatggatttaattagaaaattaatcttggctgggtgtggtggctcacccctataatcccagcattttggaaggccaaggcgggtggattacctgaggtcaggagtttgagaccagcctggccaacatggtgaaaccctgtctctactaaaaatacaaaaattagccaggcacatgcctgttatcccagctactcgggaggctgaggtcggattatcacttgaacccaggaagcagatgttgcagtgagccaagattgtaccactgcactccagcctgggcaacaggatgagactctgtctcaaaaaaaaaaaaaaaagaaaagaaaattaatctctcagtatgactagttagggactggtcacttttaacctctaaattactctcagaacattgactgggcgcggtggcttatgcctgtaatcccagcactttgggaagccaaggcaggcgggtcacttgaggtcaggagtttgagaccagcctggctaacatggtgaaaccctgtctctactaaaaatacaaaaataagcaaagtgtggtggtgtgcacctgtggtcccagctactcgggaggctgaggtgggagaatcacttgaatccaggaggcggaggttgcaatgagccaagactgtgccacagcactccagcctgggtgacagagtgagactccatcttggaaaaaaaaaaaaaaagaatatccccatttttcaagcatgtgttcaataatttcaaggatactacatgcagaaatgaagtagaaactccttttatgataacagttcttggcactatttgggagtacctgtaagatggtagaagctgtgaattgatgagatgactttaataactgtcatctccaatcttttcccctttatgcagaattagaaactaagttccatctttatagttcctgtgctgtgctttacttacctcaactctgttatcttcactaatgaagaatgtcagggtttctgaaccctatgatgaacagaggtggacaagaattttgcttataaaggcattgggttttccactaggtttccttagaagataaacttgcctaagtatgagcgtggagttagcactgcatctccaagcattgccactgaaagtcaactggcctgaaatggcttggtattttctttcatgaattaaaaactccattatcagcctttctctaaaagttttaaatgcctttctgttttttctttctttgtgtattttcttaaggaaacataaggcttcttaagagatttgcaacaaaatgataatattttgttttataatattaaaatattttccttctagattctaaagtagactgtttaaaagaatttgggcgggaggcaaatatggctgtcacccgggatgatgatgtactttgtgttactgaatattcccgtattgtacctttggaaaatggtgaggtaagtagatttggaagactgggagagataagactcagaaatgaccatgaggatatccaatttttcataattgcgaaacttgcactttcaaggacatctaacatagatcaagatggaaacagggcttgggactgaacagtaaaggaatcacattgagggctcccagaatgagccaggttggaaattctgttgggggatttcagttatccccagaaagtcaggattcttgatccaaagcccgcaggtcttgaactgtcctttctggtgatgtatttataaagtgggttgctggtaactgaaatgatgaccccttacctcttcacctatgatcccatgataccccgtaagagtgaggagaggaaggacaggtggcagcaggtagattttctctatactgtctcttccctcatctgatgaccagatgtaggggatccagaggaggactctgaggtcctacagaacggctgcacctctagatagaaagagcctgcttccctgaatgactgcatggagccgatcctacgtgatccctgatcccttttggtagaatgggtgtaatctgttggagagaaaaaattgctgtccctgtggggttgcatttggcccttgtaaagtcaggttggctattgttaagggagatgggcaaacaaaggtgaaacaatcagagaagatttccatggaaattgtgaggccataatgaatatgaactgagtttcaaataaacttccttcaaaggtgtcagcctccctctctttaagtagagagatcttacttgagcatgtgtatgcggtatcttctgacagctcatgagtggttcatatttccaatggttgacacttgggcttcatcactttgggctttaaaacaaaatggagggtttacacagtttttttttttttttttttttttttttttttttttgccccattactgtcaaactttatatctagagatttccttttttcaacctcatgtagatttttgggttactttagctttgtttctttgatgcagcttaagaaagttgtgtccttatatttacaggttttaacattatgttttcaacatttcatagtgttacagtcccacaactaccctgatagaacaaaggctttgaaaacgtaatgataacatctcccgagagcccagatttcaaagacgtattgccagaccttggaaccaggaagtgtgagggaagatgggactagcaatgatgtttttagacataaacaagacccaagaccccctacgaatatcaaatggctcaaagaaaccaagtgccttggggcatgtgagttatttttacttacttgctgctaaattttgataaaaggaactttttccccctttatgtgtgtgtggtcattttaggttgtggtgtccttgataaacggtcgtccaggtgcaaaaaattttactttctctcacaccctgagggagtttaccaaggcaacaaacatccgcttgcgttttcttagaaccaatacgcttcttggacacctcatctccaaagcccagcgagatccaactgtcactcggcgggtgagtagtcagagcatttgttttgttactttatttattcatttttttggcttaccaaattaattgccttgaactcttttaagtaacctttatagcctgtaatgatgtaggtgtgggagttgttcttatctgaaatactagatataattaggagtttatatctaatgacttataaaaatggctgtttgaagaaaaatcattatattcaaagaagatgaaaggcaaatgattatagtcagcctggtactagtctggatgggataattaatactacagccaacaattcccaaatctcagtggcttaacaaaataaagctttgtttcttgctcctattacagtttaacatgggtcagcaggtaggatcggctccacacagtaattcagggaagcaggttctttctatccagaggtgcagccattttgtaggacctcagagtcctcctctggatcccctacctcttggtcctcagatgagggaagagagagtatagagaaaaatctacctgcttctcatcagaggttacttctatgggcaagaactggtcatatcatagcctcacttagatgcaaggaggctgggtgatgtcatctagctgaaatggaggcacataggtattggtgagcactagtaccctctcctgtgttggaggtacaccatgaacatctctcactctcaggtgtcagggcagtacacttgtctcctgggcacagagggagcccacagaataaacacattgagctcactcttcttccaccctctgatctactggtgccttccattggccaaagcaaacaagaagccagagagaaagacagtccattggttgcaaccataaagttcagctcctgggcacaggacagggtggagaacgtggagagcagatctggagggtgaatggaagatgcccagtgcaccttatagagtttggctttttatataggtaacatcagagagctgggaaaggaagggagggaaaagtataagtattgccacagttttgagcattttccagaaaggcaggcaccttgggtgtaggtggcctatcttttgtatttttttgctctcctcagctccctctgagcttctgtgtagttggggactgtgttgaatctgaggatggatatttacaagggagggctggactttctcataaactatagccgggctgtgtttctgttcctccatgtgccctggagcactgccacaaatgtaccctaccaattttttttttcttaaattgtctttttgggggttgcaagatttgcagtcatatatatctatgtatattacttttcacttagatgaatacaggcctctccattaaataattgttttatggagtataccacacacataatacataatcttaaccccccaagtttaggttgcttctttcatggaggaatataataccagctaccttatgacacagatcacgtgtgctgctgggtgaaggctgactgggggcttctcttgctgctgctgcccttaatacgtgtggaggggaacttttacagtggccagcaggaaagcccctgagtgttaacttgtcacagaaagccctggtaatactgactttatctgtattaacaaggggggctgttaatgccttcagactaagatgtttccaggaagcattgatactttaacaggttttaattagggaaccagaacagaaccccaacattaaatcaatagagctctttaaggcagccacactcaacaacaacaacaacaataaagggacaaaaaccctcttgtccttgcgaattcaaagacttcttgctgacagatattcttctcactggcagcatggcctcaatgagaaagattgttctacagtcctcacattcctcccaaatcctgggcagtctcctgccaagtctgagaaggaaggttgctggcagagggagctggcaggaggagctgcctattgtcagcactgcagaggcctccaacatattggagaggggccttgtcaatgagagggtatacacatatttgtggcctggtttaggggccaatcctcagctggatctgagctggctctgtctggcctttctggagcttgaaactttgactctagcctttttgaccctgtgctaggaagtcttcagcaaatactggtggcccctccagtctcagggatgtattggatccatctctgtaaatattatctcccttcccagaacctgggatagtattttgcgcaaagcaagtgcaacattttttggtataaaaatttagttttgataaataaatattttcaatgtataaaattcatttgtaaagaacataatgtaaaaattattttaatttacataaaaaataaacttggaagtaattgatccctttcctataggctataaagtatgattcctttctaaggcaatttcccttcatgaacttcaagcatttgatttttttaaatgcacaaattcagcagtatgttattacattttattgaggaatgtgtttattttataagacatgttacatcccaatgtagggctcaagaatacggaattttaaaagggaagcagaggcagcagatgtgggttaaagactagtaagagaaagtttttgtcactgttcagtgaaacttgcatgttctgtgttctgttgtgcagtattattacagcataaaggacatcagcattggtgggcagtgtgtttgcaatggccatgctgaagtgtgcaatataaacaatcctgaaaaactgtaagtacactgtacagatttttttcagccttactatgattaagtctaattatttcagtggatgtttgcatcccgttaaatgtttctaggttcctgtcctcaataggaatgattcaggatcaatgaataggtggggggtgtgtgcctcctctccaccaactctccattttctttcacataacccctataggccctggcagacacggctaatcaatcacagcactctggaaaatctgtgtcccagccaccagatcacccccaagacatacctcaggcagccaattgattagagctggcaagagaaataaaacttgtcattcctggtttaatgggatcagggtatacatttcaaatccttgttttttaaattgtggtgaaatacacatcaaatttactattttaaccattttaaagtgacagttcagtagtggtaactatgttcacgttgttgtgcaaccaatctccagaactcttcgttttgcaaaattgaaattctatacccgttaaacaactccttgtttcctcctaccactggcccctggcaaccatcatgactatcctaggtacctcatataagtggaatcatacagtatttgtccttttgcaacaaatactgggttattaaatttgtcatcacttatttcacttagcataacgtcctcaaggttcatccatattgagcatgtgtcagaattttctttttgttcaaagctgaacagtatttccttgtatatatgtatatattacattctgtttatccattcattcgtggatacacacttggggtgcttccaccttttggctattgtgaataaggctgctgtgaacatgaatgtaccctttttgtttttagtttgagtatattttgcatacaataatatgcatgagtcttaaatgttgaggttcagccatacatttgtgttaccactgcaagagggatactttaaagggctggaaattaccggatgccagatatagtaatcattttatctcaatgtttaacttaaagtctacaatatttcatgagcagcatttaccagagatgtatttcacttttagtcagattcaggcttgtgcttctttaggtctagctttgtgttcaggcagaattgctagttctcaaggtctgtgatgtgcgttgtggggcccttctccttgaccagccataacccttaatgttgttgttcccccttcaaggattcggcagtgctgttgagagagcttacgcacaaaatgattaaactttagtggaaaatgacttgtttattaatggttaatctatttccaccctgtaatctcctatctccctaagacactagaaatcaggtcacataagttctgagttggagagaggagagaagaggtccagctaatgtccctgagcctggaacaaaatactgccatgtgggaaaggagtacacgccatcacagagggcatgagcttcctgcttagaaaggctactgaaccctggagaccctggagaactggaggagttctacactgggtggttaattctcccaatacacatgtgtggaggtctccccaagccttggtgaaaggctcagtttggcagcaatccacttcaacatgactgcctgcctttccttgtctgctggtttgcttctgcccaacaggctgaacttgaacaaatgctgatgaaatccacatccatgatgaggtagaaatcttataacaatttaaagggattcagaaacttaatgggtagagccaagcctggacaatcagaaaaattacttgctaatgaggcagaacccaagaagaggggtttaaccaagcatgtgtaccatgttgaccttgctgcatggataagcggaaggacctcaaatttaattctgagcttcctagcagccaactcaaaaagggaaatctgcttggtttcatatttcactatgatcataagctaaaaagtaataagttacttagaaaaaacatgattgttgacactagtgccaaataacaattttccctaggggtggggcagagtggtcatcacgaagggaattctctaatcaatgacatctttaaataacatatttacagcaggtgtattattaaccatcagtctgggctgcaacagaggaaaagcagtgatttggcagtgccaatgggactcagatgggtacccagctcctttttttgctatgctcaattttaatccccctatgtgtggagttggactacatattcttgaagcagtcttccctaaataatcttgtagtctagctaatgtcaaatgtttaattggcaatgagctgaaattgcctctccaacaagggcccatttggatgccacttgttctgtgctgccaggtagatctatgtccatgtgctttaacaggcagttgagtgtggagagggatgacaccctctcttgggaataaaactgaatatatgccacgccaccttcccttagagtagagttgatggaatccctacaggcacagccaagagccttcttagacaaggcattttgctgttgttcttttaatagtctcgggtctttatttgactcaaaccgaacactgcacgtctctcatatttaaaaaaaaaaaaaagctgtttgctcaatgccgcacaaacgacggcatgcggggacacccccgccgcttcccccgcccccacccccccgccaaaaaaaacccaaaaaaaccccacaacccaaacccaaagcctctttcatattcacgatattcaggaagcaccagctacggagtcaagcatcttggtttagatttagtctctgcctacaatcacggcctttgtcaagtgagtttatctctgagcaccagtatcgtcatctgcaaagtggggcaagttccatctaccgcagtgagacaggaaaggggctccaaaactgagagctgccatcacagtagatgttgtaagggccggacgaagaactccagaatcctggtgctaccagcacacttcacctgagccacggcatcccaggctcgggagtgccaagactcagggagccctggatggggcgcctgcacccagtccttccccaaccacgtggcaaccatgtgctcccagtggtggttgcctcctcagtcccctccaagcctccccgctccccgttccctgcccccgccccccactcccttcccccgccccgccccgccccgccccagtaactggctgaagcaccagggtgaattctgggtccaggagccccagactctgaggcctggggactggagaacaacgccaggctgggcgtctgtgccctcctccaacagggaggcgcgtgcttccccgcaaacccagcctcctggaccaacccagcccggaattagaagcctaggacgcccacctgacgcacgctcctaggaaaacaaccactacccagctccaagcaacccgaactttcggcaggctggttccaccttacctcaggccctgggcctcgcctggctcacgctcctgaggcttcaggccgtcttcccaccccttcatgcccccggctgcctcgtggctcccatccttccagatccagcagctcttcccacttccctcaggcctccagcctgcttggcgctctccagcagcccgggatgcagccggattcccacctctaacccttcccctccccttcctcctctccagcccctcctcctccccagtcccctccccagcccccaccctcactgccactagacccttcttggcctcgctccagctccccccagcagttgccaaaaagatagttctgaggcctcagggggctcatccatcgaatcttctgtggagtggtggcgcgatcttaggtgagagagagaaggcagacaaagaggaacgactcctgctccacagacagctgcgcaagacggaatcacaccagggctggacaatggttttgaatcctctttcaagtacggaaggagggagctcaaagcttggagttccaacccaaagccaaggctgaaacaatttcattttaacttggaatgttaaggcagatgtacacccttttgaaatgagacttttaaccctttgcttctctgagtggtctcagcttttggccccatgatggagctggcgcagcctctggaagcagagccctctgggatcttattagcagctggtccttgaattgggtaaagcatgaccacaggttgagagtaagaaacttgagcagatcttagtcgtaggactccagatctttatgcaggtgtgatacttaacacatctcagtaaagtcagcacttgagtgctcctgtgttcctttattgtaacaatggggtagagaagacagagctggggcctcagagccaagtgaggttggaagtctggctctccatttatcactgcctgacccttggcaggtatcttaatacctctgattctcagtctcaccatctgtaaaatggagataataaataagcaggatatgggaggcttaaataatacttgcgaagtgttgtgttctcctaattcctcaatgaatggtgccgtggatgaccgtgatgactcgtgtgtcaggttcgcactataggatcaactgatcctcatcaaaacttttcaataactgagatgcacttcgcccacatgcccaggtttcggtgtgaatgccagcaccacacctgtggggagacgtgtgatcgctgctgcacagggtacaatcagaggcgctggcggcccgccgcttgggagcagagccacgagtgtgaaggtgggtgtggggatggggtgggggccacacgtggccttctcccccctctccctgggggctgaggctattttccccatgctagagaagaggctgtggtcatgtcagtgttaggggctcaagtctgtctattgtaataagaacctcagactgcagggaaaagtgccctcctctgaattcagatgtacatttgagaagaaaaagaacaataatgatgatgaccatgcatgatggggctccgtgctttaatacgttgacctctttttttagcaatcataaatatgatgcaaccactataaaattttaacatcttatccatttcataggacgtgatactggataggaatcaactattttgaggaccaaggtccagagaagacggcaaggttgagtctaaacagggagctgggagtactggagtatggagtgctgggaagtgtaacatggtaggattgaggaggatggagaggaccagagaaggaataaaaaaagttgggaaactgcttttaagagtgtaacataaagtaagaaaagcgttttttttttgtttttgttttttaggcctgatgtggtggctcccagcactttgggaggcaaaggtgggaggattgcttgaggccaggagttggaaaccagcctaggcaacatagtgagactctgtctacaaaaaattgaaaaattagccagaggtggtggtgcaggcctgtagtcccagctacttgggaggtggaggtgggagaatggcttgagcccaagagttggtgcagtgagctctgatcctgccactgcactccagcctgggtgaaaggataagatcctgtcaaaaaaaaaaaaaaaaaagaagaaagacaactgctatttttaacaaacaaaccctaagacatccaactatagattttcttctaaataaatctccttgtgaagctacatatttattccagttgcagaaaacatttcattcactgcaacctctgcctcccaggttcaagcggttctcctgcctcagcctctccagtagctgggattacagacacctgccaccatacctggctaattttgcttgtttgtttgtatttttagtagggatggggtttcgccatgttggccaggctggtcttgaactcctagcctcttgggatccacccaccttggcctcccaaagagctgggattataggactttatactttttgaccaaatattttttgtaactattaggagataagactgatgatctcttatggccagtaaacttatgtaaaaggtgttcccagtggtcttccaagggagttttgagagatgctaaagttctgggaaggtcttgtggccatctcagggaaatgctctggcgcacctctgagtcccaggtgttgcttggatggccatctcactttatagtcacagctaatcggttccttctcaatgacttctccattgctcaccccagatgaggggaccagagagagagaaaggtataataaaagtaaccaggggttgtttcttttgctgctttcaaacactgatttaggatatttttaattgaattaaccattattacatgaattccagcatttgcaacctgattagttttccagactaatggaaccctttgtaaataacatgcttcactccaacacatacaaaaaaaatttaaatctcctttaataagtttttatccttttaaaatgtattaaattgttaaaagttacaaaaatagtgcatgaaaatcagacctatcaggatccatttattaggtgctttctaaattccctttgaaatatacaattcaaaataaacagacttcttaactgatgtagtaaatataaatgtcttgattttttaaaatcatggcaccacagagaaaatgaagataagaaagcattgagcctgttttacaagttatagggtaatttgtgtaatatctaattaagtcttccttcacatagtcacctgggaaattgattaaaacatacaaattactaacaagacttggaaattttgatgtaattagaatataatgaatatatagtctgcctaagaaagaataagaattttactcatgttaaatatttttcattgtggcaaagatgaaaatcccaaatgagttttaaattatactttgtaattttagaagtgttatatactacttgtagataacttggaaattaaaaaaataaataaagtaaaatcaccaagaatttaactaccccaacagtgtcttagtctgttcagctgctgtaacgtctgggtagcttataaacaatagcctcaaagttctggaggctggtaagtccaagagtaaggcaccagcagattcggtgtctggtgagggcctgctttctggttcatagatgccactttcttgctgtgtccttacgtggtggaacgggcaaggaagctttctgggcctcttttataagggcacttatcacctcccagagggcccatctcctaataactggtgattaggtttcacctatgaatttggggtggggggggcacaagcgttcggaccatagcagagagctactattaatattttgttagatacgtagtattttatacatactttaaatactcaagattatataatctacataattttatatcctaattttttcacttgatatttttagctatttccccatgttttcccaatcattaaaaatgctttgacatcatttttgatggtacagagttttgttccaagtgtttgttgagtacccactgtgtgctgagaactatgctctattgcaaacaaaacacatacagcccttggtgtcatagaacttaaagtcaaacaaatatattgttgcttgctgagccattcccctacaattaaacattaagattattcccatacgattaccatatagtgttgaaatgaaaggtttagagtgttggctaagagcataggttctgcagtcaaacaaagacaggttggaatttcgcctcttctagttataagctatgtaacgatgggcatattcctcaacctaagccccagttttccaatctggactatagggatgatggtacctaccttagagagttactgcacagattaaatgagataattcatgtaaagcacttttcacagtgtgttaagagctcaattgctattgttagtagtagtaatagtggtagtaataatattctcttcgtgcatgaagtttaattggcatttggatgtattttttttgacagtgaaattttattttattgaattttgtatgtataaaacatgccagtaaaataaagaaataatgaaacaaagattatatacaaaagtttttgaattaatactatttaaatacattagttgttaagggaaaaattagagctacatactggtctttcacagtaataaataataatgttagtgtttaattgcaattaaataaaaactccaactaaaataaatatattgctgggtgggtggctcatgcctgtaatccaagtactttgggtggccaaggcaggaggatcgcttgagcccagtagttggagatcagcctggacaacacagtgaaaccttgtctctacaaataattaaaaattggctggtcatgatggcacgtgtctgtggtcccagctgcttgggaggctgaggtgggaggattacttgagcccacatagttgagactgtggtgagccgtgaccacaccactacactccatctgggtgacagtgagatcctgttgcaaaagtaaataaataaaataaatatattattcaagttgttgacctaaaggaagatgctgcggcacaaaatacagttttaaggaggttacttaatggctgggcgaggtggctcatgcttgtaatcccagcactttgggaggccgaggcgggcaggtcacttgaggtcaggagttcaagaccagcctggtcaacatggtgaaaccccatctctactaaaaatactaaggttagctgggtgtggtggctggtgcctgtagtcccagctacttgggaggctgaggtgggagaatcgcttgaacccaggaggcagaggtcgcagtgagtcgagatcgtgccactgcactccagcctgggtgacagagcgagactgtcaccaaaaaaaaaaaaatttacttgaaccaaaatgaggatagctgccccgacacacttccaagttgccttgggcagtgctcctgcatttcagtgtaccttcctttgaagatatgattatatatctttctttgggagtgggggcggtggcagggagaatggagtctcactctgtcacccaggctggagtgcagtggcactatcttggctcactacaaactctgcctcatggttccaaggattctcctgcctcagcctcccaagtagtatatatatatattttttttttttttgagatggagtctcgctctgtcacccaggctggagtgcagtggcgagatcttggctcactgcaacctccgccttctgggttcaagcgattcttctgcctcagcctcccgaatagctgggactacaggcacatgccaccacgcctggctaatttttgtatttttagtagagacagggtttcaccatattggccaggctggtctcgaactcctgaactcattgtgatccatccgcctaggcctcccaaagtgctggaattacaggtgtgagccactatgcctagccccaagtagtatttttttaaaaaaagagaaacttcgctcatggaatatcaaatgaaaggagctctaaactgtatcttagtatatcctggtctttgtgtaaagatccctaaaaattttcccctaagagtgtcctgggtgttccagaatatacttttttatagctcaattagcagtaatactatttacgctatttactaagcgtctgatagtaataatgagaatattgacttattatgcttttttttcagcatgcaactgccacggccatgccagcaactgttactatgatccagatgttgagcggcagcaggcaagcttgaatacccagggcatctatgctggtggaggggtctgcattaactgtcaggtgaggcactatttaaatcaaagtggatgtgttgtcatggggaatgagtattcagtaagctctgctcctgaagagatgtcaagaaagtggcaggcaatcgtaagagttttctgagaccatttctccactgttgctcacacaaggccttgttagctggatgtaatttagggattgtaaggaaaatggactgaggtatgtttacccacacccctttgatcagtttctcgatttaaattttgcctaaatggagaggaggattccaggttatcatctctggctgctatccaacttgtgatagaaaaactctaagataggaggacaagtagttattaatgttagtgctgaccctacatcctgttttcagacagattctgagtctagactcagtgaggaaatgcatcatgatcaattaatgatgtctttcatagacatcaaatatgaaacactaatttttcattccttctgtaggacaactggtttcactggaatttagttaagggagtgtatggcggaagagggcatctcttcattgagatattcattaacagtcctgtcaaatgtttatgaatttggtctacattgtcattctttcttgtgttcttttaggtgttttgttaatgttaccactgaagaggcgttcttcacatgagatgcccattaatatgaaaccagggctacatacccatagagagagccaccattcttcatttgtctcccccctccatacttttatattatctgttattgcagataattaaaatataagtaaaatataaaatataaaataggtttgttacaaatcacaaggttttatgtataagtgagaaatcccaggataaggctaagcactataagaccttcaagtgatttgtgtgcatattaagttgcagaaacactggactagaatgtgtaggtagaatcttttctctggatgaaaggtcaagccccttcaatgtgtctttagaatactttgttattcttcatcattctctcagtgatattatgttttgtactttgctgttccaggaaaccatcaatgtagtcttttttttcatagtgggtctgcaaaaacattttttttttttttgcttatgaaattactgaactgttatttgggtgtactgcatttgttttccaacttaaatttaaaatgccttttactcagttagatatttaggtagcgtaattaactttaaaatgtttattgtggtaaaatagacataacataaaatttaccattttaaccatttttaagtgtacattttagcagcataattaacttttatattatattgataatcaatggacaaggaaagagttctgcttcttttatggtttagtggctgctgcaggactgaaccctcccatggaggattggtctcaattgattgtcttttctcttaagaatgggtcatattttaggtgttcatatgataaactatgggcaaaatacaaaagacaaataaacaaatgacaaaaccacaaaaaccatgatctgaaagcactgaagagtaaaaataagcaggaagatactggaggggagctgcaacttggcaaaacagatcagcatagggtgagttacatatttttatgacttttacccagaggggaggccaaagttggtcccatgtggtctggctaaaatttctctagaaatatggaacctttgtcttaaagctgtgttctctgaggaaccagagagcagagcttaggacaactccaacttgtggaaagttggtggggagtccaggaaaagagaagtcaagagcagggaaatccctaattctgtatataaattcttctcaagtttctgactgacccctcagtccgttttccatacaatccaagcacaggatggatttcatctgagactgaaataacttacttgacattttagttaccacttaagagtcagaatgtgcagcttgagtaaagttaattgtctcataaagaaaaaaaaccattttttagaggaatgctaatggatttggaatccttacaacacaatattcacaatgtctaggctacaaccctagattttgtaacatatgaagattcaaaaaaagtgacccattcttaagagaaaagacaatcaatagggaccaattctgacatgccccagatgttgaaattagcagttaaggattttagagctgctattataattatgctcaagagaatagattaaaatatagtcacaatgaatgaaaagataataaatatcagtagggaaataaaaactgtaaaaggatcaaaatgaaaattctataactaaaaaatgcaatatgttaaataaaaaatccattggaggggccgaatagcagaaaggaggtaatagaagaaagagtcagtgaatttgaagatagattagtagaatttatctagtctgaagaagagaaagaaaaatatatatatttcaaatgaacagagatttgggaactggtgagacaatagctaaagatgtaaggaacatgtaattggactcccagaagcagagaagagacaatgaatcagaaaaaaaagtgaagaaataatagtaggaaatacctcaaattttgcaataggctaagattcaaaaagcttaatgaaccctaacctggagaaatacaaagaaaataattcctaggcctagtggagtcaaactgctgaaatccaaagacaaagtgaaaatcttgaaagtagacagagaaaacattacaacatagtatgactgtggactttttattagaaactggaggtcacagaaggaatagtatctttaaagtgctaaaagaaaaaagaaccatcatcccagaattccgtattcagtaaaaatatccttcaagaataaaagcaaaaagaaaattgtttggtagataaaataaaactaagagaatttattgtctaagagacctacactacaagatatgctaaaggaagttctttaggttaaagagaggtaatacgagatggaaactcagatctttaggaagaaatgaagagtatggtatgtgtctgggcaaatataaagtactatttaaaaacaaattcttggctgggcgtggtggctcatgcctgtaatcccagaactttgggaggccgaggtgggcagatcacctgaggtcaggagtttgagaccagcctggccaccatggtgaaaccctgcttctattaaaacatacaaaaattagccaggcatggtggtgtgcacctgtaatcccagatactcgggaggctgaggcatgagaatcacttgaacccaggaggcagaggttgcagtgagccaagatcatgcctctacactccagcttgggtgacagaaaaagactgtctcaaagaaaaaaaaaattcttggaagtcctagccagagcaatcagtcaagagaaagatatagaagacattcaaatagcaaaagaaaaagtcaaactatctctctttgttaatgatatgattctatacttagaaaacctaaggactcttccagaaggcttctggaactgataaacaacttcagtaaagtttcaggatacaaagatcagtagcatttctatgcaccaataatgttcaagctgagagccaaatcaagaacacaatcccatttacagtaactgcaaaaaacaaacaataaaaaaagcccaaatctaggaatacatctaaccaaggaggtgaaagatctctacaaggacaactacaaaatactgactgaaagaaataatagatgacaaaaacaaatgaaaagacattccatgctcatggattggaagaattagtaacattacagtggccatactgcccaaagcaatctacagattcaacgctatttctatctatgtcatttttgacaaaactataaaaaactattctaaaattcagaagaaaccaaaaaaagagcccaaatagccaaagcagccctaggcaaaaagaacaaagccagaggcataacattacctgacttcaaactatacagaatacagaactcaaaaataaagccacacacctacagccatctgatcttcaacaaagttaacaaaaataagcaatgaggaaaggactttttttcttttttctttcttttcttttttttttttttttttagacagagtcttgctctgtcacccaggctggagtgcagtggcacgatctgggcttattgcactgcctcccgggttccagtaattctcctgcctcagcctcccaagtagctgggactacaggtgtgtgccatcatgcctggctaatttttcattattagtagaaacagagtttcaccatgttggccaggctggtctcaaactcctgacctcaggtgacccacccgcttcagcctcccgaagtgctgggattacaggtgtcagccaccgtgcctggcaaggaaaggtctttctattcaataaatggtgctaagatagttgtctctccatgtgcagaaaaatgaaactggacccctacctttcaccatatattatacaataattaactcaagacggactaaagatttaaatgtaagacctcaaactataagaatcctagaagaaaacctaggaaacaccattctggacattggccttcggaaataatttatggctaagttctcaaaagcaatttcaacaaaacaaaaaattgacaaatgggacctaattaaactaaagagcttctatactacaaaaaaaaaaaaaactatcagcagagtaaacagacagcctacagagtgggagaaaatatttgcaaactgtgcacctaacaaaggtctaatattcggaatatatgaggaacttaaatagttcagcaagcaaaaaacaaataactccattaaaaaatgggcaaaagacatgaacagacactttgcagaagaagacatacaagtggccaacaaacgtatgaaaaaatgctccatatcactaatcatcatagaaatgcatgtcaaaaccacaatgagatatcatctcacaccagctagaatggctattattaaaaagtcaaaaaacaacaaatgctgctcaggttgcagagaaaagagaacacttacttatacattgctggtggggatgtaaattattttagccactatggaaagcagtttggagatttctcaaagaaaacaaaactaccattcaacccagtaatcctattaattggcatatatccaaaagaaataaattatttcatcaaaaggtcacatgcactcatatgttcattggagcattatttacaataacaaagacatggaatcaaccttggtgcctatcagtggtggattggataaagaaaatgtggtatatatacatgatggaatattacacagacataaaaaagaatgaaatcataccctttgcagcagcatggatgcagctggaggtcattatcctaagcaaattaatgcaaaaccggaaaaccaaacgccacacgttctcactttcaagtgggagttaaacattgggtactcatggacataaaggtggaaacaatagacactggggactactagaggggagagcgaagaagggcgacaagggtcgaaaaactaactattgggtactatgctcagtacctgggtggcaggatcaatcatacaccaaagctgagcgccatgcaatatatccagctaacaaatctgtacatgtaccccctgaatctaaaattagagttgaattttttttttggaaaaagaattttaggaaactacctaccttcccaacccctctttatttccaaatctctgcccttttatggtaatacaatgatctgtaattattttcctttactcaatcccatttgtaaatgttttagaggagagaataaataatggaaaaggaaaataaaagaatattttgtaaataatacttcaatatagctggaaaaaattagagtatgtagggccgcttacaacaaaatttatgacattgtctcatggtatttataaaatgcatgtaaatataatacatatgcaacaatagcataaaaaataatacaatattaactctaatttgactgtgagacgtgaaggatatatattgtagtccctaaaacaactgctgacaaaataatgcaaagaggtacagctaaaaggccaatagatacttctaaaggtaattttaaaaacattcaaataatccaaaaaatagataaatgaaggaacaggggatgaagtgcatgcatgtgcgcaagcacacacacacacaaaaccacatacacacacaccagacacaaaaggaaggggcaagcagaaaatagatacaaatagtggtagacccaaatccagctctataaaaaatactctaaatgttaatggactaaacactccaattcaaaggcagaagcaataagaatgaataaaaaagcaagactcaactatattgttcacaagtacttacctttaaatataaggacaagttgaaagtaaatgaatgggaaaaaatatactatgtaaacaataaacattagaaggatagagtaaaaatatcaggcaaagtaaactttaagacaaagagcattaacacaaataaagacatttcgtaatgctaagagtaaattcatcagggagacagtaatcataagtgtgtttgcatctaacaatagagctttaaaatacatgaagcaaaatttgacagaattagagggaaaaatagacaattctatgatcatagttggagatttaaataccatcctattggcaatttataaaactagacaaaaacatcaacaataaccatgaaaaattgacaatttagattttatcaaaattaaaaacttctgctcaaaacaaaacatgctattaagaaaatgaataggcaagttacagacagaaaatattcacaaaacataaacctgacaaatggttggtatctgggatatacaaagaacttccacagctcagttataaaaaaaaaaacctcaaaaaaattcaaaagatttgaatagctacttgacaaaagtagatatataaatggccaataaatgtacatcaaagagcttaacaaggccgggtgctgtggctcacgcctgtaatcccagcactttgggaggctgaggcgggcggatcacgaggtcaggagattgagaccatcctggctaatacggtgaaaccctgactctactaaaaataccaaaaattagccgggcatggtggcgggcgcctgtagtcccagctactcgggaggctgaggcaggagaatggcgtgaacccgggaggcagaggttgcagtgagtcgagatcgcgccactgcactccagcctgggcgacagagcgagactctgtctcaaaaacaaaacaaaacaaaacaaaaaaaagagcttaacattattagtcatcagagaaatgcaaattaagattacaatgacatactactacatactccccaggattgctattttttcctcagctttaaaggatgactattattaaaaaggctgacaacatcaaattttggtgagaatgtggaataaccacacctattcatcattgttgataacaatgcagaatggtacaactactttgggaaaacggccatttaaaaaaaataaagctaaacatacacctatcccatgactcacaatttccactcataggcatttattcataagaaatggaaatgtttgttttcaaaaagtttatagtagctttatgcaaatacccccaactagaaatagcccaggtgaccaacaatagtagaatggatgaagaaactcaggcataactatagaatgggactctgtggagcaacagagaggaagaaactactgatggatgcagcgacatgcaagaatcttaaaaacattatgctcagtgaatgacgactgaaaaaacacacacccaaaagtatcagggccatttaaatgaaattctgaaacaggtaaaagtagtccatagtggagaaagtcagaaatgtggttgactttgaagagttgatgatggagattgactgtgaaggggaaagaggaactttggggtaatgatattgctctatatctagataaggaattggatttcacagatgtatgcatttgtcttgactcagtggatgtacaattaatagttttgcacttataagttttttgcacttgtaaattttataacagaagaaaaaaactgtaaacaaatactgaattccagctagttaaatgcatggtgaagtatttaggggaaagtgactgatagctgcaatttattttgaaatgcgtaagagataagatgaattagtggatggatagaggaatggatggatggataattatgtgataaagcaaatatggtaaaatattaatggtaaattgtaggtgggggagtgtaaaggtgttcactgtaaagttgggaatttttcaagataaaatgttgaaagaaaagagtaatgaaagaagaaagccaggagcacaacatttttggattgactccttcttgatttcttttcccttaaatattgatgctcttaactaagattgaagattatccccattgtttgagatgatgcatgaagatactttatctccatgaactaaaacaaagtctttcacctcttccacagagatgtgacttctgatcgaagtctttttttttttttttgagacggagtcttgctctgtcaccctggctggagtgcagtggtgtgatttcggctcactgcaacctctgcctcctgggttcaagcaattctcctgcctcagcctgctgagtagctggaattacaggtgtgtgccaccatgcccggctaatttttatatttttagcagagacggggtttcaccatattggtcaggctggtcttgaactcctgaccttgtgacccacccactttggcctcccagactgctgggattacaggcgtgagccactgcacctgggctgatctaagtcttaaactcactccctagttgtgtcgttgttatgttggtttcactatttccagtctagttaacctgatgtcctctgtctatggtaagaaacagtggcaaacaacagatttgagggttaattgacatcggatgggaaggtgggccacagctgtttctgatttacccaccatgtttatgcatgtaaatttcaagtcacagaagtggccaatgtggttttagacctcaacattaaagtgaattcagattttagcctatgggaaaatgagcggtaataaagaaaagtctgtagttaataaaattatctaaaacaggagaggatacagaatgggtctttgttctccctctgtgtttctgtgcagacttttgtgtgggtcaaattgtgtttttgttcttgttaacttcttattgcctttcttttcattagtgaaagaacattgtcctcctaattattcccaagttagagcaaaagaggcagaaatgagctagatccatagttttggaaactgatgatgcatgttgggtaatttaattatgtggcaattacaaggattaaccatgaactggaaagagctgcctagtattgtactttaaaatgagctccgtgtatgagactcatgcctccattttccattcatgaaacagaggtattcagaaaagggttttatgactaaagcacagataaaattagaacgaagagagacaaggatctgtatatgttattccttccaaaattggagaaggtgtaaatgcacacatgacccttgggttaaactgtgcgattcattatccattcgtcagttcttctgaatgaggctacgagaacagtcctcttcagtgttttctcactcacatgtcaggtgcttcattaaagcaaattcttcgatcaaggataaagcctgggcttgtccagttgatggaatgtttcctttcctctcccaataagaaaaaaattccagagccaagattaagccaatcctatggtaaattttggtcaaggtcaagattaatgcttttttaaattattatttcagtgacttcaaaattacaattgtatatgacagaattattcctctgggtgagtagcacaaaataaggagaatcgtcttccccagaacccttcctttaagtttcttttgtttctttctagcacaacacagctggagtaaactgtgaacagtgtgctaagggctattaccgcccttatggggttccagtggatgcccctgatggctgcatccgtaagtttcatttcaagttggtgtatcttagcctgtgtgtactgcctcagcgaagtcatcaggctaactttggatcagttaataacttccttcatgccctctctcttcagagtattagttgtgctcgctatgtgacctcagtcacttacacagtctctttgaattttggatttattgcatgtaaatggaaatgataatgtatttcataagattaaataaaatgcaatcaaaagcatgtaggaaaatacttaccattgggcctgtcacatattaggcctgtgataaatgttagtttctccattttctgttgttttgacatgtttctatgatctctaataatttcaatttttgggctggaggcagtggctcaggcctgtaatcccaggactttgggaggctgaggcaggtggatcacttgaggccaagaggtcaagacaagcctggtcaacatggtgaaaaaccctgtctctactaaatagaaaaaaattagccaggtgtggtggtgctcacccgtaatcctagttactctggaggtggaggcatgagaattgcttgaacccaggaggcggaggttgcagtgagccaagatcacgccactgcactccagcctggatgacagagtgagactctgtctcagaagcaacaacaacaacttgaattagaacaagacaacacagtaatgagttcataaggatttaataatagtcacattgtttaaaatagctaatatttgttgagtacttgccatatatgaggcattacctaaatactttcacaaaggtcttgtttaattattacaacaaataggacattgtattattgtcctcatttttagatacggagaaaccaaacagtctgagtagttatatataatttaggctaggtgacaaaaccgctaactgctagatccaggatatagttcttttctgtctgacatgactgtgccataactcttctattatacagaagaatgcctctagtttttccttgtagaattatgaatcttgggtcagatttacagacttttccctacatgtgcaacctataccctattcaatgcttggttcttttaagttgtctggttgtcacagttggaaagcaattccagtcctgaagtcaatcctgtgcccactccatgattaatcataccattaacatttgtgggtattaaagtccagggaatatgtagatggatttacttctctctagggcattcttagttgttaaaaaaaatgtgttttcacttttcttccttcttccacatcatgctgcaaagtatgtctatcacctgtcttgtgcctacaaagaataggcattgggaaaggaaaacaggacattgccaatgtaattgtacctcattaggagcctcactgtttcatcacctttctagttttttcatcattgaagtggtccacagaggtattagaggcttggcgtaaaggatcagtaggacacatgaatcctaactaaattaagcaaaggacaccaggatgccaggtcacccaggtctttacaggagatgtattcagatgagctgtgacagtattttccctgtccagggtgcacctgccaggtcaagggaggcccccaagtgggaggtcgacaatcttcttatacttgcactatgccttactccagtgcaagcctgataatcgtgcccgataatcgtttttggttgcaaaagctgccttcagtaagccatttcactcagattaacattttttttatgggtcttggtctgctgtccacagactctatctccatgtctaggcactccacacttgcatctgtatcataactgtgtattgatgaccactttgtgggcattcacagttggttcatagctagaaagggctgtgcccaacagaactaaggcaaatacccccacccccacccccaacccctctgactgtagcatgcaggctttgcctctgactcagtgagctgggcaatgctcagtgggataaatgacatccatgagaacttctgtgtggacgctcattacagctgatctctgacagctcacgagcttcgggcagtgagaaccatcaatcaggtgtgaggtgggaaataggctgtgccctttcaagaatacctatagaccaaggatcaagtatggaacgttgcctgggaagtgttggaacatatttgctttgttaagtgcagtgaaggacggatcctttgaaaactgggatttctcttagcctgcagctgtgaccctgagcatgcggatggctgtgaacagggttcaggccgctgtcactgcaagccaaatttccacggagacaactgtgagaagtgtgcaattggatactacaatttcccattttgcttgagtaagtacccactgcagaacaagaggccaccctttttggtccatagctggcttttgtgcactaacctctgaggcatggtggacaggtagggaaggagagacagaaatggggccaggtgggttgtatttatgtaaaagtgtttctgaaagtttggaatataaattttatattggtacattttacagtcttatttatctccaaagtgttatgttgtgccacagaaattgccatctcagtaggtcaaaaagtcaaacattggcaattttaacttaataatccatgtgtgtgatttttcctcctaaatgtaggagaaatatcatgggcttccagatatttatctgcatgcatatagtgtgtgttgtgtttcaggagcccagggaaacgtttcctctctcctgctgtacaagaggccaagttataagcacccagactccaccccacggcagtgatctaagtgaacatctcagcatcaccaagagaaaaaaatacatatctgtcagaaacactgtagagcatgaaacaggagaatctgtgaaaccagctatgcgaactgtgatgagtgttggctctgtttgttgtgcagcagtgagaaaactgcactttggggttaggacaaagaaacactgtcacaaggagagcctgtctctctgtatcactctatcagatgtttcctggccccaccctcctgactcctgcagagccatcataggaaaagcatattgagttgtggggacatgggggcaggactcacatgaatgggtaactatatgttctcattcacacctcccaccccaggtaattgcttaaattgcacccactttctctgtggagactgtcctactttggttgatgagacaccacatcagaattttatatctgtgagtcttggtagaaggctgaacagaaattgtatttgccttttttttttttttttgagacagaatttcgctcttgttgcccaggctggagtgcaatggtgcgatcttggctcactgcaacctctgcctgccaggttcaagcgattctcctgcctcagcctcctgagtagttgggattacaggcatgtgccaccacgcctggctaattttgtatttttagtagagatggggtttctctatgttggtcaggctggtcttgagctcctgacctcagattatctgcctgcctcagcttcacaaagtgctgggattacaggcatgagccactgcgctcggcctgcctttttagtgaaaagaagaggaagaaacctgaagtagttttatggcataaacaaaatgtcaggagaaaaaaatgaaagaaaatatttctttaaagctttgattttatgttaaaaaaaaaaacaataaaaaagctaaggaagccaaactcatccctgctcaggctgagacttagctattgtgagcacgaaacattcatttctgttcatcgttatacaaatgggaatgtctggccagtctggtttcagttactaaacacatttgagatatagcaatatcgcctttctttaaattagtctctatatgctacttttcactaagtgacagagggtgtcttcctagttagtacaacttaatgttttactttactatctccttaatcatcctctgtattttttaataaactatttttacaggaattcccatttttcctgtttctacaccaagttcagaagatccagtagctggagatataaaaggcaagtaacctcccttttggtttaactccagtgaaaatgttatgcccttattcttttcctacttcctgtgtgcactgccacatccaaggccaagtctcccttcctagagcatggtaggtgccttgcaggtgtctcctagttgacctactccccacccatcagtccccactccagcctgtcttttacaagggcactacctgacgtaggaaactgtgcagagcttgtattagatatcaccagcttgctcaaagaccttcaatggcagccagtggtctgttgtcttttttgagttccccgaaaacagaccctgaaaaaggaatggagagcaagtcatttatttgggaggtgatcccaggaagggagagagtcagggagtgaagggaaccatgataaaggtgcaatggcaggtaatggcagttatctgccattagtggaggcattaatgcttctggggcattcaccctctggcacttacagcttggccttcaggaaggctgaggagcttctgcagtcccaaaacaagcccctggcagagagtagcagtggtgtgcagtaagctgtctctgagggtgaaggggtgagtactagaggatgtgggtgttacatttaccaaatcatttgttccataaatattttaaaattccctgttatgtgcaaagtaccattctggctgctggggacttagcagagaacagaacagaaaaaattcccagctttcttggagcttatattcctgtggagaaacccagataataacatacataatatagaaacccaagcaaggaaaatagctaattcattagactgtgagaggcagagttgtattctgaacatgggtgccacttttaagggggagccattcacatcataggcataaactaactcatgtgagaagattccaggcctctgcgctgggttccagagccatggggagtttcttacataaacccatcacggcatccacagggaggcacaggttctcagaagggcacgcctgcaccaaaggaagggcacagcacacgcacacagcccacgactgggcaccatcggactcatgctcacatctcctgagtttgcctctcctaccccagggcgccagcagaggcctggtggtcactggggaggaggtagtgccagtcatgtgtgagcacgagtgcccctcctcctgcagcgccacggtgtgggccagcagagaagatggtttctgaagagctctccttggcagtgaagttcaggctctacagcaacatagtaactcaggtatggactggaggcagccttggtgataagcgctgctgaaaaaacaagacagagaggaggttagggaatgtgaggtttacagatttaaattagagcagtcagagaaggcctcactgaagcaggtataggaaagagcaagtgcaaagtccctggggcaggggcagccctgggccaagggtgttcagtgaacaaaaagagaccaggtgtgtgaaagtggagtgagggaaggtgagactggtaggaagggaaggcatcaggggctggatggaggccctcgtcagccactagagaggccttctcttttactcaaaatgagacaggagccatggagagttttgcacagagaaatgatgttatatagaaggctctttgggtctactgtattgaaagaaaatctcaggagaagagaagagaagagaagaagcaagggggcctgatgggaagtttttccataatccatgaggaagagatgatggtggttcagacccaggtggtgtcagcggaggtgacagcagtggacagactgtggatatcatcggaaggtagaaccaacaggatttgctgagggattgctagaccggaagtagaatattagagaaagagagggctctggggtgactccaaggcttttcggctgagcagttagaaggaagaagttgctctttgttgagagggaaagattaaaacaagagaaagcagaatacatgggccagaggcggggtgggtgggggcagtggtgggagctcgtggatgttctcttctggctgtttttgaaagttttctctgtggaataacaaacaaggtcagagcaagaagcaagagaggagggctcggggttgagtagggagaaggtatgagagtcatccaggaatgtgggtgggaggatgggcttgggaaagtcatgggattgctgggtggcaccaaaggccccctggaggtcagttataacaggacctcagttaccttcctgacgtcattccctgcttctgccctacccacactcctcctcagtctaaccatggtgctgtgcattattgcactgtgtgtgggactgtctcatgtcagatactgggccacttgaggacagcagctctacaggatggggcagtcacgttggcttagagacctgcccgctaagactcagagagggccaggcacattctgatagctcagtttggaggctctgcatagatgccagtaacggagaatttaaggaatggtgactactgaggagaattgcagtcttgaatacttagcatattcttcattcattaaacttttattaagtgcctgtgctgtgctagtcactgccaggcagctgcctgatacatggttcctcctgcctgggagctcccagtctgagacagaaaggtcaacagttctaatggcaggagttaagtgccatgagagcatatgggaggggcagccttacagccagggtgaaggaaagaaggaaggaagaaggaagggagggagggaggggagaaaggagagagacagaagtgctggaagggcttccccagagcagcaggaggaggtatctgagctgagtcttggagtgtgaagaggagtcagccaggcagaggggcagggaagagaagccgtggggctaggagagaggggatggcagacaggtcattaaggctgaagcatgggatagagagaggaagttcaaggagaggacctagaggaataagaaaagacctgagcgggcagccagctcagatgtgtaggtttgcaaggcacagctgtgcctcatctaaggggcatcacaatcatggaagacattgcagatttgcatattgatgatgatgattttatagcaggtgacaggaaagcatcttgaggaaggggcacctttttctaatttgcacaaagatgccccatgggttgctgatagcttggaaaatgttgaaggatctattctgtcacatgtgaaggacttcgtattctgtcctgcaggcattgggtcactgtcaagggatttaaaactgggaagtgatatgaaaaggttgatatttttgaaatatcactcttgacaccagcatggagaatgaattagaaggagcaagataggaagcagagagcctccttaggaagttctcaaaataatccaggtaaacaaagatgaggtctggaactctggcagtagagacggactcaagggattttcttgagatataatcactgtgacttcgtaatgaggtgtgggatgttctttctttttctattttaatcagaattctttgagcctcaatgccaaggtaaagtccaagtttttcactgaatctcaatacttcgtttaacgccaagactgtaattcacggtaaaaacgttccctttccctgtgacattcgttctcagcctacagggctgtggcattaggaccttgtatggcagctgtgatggacggacagggtggtgctcatgccatcctgggttccaaggcttcccttgtcatgaatgtgtccttgccacttctgaaaaggaggaaaaactttcttctaccctcttaggtaccatggctgggcctagaattaaatgaacctaagacagattaacagtaaaaaagcatacaaatgtatgtaatatttttacatgtacatgagagtctctagaaggaaaatcaagacccaaaaaagccattaggccccaaagcctatgtattgtacatgtttacacaaagaacaatgaagtatgaagtgtgacaagacaaaagagcttgggctagtggcactacattgtgggaccctggctaggaagcactgggagaaactaagtgttattttagtgggtttgttggtgcagatccaatccagtcgactcccagtctccggtgataagaatgctgtcttcctggtacaaggagggcaggcacctttctcctgggaaattttatgacctgcttttaggtagaaagggtgagatcagagaacccttcctacatctgctgcttctaaagtgcctttgctggaaacagtcagtatgctaaaatggcatattctaaatcccttcacttccaatgctgtttttgtcaaattaggcaactgtttggttgaagtatgaacaagttaaaaatcatgtaaagactataaagttgttctgatttactgtgatttttttcttaattattgtattagaaaaaaataattccacaacttagttactaacgttttatttgaaaaattaagggtttagggcaaagggatttggctacttttcatattaactactattttaacccatgtagaaaatctttccaaaatgcatgagactttccttccttggtaggtagggtggacccagctgaatctttgagtcttttacgatcttccttaggggacctgttgcaaatttagatattaatgtaatttatagaattatggatgctttcagggcgaggcatggtggctcacgctgtaatcctgcactttgggaggctgaggcaggcggatcacctgaggtcgggagtttgagaccagcctggccaacatggtgaaaccttgtctctactaaaaatacaaaaattagtcagatgtggcacacgcctgtaatccgagctactcgggaggctgaggcatgataatcgcttgaacccaggaggcagaggttatggtgagcagagattgagccactgcactccagcctgggcgatagaatgaaactctgtctaaaataaataaataaataaataaaaagaaaaaagaaatagatgctttaaatatgagattgatttgaatatatatgctaatccaggacacactctgaaagttgcttttaaaatcattctcaacttgtatttttagtataatagaaagaccatgggctttgaaatctggcagttctgggttcaaattctgactctgcttccctggctgtgtgaacttggggaagttaattaacctttctgagcatcttttttttttttttttcatctataaaatacttacctgtcttacagggctcttgtttgacttcattattatttttgagcaatatttatttcccaaggaataatgtgtgctggccctgggggcctgtggtgagctctcatgaagtgtccagtctgctgggtgatttacttatctatttctgtgtcttaagtcaccccaaaacttagtagcttaaaagaacaagggttatttctctcaattgtgtgggttggctgggcgggtcttctgctggacttgctggagggtttctggggctggatttagttgggacatttgggagtatccctctttgtggccttttgtcctcaaggaggccagactggtccctcccatggtggtctcaggattcctggagggcaagaatggaaacggcaaggcctgtagtgacctggactcagaagttgcatgacaacaacacttacacctcattctagtggtcaaagcaagtcacagaccaatatgtgatcccaaaaatgaaagtgttgtgaaagaaaaacacagctaagatagagaataaaaggaggaaagtgggggggccatttatacagactggtcagggggaccttctgaggagctgatgtttgaactgacacctggtggatgagaaagagctggctgtgctgagagctaagggaagggtataccaggcagagggattggcctgagcagaggtcctgaggtgggaaagccctggatagaggtactagaagcagcctggctgtggggaaggccagtgccgggaggattaagtgagatgatccaagggaagcccccaatgcctgatatgtagtagggctgaattgatgttagtttctttccttctaaaaactggaaggaagaaatacatttaattcacgattgtcatgagatgggaatctattaaattgaagttatactttacaaagctcggctttagagggaaaataaaatgtttccacaggaatagatgttaaaagaatggtttgcaaatgaatgcccatccttacgtgttttttttaatgatatctctgaccttttgtgaatttttaaaaatttcccttcaacgcagtgtagtcttctgcgttaagaatgtttaacagccatagataattaataatctatattcccatgatagaaacctaggggaagggagaaattaagaaagtgatggaagatggagaccccttctgaaagtttcctgtcttctgcagggtgtgactgtaatctggaaggtgttctccctgaaatatgtgatgcccacggacggtgcctgtgccgccctggggttgagggccctcgatgtgatacctgccgctctggtttctactcattccctatttgccaaggtaagtgggcagaacatagcatattcataatcaatccctcaagataaatttcctcctgaggaaatgcagatctttctggcagagctgtctggcttgcagtttaataaatgggcccctggcttatatatggatgttacatgtgatggtcctacctggaccttgtcacttcccttctttccaaccttaccctgcctcctccctggtagttaagcacatggactctgaaataatctgtttgggttcaaatcctggctctggagaggaggtggtatctgaacagcatttaggaacctgccaccacttctcagatcctgttggggcgggtctccagatgccagttgggtttgcaaattggaagtgtgtgaataagattagaaagatgggaaggtggatgacagaaggaggcagggtgttctagagagaggggacagcacatgcaaaccatagagacatgagaccacaaaccccctcctccccacttgtttgtatcctagtatcccatcccggcaagggtcgctgaaggggggatggaaggtgggaggaggaagtgtctggtccggtccctagagcatggcaggtatgcactcaatgctgggtgagtgaacacatgaatgaatgaatttgcccaaattattctcccctgcctcctttctactgtctgacattattcttctttctgcagacaatggtgtaggggaagggaggagaaagaggagaagattatcagtccaggatcaaggcaggaaataaaacaccacttcagacactataaaaagaaagagatttattataggtaattaggtgctagcccagaggagttgttaagagccagagcagcaggctctaggctgggcttccaaggaggcctccaatggaatggctgggttttaagcccagactgctatgtcccagtgcaaggatgggaagcccatggttggtgacttcatctcttggcatccaggaagccagagtcagagcacagctgcataaatgctcagccagctacaggatgcagcctcctccttatttcccatcggtctaatcttattcacacacttccaatttgcaaacccaattggcatccagagccctgccccaacagagtctgagaagtgctgtctttagctttccagcctctgaacactggaggatattagaataggtattaggtcatctcacctgcaaggtcagccacactaaggaactgtaagcatgaaaaactccctcccctaagctggaggacaaggtagtgaagagcaggggtggcactagctatcaacttgggcaagttacttaacccctctgttcctcagtttccaaaaaatagtgcctgtctcataattcattgttgtgagggttacatatgtactgacaggtaaagctcttagaactgaggaagtaattgttcataagttagctattcacttgcacctttcttctcctgacctatacttccctctgcatcattttaagagcttgtagtcccatttccagccatctccctgtttgtttaaatgcctgaatcccataccccaaacctttcctttacctgctggctcctggtgtgcaaaacattcttgtggctgaaaatatatcaaagggtttctttttttcctcctctctaccagccacaacttcagattcattctggtagaatgaattacaaatattctaacttattcatatggacaaagcttgtgtttatggatacaaagataatgaataaataatacaacactttaagaatgctcttttccacatttctccactactagagctaatttattttaaggtaggtagaaaatgcatgaatgtattcatgacaaagcagaggggaggaaggacttccataacaacagaggagggaggttggtagatactcttttcagtaaaacagaaattaaccagtgaaaatattttaaaaaattgtttgaagtctctgttaatggtcataagagcatatagcaaatgaagaaacaattacttaagaaaatttgaatctaggtaagaaatgagagtctctgtgacatttcagccatgacccccttcattatccatccccaaatctgttttatagaagatctacccatatgtgttgccaagaagatgggcactctctttatcctgtgccccagtttggggctatggtttgtttcattttgggaggggaaggccactgatatttctcaaccttctgcagtcctgtatagcagaagccctattccaggtgggctcagcaaagaggaccagctctctcttacccaccacccctccacttgtagggtagtagctctaacttaggcacttcaggctgagaattctgggatcccaatcaaccctacccaagctggctcatagagtagggatctatggtgggagaggaaaactgagaagaccatggcgccacctccacctgtgtccacttgtagagcatagcagaatttcaaagaaagagggaagtgtgacccatacataggggaagaagaagacaatagaaaccacttttgaatgagccagatggtagtcttagcagactttaaagcagctattataaatctgtatagaagactaaaggaaatcatggttaatgaattaaaggaaggtatgatgacaacatctaattgaatagagaatatcaataaagagatagaaattgttttacaaaataaccaaatggaacttttggagttgaaaagtataataactgaaatgaaaaattcactaaagtggctcaacagtaaattgagctagcagaagaaagaatcagcaaacttaatgacagattgatagagattgtgcagtctgaaaacagaaagaaaaaaagaatgaaaataaataaacaggccgggggcagtggctcatgcctgttatctcagcactttgggaggccaagaggggtggatcacttgaagtaaggagtttgagatcagcctggccaacatggtgaaaccccgtctctactaaaaatacaaaaattagccaggcatggtggcaggcgcctgtaatcccagctacttgggaggctgaggcaagagaattgcttgaacctgggaggcagaagttgcagtgagccaagatcgcaccattgccctccagcctgggtgacaagagtgaaactctgtctcaaataaataaataaataaacagaacctgaaagaaatatgggataccattaagcacaacatatgggtaatgagagcatcagaaagagaggagaaaaaggaatagaaaaaaatagccaaagaaataatggtggaaaacttactaaatttaatgaaaagccatctatacagctaagaagcttaatgaactccaaatagcataaatacagagggatccacacagccagacatattatagttaaaatcataattaaaattttgaaagacaaagacaaagagaaaatcttgaaagcaggaaaaaaaagactcattatgaacacaggaacaccagttagaataacaactgacttctcattagtaacaatagaggcaagaaggcagtgagagcgtatattctaagtgctgaaagtggaaaaactgtcaaccaagaatctcctatccatcaaaattactattcatgatcaaggctaagtaaagactttctcagatgaacaaaaactaacagaattcacccaacctgacttataagaaataatagacataataaaggatgttcttaaagctgaaacaggtaccatcaaataataatttgaataacatgtaaaaattacaaaagagagtataattgaatatttttatacattcttctcttgactgattttaacagaaagtatacgaactgtatatacaaatacatacatacatacataaatatggggcctatatcatataaaaatgtaatatgtttgacagtagcacaaaggagataggtgagaacaaagctgtattggagtaagaaaatgacaccaaatctataggaagaaataaagagaactagaaaggataaatagagtttataaagacactctataaatatatgcttgatctcctttcttctattatcttccttagaaaacatagattatataaattaataattataaaaatgtattgctggattttaatatagagagacataatatgtataataacaatagtacaaaaatggtggagagggaatagaactaaataagagtaaaatttctctattttactggaactaaatcaatatgatactaatgtagatttctttttgtaagccctagagcaaccactaacatagtaactcaaaaatgattaaaaagtcatgaaacagagtaaaaattacactagaaaatatctaatacagaagaaaacaataaagggggaatagaggaacaaaaaatacatgagatatacagaaaataaaatgcaaaagggccaaggtaaatccaacactatcaataataacattaaacatgagtggattcaacctcatactataaacaaaaattagtacaaaatgtatgaagaaactaaacgtaagagctaaaactataaatctcttagaataaaatataggcataaatcttcataaccataaattaggcaactgtttcttagatatgacaacaaaagcacaagtagcaaaagaaaaaatagataaattggatttcatcaaagttaaaaactcttgcactcgaaagggcactatcaaaaaagtgaaaagataaatcatagaatggaaaaagatattgcaaatcatatatctgataaggcactagtatcatatacacacatatatataatatataaaatctggatatattattataaaataatccatatatatggatatattatttttacaactcaatacttaaaaattaaaaataattaaaaaggcaacctgaaaatgagtaaaggatttgaatagacattatcttccaagaagatatacaaatggccaactggtatatgaacagatgctcaacattaccagtcatttggtaaatgcaaatctaaaccacaatgaaataccattttatatccactagaaaggcaggcaataacaagcgttggcaaggatgtagagaaatttgaaccctcatacattgatggtgggaatgtgaaatagtacagtgactttggaaatagttttgctattcctgaaaaagttaaacataaagttaccatgctacccaacagatctattcttcagtgtatatccaaaagaaatgaaaacacatccacgcagtaacttgtgtatgaatgtccataacagcattattcaaaatagccaaaatggggaaacaacccatatgctcatcaactgatgaatagataaaatgtgggatagccatacaatagaatattatttagcaataaaaaggaacgaagtacttatgcatgctaccacatgaataaaccttgaaaacattacgctaaatgaaagaagtcagtcacaaaagtcacatattgtgtgattcatttatatgaaatgtccaggataggaaaatttatagagattgaaagcagatttgtggttgggagtgaaggtagtggacaatgtggattgacttgttaatgaatatgggatttcttttagggggaacgaaaatgttctaaaattagattgttccaaaagttgcacaactctgtgaatatattaaacaacattaagttgcacactttacacttcaaatgagtgaattgtatggtatatgaattttatctcaataaacttgtttgaaaaaataaggcagaggtgggaggtggaatcccaacacactaaagaagggttattcctccccagacacttgtcagccttatctctgtaaatttgacgctcatctctcttatgtttttatagtgatgatcacataatgtgcatttgaattttagagttaaaaggaattgaaatcacaagtacttattttacagcaaccattctgagacccaggagaatacgtagggagtagatagttgcagggtggtgagtagcacccacatttctttactctcagcctggtatacagcaggaattctattgtattctttaaaccccttcatcacctagtgatctaggacatcaagaagcatgagggctattcttctaaggctgagcttttcatactgcagttcattgtccattagtggatagagaaatcaatttagagggtatgggccagcattacaatgaaataggatagactagaaattattagaatgcatcataagtgtagagaaaataaatctcttgcaaagttcttgttcatagttatttatgttttgctagatatctctatcatctattagtgtgtgtgtgtttattgggttataatgtaaaatgtattttttactgtgaacatggccaaaaagtttggaaactgctgtgctaaaagatcctgaaggattttatctgtgcttctgagtatgggaagtagtttgccacttttcttttctgagtagtttgtcacttttcttttattctgctctttgctcttgcggcttcggactttcaaatagttataacctgaagtcatagaacatttgggtgaatttactctcattcagctagaaactgttgctcagtaaattgcagcaataatctgatgaatccattttccccatgaagatattcctgtgccagtatacactgcataattccttcccaaccctgtttgaagggcaagaaagcactctgtcttattttttaccattatctataaagagcaaggaccaaagagataaacatgaagaactagtttgagatgcatatcctattttatctttttttttttttttaagacagagtctcgctctgtcacccaggctggagtgcagtggcgcgatctcggttcactgcaagctccgcctcctgggttcacgccattctcctgtctcagcctctccagtagctggtactacaggcgcccgccactgcgcccggctaattttttgtgtttttagtagagacggggtttcaccgtggtctcaatctcctgacctcgtgatccgcccgcctcagcctcccaaagtgctggcattacaggtgtgaaccatcgcgcctggcttcctgttttatctttaatccatgatattgtctttactattcttccttaaaccctgcaaagagaaaggacagtataaatttcaaagtcctataatctttacataactcagagtgtggagacttcagtctgaccttaccagcaagctacctagaaatgtaagcagcagatacagttactttttaaagatgcttggctttgattaataggttgagcttgggatcttttgtggggggaaaaatgatagataattgggatttcacaaatgtgtatgataggccagacatagtggctcatgcctgtcatcccagcactttgggaggccaaggtgggtggatcacttgaggtcaggagttcaagacaagcctggccaacatggtgaaaccctgtctctactaaaaaaatacaaaaattagccaggcatcgtggtgcatgcctgtatttccagcttcttgggaggctgaggtgggaaaatcgcttgaatctgagaggcagagtttgcagtgagctgagatcgcaccactggactccagcctgaacatcacagactgagaatttgtctaaaaaaaaaaaaaaaaaaaaaaccacaaaaccccccaaaaaaccaaacaaatgtgtatgacaatctgcctttcattagagtcacactttcaaatgaaaatcatctgacattcttcatgtgagtggtaaagaaaacttcttgaatttagaagtaaatacaaggaaaatatttaaaaaccacccatatcactctttttgaaaatgttaacattgaagtattgtccctgaacaatgatatatacaaaattccaaggccaagtcaccatgtgcagattttcaaaataaatgtccagaggcctattttatgacactttcgactctcacactcaaaggattatgaaaatgttaggagagtggaggagagataatctgggagggggtggatatctatggaggaaactgttgccgtgaactccttacccttcttcctcgcctcaaaacacatgagggacctctgatgtgtcttagtccatttggtattgctataacagaatacctgagattgggtagtttataaagaaaagacgtttatttagttcacaattctgcgggctgggaacttcaagagcatagcgccacatctggctggcttctggtgagggccacatactggggcaaaacatggtgaagtggagcagtaagtgagcatgtgcagagatcacacgatgagacaggatgcaagagagagagtccaggaagccagattcacttttataacaacccactctcacggtaactaatccgagggcattaatctactcatgaggaatccacccccatgacccaaacacctccactaggcctcatctcccaacactgctgcactggcaatgaaactttaacatgaattttggcaagacaaaccacatccaaaccatagcatatgggaagcctcgggaggggcagaggtgcttgtggccagattttggcttggaaacccaaaggctaagagctggatgcttttttgcttgaggcagagcagggagagtattgccgcattgggaatggcctgtacttagtgtactggggcaagggatgtgtaggtgtttcccacagccaaatatgggggaatccaggtgagtgtcttggttcctgcccgataggtctgctcagagacatcaggagatcccacccaaagcagctgaagtatttgtccagatgcctgttttataatagagtgtattaataggaaatttggggttcagtaaggacagcagaccgggagacaactgctattgagaagatacagttcccagaggaggggcaggtcatgctgtaggggccacatggagaagcatcagggtcggtttggaggcagagggaagggaaggaactgtagacagagcacttccacattaaggaatgggcagggataagcaggtttaggattggctagtttgaatatttcagtgggtgctgggacataggggctacccctagttgtctggtacctggccctggggtgattagggcagggaataccagagtgtgagagctggtagaggaggtggtggggccatgctctggactggtcggtgtgcattccaaaagcagctctctggagggttgtttactatctctgggaattggcttaccctgggaggggcagtccctccagggtcagcaaggccccaagatgtcaaagcatcagaaacagaaaataaaagaaatggtgaatccaaagcccaggggctgaagcagttgtgggctgaggagagagtcacaagcaacagaaatggagaggcttgcatccctgggggacaagggaatggcaggagagaggtgctcagcagacgaccaccaagaggccctagacagcatccttggaagaagagccagtttgagattagcatagggctggtccaagaacaattgtgtggggaaaaactctttcctctaactgtgtttttcctctactctcataccacaacaaccatcaacacagaagaaaacgtctgtgaccaaatgtgtgggggtctcttcccatcaccaagcagcagccaccagccaagtgtcctccaattcaattctgacactgcttacctaaagacagtgccagatcccacaggttgagggctcagtccccaagactgctccctccttccctcaccatcagttgcaagcctgggcctctggaacttctgacgaagcggcttcaggttggggttcccgcaaacctcctttggattcagttaatttgctggagtggctcacagaactcaggagaacaccaaattacatttactggtttattataaaagatgttgcaaagatacagatgaagatacacataagacgagatatgggggaagagactgggagcttccatgccctccctgggccccaccctccaggaacctccccacatgttcagctatctggaagctctctgaaccttgtcctcctgggtttttaaggaagcttcctgacatcagcattccttcctccagggtatagacttgaccctctctggggagagtcttaagacccacaatcacaaaggtgggggaagattagagtcctgccttggggcaggttaaaagagggcaggaaaaggtcagaggcctgtcccaaggcctaacacacccaaccttataacaaaagactgtaacaaggactatgggagttactagccagaaactgtgggcgaaaaccgctatatatcatgataccacaacagttctttcctcttccctcttcttcctcccccaccaagttgaagccagctgtggggaaagaatgcccactcccacccccagcccactcctaccactcacctctccacctttcctgcctactgtgggattttggcctgaatcaggtctgagctggaggacaggagattcgactttaaactggatttctacttactttctgttctcttacctaagagtgtgctgacaaaccctgcaactcctagagttttcatctaggtgcagggagacagtcacccacactacgtgaaattgaaaagggccgtgggagttagttgacagcaggagttgtgcttgttgaatacactaattgtctaacagtcagttgcatctccatgtggcttcatttaccatggcttccttaaagggactccatgattttgatttgtttctagggaattctattatttttaatattctgcttatataaacgtagatttcttaaaaaaccacaaactctcgacattattttcacaaaaaaccatatctttaaatgtatgttataattctttgaccttcagcagagtattattccatccagttagaatttggttatgtggccatgtatctggagcaaaggtaaaaaccaagcagttaggtccccacccccacaacctctgtcaagtggaaaagcgcagctccaaagatgcacacagaaggaatcccataggcccactctcagcctagtctcctcctcccttttttaaaaataattgttttaaatttagttatttgttttgcaagccaattgcatggcaaattagaaacataaaattagaagacagggaaaagattactgaggcgaaacattcatagcaagggagaaaacagacaggcagatatgaaacttaagatgtatagcagcctggggccactgaatgaagggcaaacaagctaacccaattctgaagatactgagggtatcactattagattaagtaaatgggcatttatagtgatagctgtagatcatgaaaaagagttaaattatgtctaatatacctgcttcattgggaaggaaagtataaaatacatttgagtaagagtatgagattaaatagtgaaaatgttaatagttaaaatgagtactagatgaaatagttaactaatagttaatagtttggtggttagagagtcagttatgactccttacaatttcacgtgacagaaaactagacctaaactgtttaaggcaaaaataacttcttggcagtaatagaaaagtccgggcatatttggtttcaggaatagcttgatctaggggcttaaaatatatatattttttttaatctataaactctgctatcttgtatattggcttcgttcttaggcctcagatgatagtaaaatggcagccagcagctcttagacacacattattatggactgaattgtgtccctaaaaattcatatgttgaagccctaacccccagtgtgactgtatttggagtaaggaagtaattaaggtttaatgaggtcataagggtggagccctgatctgataggactcatgtctttataagaagagacacaagatagctcgttcactctctctctctccctctaccatgtgaggacccagtgaaaaggtggccatctacaagccagaaagcaggccctcagcagaaactgaaccagccagcacctggatcttggacttcccagcctccagaactggagaaataaatttctattgtttaagcccaccagtctatggtattttgttatggcagctcaaggtgactaatacgtatccttctaggttcaagactaggaaaagagtatactttccaccaggacacatctggttctgattggaccacatgccagttctggaattagtcctgtggccgtggaattcagtgctctgactggccaaacctgagtcttcccccatatccacagaactagaagtggggtcaacaccatctgaacagcatgaatggagcaagggaagagaggtacccccatggtaaaatcaaggtgccatagccaagacagggtggcaaaactatgtgtcagtaaaatcctcagctctttgagaaaacatagttccccaaagtgaccaatcctaagaaagattgggaaaccctgtgaggtctaactgtagcattcttttccttaagaaactgacatctgacataaaaagctctttaatcagctgcagtacatgaatataatgtcttatctcttattttaaatggttggagccaggactcccttttaaaaataagtgtttatcttcccattgatttttttttaatttttaaaatttttagatgggatctcattatattgcccaggctgatctttaactcctgagctcaagcgattcccccacctctgctcccaaagtgctgggattataggcatgagccaccatgcctggcctcattgatatttttggtagagttgatttggacctctgcttctaaaggtctaccaaactcttctgacctcaccggaagcatgagagggaaaagactatcaagcctctcagagagggactggaggacaccagcaggcatgcttctggccccggtgggtgaaggtctggggtcagcctctgctggattctctgtggtctaaagtcgtggctcaagtgaaggactaatacatacacatccagccttggagaagcctgcccatgcttaagagctgttttctgagctgtgcaagaaattcactgcctcgtgtgctgttgaggtgtaccttgcagtttgttgttttgggtttgaaccattctggtaagagtttgggaggatgcaacattttgtctgtgatggccttccttgtcttgtaactacctttttttctgatagctattgtgatttttttttttagagggaattgattacttgacccactgaaatttacaaccaatcaccatggcccacaatggtgtatcagctgacccagtatattctagccaaaaagtgttcttactgctttgctctttcttgctttaaaaactttcaaaatctggccaggtgtgatggctcatgcctgtgatcccagcactttgggaggccaagtttggtgcaccacctgaggtcaggagttctagaccagcctggccaatgtggtaaaaccccgtctctactaaacaatacaaaaattagctgggcgtggtggcacatgcctgtaatcccagctactcgggaggctgaggcacaagaattgcatgatcccgggaggcagaggttgcagtgagccaagatcgcaccactgcacttcagcctgggcaacagagcgagactccgtctcaaaaaaaaaaaaaaattcaaaatcttctttaaagagaattttaaaacccttctaagctgcttttgccaactgtagtcctggatttatgttttgcattaaattaatttactccagactttcctaagtacaatgcagtatttttttcattttgactttgactcactgaagtgccctatggttttctttcttggggaattaatcaaattatatatatgagatcagatttgagaactgtctatatgtatataaaatatatatttatgtttgtgggttttttgactctatcttcaaccacagaatacaactgttaatttggttatttagggggtttactcttccctctttctcctccccatccctcattcctgccttcgtctcctccttttttccgctattcttcatttttttcttcctcttcctcttcctcttttcctcctttctattcccctttcccctccttttctggagcagcttgctaggcagcagctagttagtactgggaacagagggtaggaaggcaggaatgcggaaacgggtggtcctttcatgacatgaactgaaggcacccggaagtgcagcttcccccaaccccaccgacatgacctgacccagggcccagaaccatccccattagagtctgatgtagtctttgggttgtggtatccggtctttctttagaaaagtcctataaatatgttgtcagtgagagattaacctcctcctccctgttaacatactctcctgagtcagacaccggccggggaggagaagtgccctgctgacgaggaatggtgccagggaaggttttggccgtgatgctcctgggagaagctcccagcctttccagggcaaaaccagagaccactgggctggcagtgggaagcagcctgaagccaagttttgtgcagttttgccttgaactggcccttccttgtaattcatttttgtttaagagaacattgaggtgattggtcagaaaaggctaaggattttctgtagatttaattcatccaaagcccagtgccagagaagtgataagtactgtggaactgatggctggcttttggctttgactgaagatcaaggtgccaatcggcctttctacaagatcatgggcaataagagcatccctcaagcactaaggagctctgtttggccatcatctacaagaatctatatagtgttgcttcgctcatgagcttattactgcaggtgaagaggaaggcattattcatggcaatgtctgtctgatagcaatgttgcaagatacaatgaagtaacacgtatcaagaattatgcagggctggacccgaagaaggatttcaatagttactcatgctctcatataacaaccagctatttggcaggtactgtggaacaggactacatttaatcctggaaggtattcaagagcatgacagacaagcccctgtcctctaggacctttgtgatcattatttcaaagactttttttggtgatccttattttgtattcttcttgagagtaagtttcctaaagcagaaacaatgaggagtagacaagaaataaaatactccggaaactccaagggacctagagcaaaagaaagagcagaattgaaatatttttaaagccttatagtatttccaagagtgagaaaagggctgccaatgctagagttggtgtttgggatttggcagtttttactaatagttggattgaaatgagaagcgtgttgccagattaattcacaattttaaaacactgcaaatgcttttaagttcaagtctttgtttttacctccaaagagtaactgggtcttctcgctccccagacaacccctgtggtcctaaggccagtgtctgtgtcacccacattatgctgtggagctgccaccactgcgctccaggcagctaccctaatgcccgcatggatgttttcctctgcattgactttcctttagggcagaaatagcagaacaagcctgtagtagccagggttctctagagaaacagaaccaatcggaggtgtgtgtgtacgtatggagagagagagagagagatttattttaaggaattggctcatgcgattgcgagggctgacaggtctgaaatccgtaggttggactggcagactgaaggccaagaaaagagttgattctgcagctcaagtccaaagacagtctggaggcagaattcctccctcttcttcaggggacattagcctttttgtcttaagacttttagctgattggatgaggcccacccacatgatggagaataatctgctttattcaaagtctactgatttaaatgttaatctcatctaaaaaacaccttcacagtgacatttaggctggcatttgaccaaacatctgggcatcgtagcctagtcaagttaacatgtaaaattacccaacactagttcttgcctcgccaacttggcactcatatacatttcttgaaacagtacttaatcgtcaataaagagtataacaagacacaattctgactaacatgatacaactatcctgtatacaatcgaaaatacactaaccctttccccagaagaagaaataaagtcctcgggtgatgttcgagcttccccttgatatcctgtaacttcaatactgtggtattaagtcaatacatcttaggttgaatgataaggagatgagagagggaagaaaacaaaagatgacttttatttttagttgacacataataattgtacatatttatggggtacagagtgatattgccatacatggatacagtgtgtaatgatcaagtcagtaattagcttatctatcacctcgaacattcatttctttgttttgtgaacattcaaaatcctctcttctagttttttgaaagtatacactaaattattgttaaccacattcaccctgcagtattagggaacactagaatgtattcttatttagctgtagtttcatatccattaagcaatctctccctgtccccgctcctacacttctgagcctctgttaaacactgtgctgttctctacttctatgaactcaaattctttaagcttctatatatgagtgagaacatgcagaatttatctttctgttcctgacatatttcatttaacataatgtccttcaggctcatccgtgttgccataagtgacaggatttcattcatttttatggttgaatagtattcccctgtgtatatatacctcgttttctttatccattcatctgttgatgggcatttaggttgacttcatatcttgattattgtgaataatgctgcagtgaacatgggggtacaggtctattcacaataacaaagacatggaatcaatctagatgcccatcgacagtgaactggataaaggaaatatggtacttatacaccatggaatagtatgcagccataaaaaagaatgaactcatgtcctttgcagtgacatggatgcagctgaaggccattatcctaagtaaattaacacaggagtagaaaaaccaaataccgtatgttctcacttataagtaggagcttaacattgagtacacatggacataaagatgagaacaaaagacactggaggacactggggacttctagagggaggaggatgagaggtgggtgaaggctgaaaaactacctatcaggtactatgctcagtacctgggcgattttttggtttcatacaccaaacctcagcaacactcagtttacccatataactaacaaacctacacatgtaccctctgaacctaaattaaaagttgaaaaaaaatgttacctgcattttagagcctaaaaacctccatgggggcacaggtgtccctttcatatacaaattcccttttctttggatagatactcagtagtgagatggctagattgtatggtagttctacttttagtttttaaagaaacctccatactgttttccataatcgccgtaccaatttacattcccactaataatgtataatagtttccttttcttcacatcctttccagcatttgctatttttggtctttttgatgatagccattctaacggagatgatatctcattgtgggtttgattttcatttccctgatgattagtgatgttgaacattttttcgtatacttgttggccttttgtatgtcttctttttagaaatgtctatttatatcctttgcccacttttaaatcacattatttgattttttgctgttcagttggaaaacaaagatttttgttttacatacatataacatacgcatatacagaaaaaacatattcataacaaaataggaagaaatactcactacaattacaaatactaatttctgtaacaggtcacatggtcatagctggtataagttgagcatcccaaatacaaaaatccaaaatgctcccgcatccagaactttttgagtgctgacacgatgctcaaaacaaatactcattggaaaattttggattttgaatattcaaatttgagatgcccaatcaggtataatgcaaatattccaaaatctgaaaaaataaaaaatctaaaacatgtttggtcccagcatttcggataagggatactcaaactgtatttgtaactaccttcttctgccacccattccatattccctttgccctcagcaagcacctcatggttctttacctggtgaagtgacacaaatcttcattcttgaagggtctaggacatcagtagtcttgcctgaattgggttgtagttttccattgactttaatcacaagacatggtaatactaagagacaccttaagtcatctcctgtattctagacatattcttccttacctccatttttgaagaacagttcattttccccttggtaattagtggaacacaattgcttctatcttcatctgttgattcagaggaatgaggaaaccatgtagcagtcttaacttccagttcaatagaatgatcgtcacgtctcctggtagaagcatttcttcctctggaactaagacctctcgaccaccagagcagaaggcagctgggattggaagctagttgattactagggtttatagtgagtgatgccactcccatttctacctcttgattcctgaactcgtgaatcttggctatcagagaaaccatatgttgtacaatgattcagagcagatactgctttctggagaaacttgcctcagccccgcaaggtactgccacctagtagttttcacctacagtgaaaactcactgtaactgagttttcaaaaggccattccactgttgtattaagccacctgttcaggatggtggggaaagtggtgagattagtgaattccatgaccatgggctcactgctgcattccatttgttgtgaagcgagttctttgatcagaagcaatactatgtggatactatgacagtaaataaagcattctgtaagtctacaaatgtagttttgacagaagcattgcatgcagagaaggaatttctgtatccaagtaagtgtccattccaataagaacaaaacacttccccttccatgataggacagttcaaagtaattaacctgccaccaggtagccagctgattaccctggagaatggtgccatattgaggacttggtattggtctctgctgctcgcagactgggaactcagctgtggtgagtggaagtacattttgctgagcccagggataaactccatccctgcccccatggctactttgttatgagcccactggacaatgatagaagtggatgggacagaggctgccgggtatccacagaacagatcctcctgtctacttgggaagcattcacctaggacatgtttcttagccatttagagagggttttcactcagacccttccccagatcttcctgtcaccaattttccaatcatgttccttcaaagtccctggccatccagtcaaagaattggccacagcccattaatcaatatgtaatttcacatctggccatttctccttccaagcaaagtgaacaaccagcacactgctcaaagttctccctactgggaggatttcccttcaccactgtccttcaggatgtcccagaaaggcacaaatgtgctgcagctgtccactttcaggtgatgcctccatatcttgcaatacctggtctaaaacaggcctaagttttctctttctttgttaactgatcacaaggaactcaccataatgctgtagatgtggaatgtagcaggagtgtggagtgtggcgttctttgcatagcttacttgtgtagaggctgcttggatccaatcttatgtataccacttccatttgatgacggaatgctgctgtgcttgcccaacttatggcttcgtgggtcagataacacccagttcataatggtcagctcacatcacatagtgacttcatggcccatggttaagccttctgtctctactaagacccagtagaaagtgaaaagctgtttctcaaaaaaaagttatctgcagaggatggcttatatgtagacggtggcaggactttgctccaaaatcctaagggtctgcactgtcgttcacttatgtgggcctgctgaaggctccaaaaagcatccctatctgccactgacacttaaaagcaccattagatctgctcagtcatatgctttaagtggcagaacagcttacacagcagcctggacctgctgcagagccttcccttgttctgggactcacactactggacccttagaaatttaactgaggtagaagactctggatgttttattgcatttaatttttacctcctgacacccaaatgtcttaccaataagtctagagtagttgctacttcttgttcactagctccaattagcataatgtcctcaatgtaatagaccgatgtgatgccttatggaagggaaaggtgatcaagatccctgtgacctaaattatgacacaggaccagagttgatagacccctgatgtaggacagtgatatagtttggatgtttgccccctccaaacctcgtgttgaaatctgatccccaatgttgtaggtggggcctggtgggaggtgtttggatcatggagatggatccttcatgaatggcttagtattgtcctcctgatagtgggtgagatctctctctgagttcacttgagatctggttgtttaaaagtgtgtgatacctccccctaccttgcttctgttcttgctatgtgatgtactggctcccctttaccttctgccatgggttgtaagttccctgagaccctcaccagaagcagatgctggcaccatgcttcctgtacagcttgcaaaactatgccaattaaatttcttttcttcataaattacctagccccaggtatttctttatagcaacataaaaatagcctaatacagacagtgaaagtatattgctggcctggccagttgaaaacaaactgcttgttggtttttactaaaggtgtgaaggaaaaaagcatttgccagactaacagctgcattccaggtgtcaggtgatatgttaatttgctcaagcaatgaagccacatctagtatagcagctgcaattggagttgctacctggttaagtttataataatctactgtcattatccaggatacatctatgttctgtacaggccaaatagatgaatcgaatgggcaagcagtaggaatcaccacccctgcatctttcaagtctttgatggtagccctcatctctgcaattcctgcagaaatgttgtattgcttttggttgtactattttcctaggtagaggcagttctaatggcttccacttggccttttccatcataataacttccactccataggtcagggaaccaatgtgaagattttgtcagttgctgaggatgtatattccagttatgaattccagaactggggaaataactacaggctgagttcaggaacccactgccctcattataagatggacctgagttaaagcttcattgatcacctgacccccataaacccatactctgactagagggccacagtgacattttgggtcttctagaattggtgtcaatttagagctgatgtccactaatagaaagaatagaaagatctgattatttcctttttgccagtgtgtagtcaccttggtaaaaggccataggtccctttggaaaaggctgggagaaagatttaccttataaatgtttggcggtggagtggagttcttccacaatagtacctactctccccttcattcaaagagttctgggtctgtaaaccagctcaggtctggtaattgattgaggggatatgactctatttttatgtttcaagttagacttgttcatttgacctacaactcttccacttctacaaagcaagtcagaatttgctagacttcccagctgtttcacttccaggaacaccatgatcaactagtcagcataggtctctgagtcagactattttgactgctgtttcaactccattgtccattatggtaaccacacccgccttgcttttggtggtttattgccaccacttggctgccaccaacctggggcccaattacccccattgcacttaggttttccaacttgatggcagcagtttccacatccttgacatctattctcacagatattcctcaaattgctgtctgtctgtttaaattggaaaaatcatttagttcttttgaagtgtagcgcaccttctcatgggtcatactttgtacttcacctttcagggcttgctgggatttgagtccagttatcagttgataaggaaagtgggatgggggtgggtcctgaagagaatcagtggggtcttccatgacagctgcctcaggggaggccattacagttttctcgggcaaagcagggttaacctgctcaaacatgggttggggggtgcagttgcttcttctgacaaagaagactcgttggaatttaggggttcagtgtccccatcttcgtcatgatcttcccatatgtccccaaagcaattttcaaagtcctattccttcccaatctatgcccccactttaacagcagatactctgcaaggtttggaatttaacttgcattgcaattcagacctcgcaggatgaagattcttggtttggttttctgcagtctcagctctgaggctgtaggagataaggatttctttctaggaaggcatagaaactttcaggtcatttatgctgcatctgagtgggaattcaaatccctcaactccttttctttcccactttgtccagcccaattaggagcaaccagccaagttcattatgcccattagtttgacggaaatgttctacgttatcaaatacgtggtcacccagaaccttgcctatcataattatttgattaggagtatctaatagtgatatttttgtgtatctctattaccacatcacaccgatgactatcagtgctttattcactattggaactagagtcattagtgcttctaaatctagtcatttagagaaccaattccagaaacccccaaaccaattcagagaatttattcttaaaattctgttcctggctgggcattgtcttatgcctataattccagcactttgggaggctaatgtgggacagtcacttgaggccaggagtttgagaccagcctgggcaacatagtgagaccctacctgtatttatgaatttaaaaaattctggtcctctaagaatacttctcttggtaccaaaatctgtattagtcagggttctctagatagatagataggtacgtagatagagcttatctagttacctatgtacatataatatatattgtgtgagtgtgtgtgtgtgtgtgtgtatgtgtgtgtgtctgtgtgtgtatgtgtgtgtagggatggggagagttttattttaaggacttgattcacacagttgtaggggctggcaagtccaaaatctgcaaggtaggctaacaggttggagatgcagtcaagaggtgattttgcatcttgagtccaaaggcaatctgtaggcagaattccttcttccttggtggacatctgtctttttctcttaaggccttcacctgattggatgaggaccactcacatgatggaagataatctgctttactcaaagtctactgatttaaatgttactctcatctaaaaaataccttcacagcaccatctagactagtgtttgaccatttggcaacatagttagccaagttgacacaaaattaaccactgtagaacccaagaacatttcctcagaattctaccactaggtagagacttaacctctgcagacaggccagctgggactatgggccatgagagaagacaggtggaaatggcagtaggagatctgagtgtttgtccttctgtctgccaatagctaggggagcattagacacgctttatatggagtgggtagtgtcttgtgggggtgctttatgctatgtcagtcattctctagtctttgttctggatttttagatcttagagatcagggaatacagtcaacacccaacacccagtatccatgggggattggttccaggaccatccatgggcaccaaaaggcaaggatactcaagtctctgatataaaatggcacagtatttgcaaataaactacacacatcctcctatataaattaaatttctagattacttataatacataatataatgtaaatgctacataaatagttatattacattattattttatttgtattatttttgttattttttagttgtgtatttttctgaatatttttgatctgtgtttgaatgcatggatccagaacccacagatatggaaggctaactatatgtgtttttgtatttacctccaccgtaacacctagcaagggtgctgctggaacacagtaggccttcaatcaatgtctgctggatggatgactgtaaaataggaaagtgaaatgatagtaaattctctgggtctgcaagtacttgtgtctctctgaacaagtcacatagcctgttgaaactcccaggtaatttgtaagtgagtaaactagccgagttcccctccatcagtgagagtttcttttacgtttctgatgacaacacaggtaaattctgtcgttcaccatcatttactaaaaagcactttcagagaaattcaccatacatgggctgggctgtcacagagaatgaaaataacatggtctcgtccctgtgggggccccatgcgccaaggcttagattccaaggctacctgtaaataaattaccagaactggggctttaccttatgaatcttttctttcctaaggctccaactagcatggaatttttgaaaccttgcaaacaaggttgtatcttttactgtgtacactacactggataaaaatttggaagtcagatatactaattcattgattttcattaattcagtgtgggaaagtgtaaagagcacctccccaagcactgggggacttgggtaattagaataataatgttaataagtgtgaacacttcctgagcatttcggctgtgcgaagcatcgtgctcaatgccttattgctgatgattctctgataacttcataaagtaggtgctattatcagctccagtttacagaagaggaaactgaggcttaaagaagctaagcaactagccgtgattgcagggctgttaagtggcacagctggtactggaatccagatgtgtctgactccaaagactgaagccctttattagagactaatccattgactttaaaaatgccatttaacttctgaacttcaccatgtaataatgggattcaatgagatgctctctctagtttctttcagttcttaagatgtagaactcttcagccggagaagtcagtcaggtcaattccactgctcatccctctccagaagaagggtttttgcaatgcaaatggggacgaccttgtgcaactccagcccatagaagtctagtctcatagagactagtagggacctgatccagtgggaagggggccaagaggagaatgaatggccagcatctgttctctccatccacacgtgtttattcatcacttagccaaagatcatggtaacagcttgggggagggaggaaactaggatgcctttcccatccttttcaatgttgcctgcaccattttttccatgactacttaactacactagacattgagaaaagaggtataaagagaggaggaaagagaagatcagggacagttgtaggctgatctggcctggaatggcttgcacttgatatggaatatcaagtgggatatggaattaaagtggccctccagtgagtcacatcccccatcagttgttccctgcatcctcctcctacaaatactggtttctgtaggtgagcagaatccccaaaaccatcacccagcacctgcaaatcttgctgaatatgaaattcatgacagcaataaaaactagcagttattgagtgctcgctatgataggcattgtcccaagctcttttaagtattatcttatgcaatcctcacaacaagttatcaaataaaaattagtgtcactcccacttaaggaaggagaaactgaggcttagagcagttgagtggcttgtttcaggttcccgatctcataagaagtggagctggaatttgtgtttgggtctttctggctccaccctcatgctctgctccgggacgtggttcttccccctcccatacctgcaacccccgcctaagtctgattgaattctttcatccagcctgctggtgttcagcccttggatcctaccagatgccctgcagctcagtgactggacagtgtgaatgtcggccaggagttacaggacagcggtgtgacaggtgtctctcaggagcttatgatttcccccactgccaaggtaggaaagtcagcagattgctagagggctggttcctctctgaagtgtgtgcagccagcctcccagagaagcctgcaaatcccccacagactcaccactggccacccccacatcctgctttcacagatctagtctgcttggttcctcacctgttcaagtctggtttgaaaacacgtatatcatatatgtaccctcaaaggaatccagaaatgatttttttaactaaaaataatgtaaatttccatgtgctatacatgtgggtttcttggttcacatgtcagttttctgtggatagcattgtggcataggtgactcctttgagttaaaggggccatttgttgtcttctgtcccgaggcatcatgccttctttcgctcccagcttgtggtgctaatgctggcagcactgtaatgtttctaacagatccacttgccagcaggcttagcaggacctttgctgtgtttcgggcctctctccctgccctcctctggccttctgggggaccgtgtcatcgtacttcagcccaagtgttggggaaggcgggtgggatgcactggagtctatgcagtttggagagagtgcactgagggggagatgaaaaccaagcctgcagctgtgggacgtggttggtattcatccctctgttgatatgagagattaaggcttgcccatgtaccatggcagaggggacagaaatgagatgtccacaaatttccctgggctccctggtgtgtgcagccagagagcagaccagtagctcttgtcaatttcggagaactcttgctactgtgaagaggtgtttgtggaaggctgacccagactatccatcaggagaatgtggtttctcagaccccttcctgcgctttgaagacaggactgacttcatttcccagaatcttcctaaccagaatcctctggagaccaggtttccttgagggtggaagttgcagcaggcagtcagaggtgggtgcttgcctttcaaaaggcctgaaggtccctaggatgcgagggcatcctgcatgggtctgctcacctccatgggcctcaggagcagaaggaagtgctgtggctgcctggcagagaagctgagcagccacagtcatcccagggctagatggcaatgtttgtgtcctggagaggaacccgaggttgggcatggaaaacaaacagctggaaatttgtgttgggtattacggaaaaatgcagggaacaggagaacatcagaaaagaaagagagggcagggtggctcatgcttgtaatcccagcactttgggaggctgaggcgggaggattgcttgaggccaggagttggagaccagcctgggcaacataatgagatcctgtctctagaatttttatttatttttgattttattttatttttttttgagacagagtctcgctctgtcccccaggctggagtgcagcggcatgatctcagctcactgcgagctctgcctcacgggttcaagcgattctcctgcctcagcctctcgagtagctgggattacaggcatgtgccaccatgcctagctaattttttgtatttttagtagagatggggtttcaccatgtcagccaggatgatcttgatctcctgacctcgtgatttgcccgccttggcctcccaaagtgctgggattacaggcgtgagccaccactcccagcctctagaaaatattttttaaaataaccgggcatggtggtgcatgcctgtcattccagctcctcagaaggatgaggtgagaggatcacttgagcccaggcattggaggttgcagtgagctatgatcgtgccactgcactccaacctggaagacagagcaagaccctgtctcaaaaaagagagtgagagagagaatgaaaatcatcaaggggaagctgaggcagacagaagcaaacaaagccaatagggttaaggaacaatttataagcaaacaagatcctattatggatttatttaaatgatttgaaaaaccagactcagaacagacttacccagttcaaacactgtgtaattgtaatactgaaacattgcaagatcccaatttattgaagagagattatatttggtttgtagtgttatactaagtcaggaaaacaaaccaattgattttataaataactttagtacgggtgggaacaaggaggtgtgataattaaagatgtacttagaaattctagaacgtcttttaaatgggcaattaaaagtctcttggtacaatattgccctcttctggacaatactaatgatgctcaaaattttagaatctttccctaatctcctccttcatcatcaattagaagtgaactgtcatgagtagacaggatagggatttgttcagtggcaaaagaggtaatttggggattaaggaccataaatgtcattcaagatgcctgactatgaattgcatgcagactttgccacacatctatcgaaaatataaatgtagatacactatttttgaaaacaaaacgtttaaaacttgaaacatcaaaacaaagagaaaaacaaactaccagataatttaaaaatttctgaatcatattcaggttccagcagtgcttgtgacccagctggtaccatcaactccaatttggtaagtagactataaaagggttgcaattctaactatctctattattctcatgcatattaaggactaacagtgtgggcacttccagaaattaaaataagacccaaggctaaattgcttaaagaggtcattgttgtttttcaaagagcatatgtgattttgtgattttttttttcaaaaacaaaagaataagatttagttaaacttgttactctggagtcctagagtttaactcttactgcaggtttgtaggttactcagagggtgttgcctctgtggagccctgcatgtaagtctgacaaacataattaataacattgagaaaatcaatggccaaggacacattaaataaagttggctgtgtacaaaataattacaatttattttatattattccaagcacaataccatggtattctgaacattttttttctttttcttttcttttctttcttttttttttttttttttttgctcttgtcgcccaggccggagtgcagtgccgcgatctcagctcactgcaacctccgcctcctgggtcaagcgattcttgtgcctcagcctccgagtaactgggattacaggcacgccccaccacacctggctaatttttgtatttttagtagagatggggtttcaccatgttggctaggctggtctcgaactcctgacctcaggtgatccacctgcctcagcctcccaaagtgctggggttacaggcgtgagctaccacacccggcctattctgaacaattttctgagataatttagaaattgtctgtcttcttggcctcagagcctagagatgccgacttccaggcacagaatggatggagtgaaagaggttctgccatccttcccataagccttgatgacattgatgcaaggctgtgaatcttgcatattacaaaagcactctcagataaacaattctttactgattttcaacatgttaaatattcagacattttttctatttaaattggtagtctatgctgtaacagtatcaacagacactgacaatgttataaataagagtgatttttaaattttctttctccttattttccagtttctttttaaccacaaatgcggattacatgcataacaaataaatgaataaaaataaacaaaagcaattagcagactgttgaaatcaacccagtattttttccccctggatacacttaattacttttcatgaccaaaatatgtttctgtgacaagtctttgctcacgcacaggtttgaaaacatgtcttaattccaagatgtcaaatgtttgtttgattttcattcaaaggggtattgccaatgcaagcttcatgttgaaggtcctacttgtagccgctgcaaactgttatattggaatctggacaaagaaaaccccagtggatgttcaggtaggtttcttatatgtcataatttactatattataatgttctcttaattttctctgcctcagtgactaaatccacaaaagagctatttgttgaatcacttcaatttgacaagattctatgtaatgttctgatgttttccccccacttttgacagaatttctgtcactttcaaaatcttagcaagggatttctatcctgtttctgtatgtattttgttgtttgagaaggcagctacttgataaatggtttttatgtccttgtttttataatttactttttctggtttaattttaattttatgcttatatcagagccagtataaggacttaaaaacaccgagttaaggatactgaataaccttgaatagagtgtattttcatgcatgcatatcagtaatgacctcggcattggaatcattcaaaaatcccatgatgttgcagcttttgtcatgaagtagccatgaactagctgttactttttgtaaatggatagtgtggattggtctgttctgccaacttcagaaagcagtctaattttaggcctcagcgatgcaaactctcattctgttgaactgcgctggcaaggccaactgcacacgttgtgttgcagctgtgtaatgttcccagagccaggaactgtcttttgtgtctcccttagttcaaggatgctctcttatctccacagaatgcaagtgccataaggcgggaacagtgagtggaactggagagtgtaggcaggtaaagtgggctgagttttcatgtgacaacagcagaatgctacagcaactgcttgtggggtttctgggggcgtgtgttagtacttctgtcattctacagtgcatggtaatcctttccagatcctggctacactgcttcctattatacagtgaggcagttttcaatcttgaagattagtgaattctgtaattatatcaaatgttgtcatctggctcactgttctgcagggagatggtgactgtcactgcaagtcccatgtgggtggcgattcctgcgacacctgtgaagatggatattttgctttggaaaagagcaattactttgggtgtcaaggtaaataagtccattgggccctgagcaaagcacagtgttgatggacaaagatggtctaaataacatttcttctgagtttgtcatcttcacgcagactttctgatggaatggccctgaaacattctgtccagggaatttggccaaacattgattacattgaaactagtaaattgcaagtggggctgtttctacttctcttctaccagcacactgtgggtttaatgataagaaacataactgggatgggagggcatctgttagttttataaataacatcaatatttagtaattttaaagatatattttatattatcaaaaatgctagcatcagatttttagagacagtgttgtgttaaataatgaaattgcaggacaggtgccccgcaaggctactcttgaatctctcgctcggcccctggttatcacatgttctttagaacagcactgtttctgaagcgcgtttactcctgggctgctgttgtctttgcattggacaacagcatttgagctggcttatagtagccgcctccaacttagaagcagacctttggaaagacaccattttaattttgtttttgtttttgttttggttttggttttggtttttgtggttgaatctgatttccaagcgcggacacaccattttggtttgggagtttccaagatttcaaacacttgccagacagatgtggcagaggaaagaaggcaggcactgtgtcactgggatggtcagttttcctttcttgtacagcaggggaggcgctcagtgtggagatggtttaaggtataactgctgctgtttcctggctttcagggtgtcagtgtgacattggtggggcattgtcctccatgtgcagtgggccctcgggagtgtgccagtgccgagagcatgtcgtgggaaaggtgtgccagcggtgagtcttcgggaggcttcttcccatgttcagggtgtgaaagatggtcttagacattcctgcctgtgctacagctctggagaagagagaagcagccctaaagatcgaggtcaggggaagctgtcctatgtcaattgaaatctggacatttgtgtgtgagttgtttaaaacaggagattactttgcccataaagcctgttctactgtgtagaccatgaagtactttcgcttgaaaattcccacaggtacaaaaaccaggtgggcaagacgagagctggaagcatgaagtgggttctcagggctcaacttccatgtgcaagttggagcaggaggagcccacagataggcccgctccagggagagagggaataagagggggtggtgccacacacccagttgcctgggccaataagaaagggaataagagggggcagtgcgacatacccaggtgcttgggtcaataagagaaggcataagagggagtgccaccacacacccaggtgcctgggctaataaggttcagttcctgtttccctcttgggacccaggagtgaggaagtagagaggccaaagttgttccccagggttgcggtgggggtagagggtaagaaaactttggaagtggggaagaagtactttgtctcatgcagaagcaggtgacaatgaactataggagcgagggaatgaggtggagattgagactggggaactataggaactatggtattgttccatctcttaagccattatattttaccatttataaacgttttgaaaccttgatgtttcatccatgatttttcctctgtgaagggaaaaaaagtaacttctgaatctcaggtcccttcactacttgcattagtaacagatttataaagaaattttttatgtcgtggaggtaaattgtatttagcaaggtgattctctcctttccctcaatgtttccaacatttgaattctaaaagtcagagcaggctgggagtgatgtcccagttgggacaattgcttgaggccaggagtttaagaccagcctgagcaacatagtgagacccgatccctataaaaaaaaatacaacaattaggcaggcactgtggcacatgcctgtagtcctagctgctcaggaggctgaggcaggaggatagcttgagcccaggagtttgaggttgcggtgagctatgattgcatcactgcactacagcctgagtgacagagcaagaccttgtctttaataaaaacaaaaaaagtcagagtaacccagccgcactttccctcagttgggggcttggagtaaaagatctgtgaagagggcatgtctgtaggtttgttttcctgaagaccattgagcctccccatgggccaggggagctttgtaaatgcctgcataaaacgttttcctggctcgcgcctgtaatcccagtactttggggggccgaggtgggcggatcacctgaggtcaggagttcaagaccagcctggccaacatggtgatacactgtctctactaaaaatacaaaaaattagccaggcatggtggcgcacacctgtaatcccagctactctggaggctgaggcaggagaattgcttgaacctgggaggcagaggttgcagtgagccaagatagtgcccctgcactccagcctgggtgacagagtgagactccgtcttaaaaaaataaaaaaatgttttccacctgtgtttcatcttgctccaccctggtgttgataaaatgagcttctccgctacttaaccagcaaacattttttcttcttccaactatgtaggtgattgactgattttcagcataaaataatgcaatcaaataggaattaagttacccagcctgaggcaagaatattaactttttacatgatacatgcacacatacatatatcttcaagtttagagcgtgtccttggatttagtggtaaattataactgaaataaaggctagcaaaccaacagtgtggatgccggagcaccttgtctccaacatgacaatcttgcatccttttgtactaaattcccccacatgtttgctctggttttatcagagaatttttaggttttctgacaagtgtagaaagaattcacgtttgctttattttctgaataattcttgtggtgataaatgtaatatatgtccagtgaacaaattttaataaattcatcaaagtaaaaaggcaaagaaaaatcttcatttctctacccagagataacccctttttaatatttttggtgtattttttctagaccttgtctatgaattaaaaattagcattctattttttcatataattcacattcattacttcacatcatattgtaaatatttcctattatcattagccttcacattttaaatggttatgtatttttttttataatttatctcataattgtacacttatgttgtttccaggtcttcactgttttaaacattcttttatgttaattctttgactatctacaaaatctttctttagaacagattcctggaagtagaattactgggtcaatatgtgtgaacatttttaaggatctttgtaaattgcttccagaaaagttgtaagcattcctaattctatttgcagtataggagcatggccttttatttccttaaacaaattcatctttatggcattaatcccactaactgctattagcttgtgactggattggcgaagtgtctttttttttttttgagaactttaagtagattgttaaatgccacacaatgttggaatattttggatacttctctgtgcctaccacagctgagctcttgaaaagaattcattaataggcatatagtttaagagaaaacaaggcatagaagagtcattctaatgattaaaaaataacatatcaagaaaatatatctaacttgtaaatttagcatatgaaatattttatgtcatgttcatcattatacctatggtccttagcaagagtgcctggcacatagacattaatatttatgtaatgagtgaatgaatatataaatgaatgagtgattaaataaataaacagtaaataacctaatctgactttgctaaattgttggcaactatttagaacatactaaaggatgctaccactatggcttgtgctaaacgattttctcatcttaatgcttggaattagtaggcgttgagtgtgttttatgtgaatgtttatgtgaattaaagcaataatttggagaaagagcagaagatctttctcatttgtcctttatttaatgtactctgtcaatgtggtggagttctttcatagtaactattgtgattaaaagatgttcagatgatctatggacctaacctcctgtatgtgtttactttttaattatgaaaggcctgaaaacaactactatttcccagatttgcatcatatgaagtatgagattgaagacggcagcacacctaatgggagagaccttcgatttggatttgatccgctggcatttcctgagtttagctggagaggatatgcccaaatgacctcagtacaggtacgcaacccgaagagagcagcttcatggctgagtagctcagatacttccccacaccagtctcagggagccccctgaaaggtgacctgtccccagaactgattccacgattctttttctctatattatgggttggcattggagtttaggttaaacctggggtttggggtagggctgtatattaactgataagcatatgtgtggatttcatagttcattgttactttaatttgattaccaaatcagaaaattaagagattaaagaaaaatagtgtttatctctggagactttttatagaagggggaagtttcctaaatgacgttaggctgtactagaatgtgagggacagttttctttaaagccatttgtggaaaacaaaaatgagttggcttaagtaattccagtaaagctagtgttcctaatttttggctgatgctttttttaaactttgaattgctatgtacgtggaaactaagataaataatgaatgtttgttagttaagtgctatttcatttttcttttccatatttctctttccttcattcttctctactgcatccatctatcttggctttgtattagaatgagtaggggaatttatacattctttgtttacctttagaacttatacgtcttgctacttataactaaaaaattctgtatagccattgagtagctttgtcctcagaatttgtctttgagttggtttcttcaagctgtttctcagtggagaaattcagaatatgagaggtaaattaacgatcatggtaacacagtctttttcattagcgcatccaagactgctgcttgctgttgctaccccagtcagcctgtagagaagctggaacagggccacagtactctcagaccccttcccctcattgattctaatgctgttttttacctggccaaagtcccccatccaagcggcctttctgaaatggtacctaggatcttaagacacttcactctttgcccccactccccaaatacagctatttaatttctttagttccctgacattacttcactattcagaaaacaagcagtaaattccattgtgtcataataagatgtgaatgactgacaacccaatcaaagggtataccttctcacaggtgcttacagtttcacacaatagctggtggacacaaaggaattcatctctaatgacgcattttctgataaagttattttggtcagaggaccttgatggtgtccccagcatcaccacttactttactctgctcctaatagatttttgcatatttgttttccatctgaaactaacacttaaagatgaattcagacgaattgtgaggatcagcaggagttcctcagtgtgggtcacctgtagctcctgctttcagagcaagtgattctgcacaaagtcagtctttattgtcaccaatatctcgcttaaaaaaatatccccttccttttaaacaaagaagttgggggaaatgctaaaagaaccactgatttgggaatttccaagtttcatgaagtttccttgggccacagcccaatctggacatgcagtcagtggttcagaattaaaatagtctactctttccttcaagggtccaggctccacaatgtttacagaatattgtgtgagcccaggccctggggaccaacagaacccctcctctaggttgaaaagccatcatttctttgcataaggaattgagataaaacatcatacaacttaataggcatattttagttacacccagatgttaccactattgtatttggagtctttaacctttccttggccaccgttggtttctgtgaccatttagactttatgtatgtgaagcggactctgaagcagtctctctttggtggtgtgaaataataccctctcctttccttctcttctgcctttttatttttcctagccagtggtggttgctccgtcactgtggctttcttaaactagcccatctaatactccactctgtctgcctgattacaaaaaggtcaaaagaggatctcagttgctgagggagtgcgttttcactgtaattttgattgtaagtgattttaattcattgttaggtttgcctatttccatctttcacaagttactcggtgctcgttgactgagtgtgagtgtgtatgtgtgtgtatgtgtgtacattacaagtccagtagtgacacttgaatagaataaagtcactgtttggctagcatgtcttttaaccatttttttctatgctttatggcgtttcggtatttttcagaatgatgtaagaataacattgaatgtagggaagtcaagtggctccttgtttcgtgttattctgagatacgttaaccctggaactgaagcagtatctggccatataactatttatccatcctggggtaaggcacgtaggtaaaatgtcaagcctcttttcaattaagaaataaatagtgaaacactttctctgattttcacaaagttgatcacccttagaaaatgtcaagcctggctcatggtctggttagacggttctctaggagccctgtcgtttgttaccttgcattctctaaacaatcacttaagttttgctactgaatttgtccttaactgtcattttaaaaatcgatataacaacctatgtaccttggctgaaccccatgggttatgatgtcttcactgagcagagctcatttataactcattcacagtgacgagggtgtcacttttttggtgttatttgagagattttggcccgctgccctaaattcttccattgtttcaaaccaaccaaatagtcagaggagaaatgggtgaggatgggaatttttcctatgaatgctgtaaagcatgaagcccaaatgagttccaggagggagctgcaaacctgactcagggatgaggaattcctgagggcagagggacaagagaagagagcacagcctcgccacaggcagagagaaggcccgcaggtctgttcttcaaggtattagggcttctacctgtcctggaaacagattccaagaagcatttggaattttacaaggacacaaaatggcaccaatggaaatctaatttaggatcaaaatgtacgccatctttgttaagcatccacggttcattcagaatgggggaagaaatgatgtcatttccgagttgtgtcaacccaacttgcgtggctggaggttgattaacccattgaatgaactagcaggcttacttcatcattcacagagtaatttagcacccattgcctcacatcataagaacttggcaaactgaggagagttgaagagaaaacagagctgagaggtttagtaaattgccagccacagctggatgtttgtagacaaagtcttcagattccaaactcttaacaggcccctctgcctcctgcgtgacaataacagcagcagtttgttctctgttaactcaaatagttggaatacattttgcttcgtttccttgtcctccgggacacctttcccctaagtctgagttgggagccctagttatgttatgtcccatggtaactggtgcctcctcccaaataccactgtccaaactgtaccacattttcctgtcttctagtccttattcctctctggtcctcaccagcagggagcaaaggccatgcttactgtgtttactgccttgtcaccagaacttagttccaagcctggcacatagtaggcccccatcaatgtatgtagaacaagagtgaacccaaagatttggagaagataattctttgaaagaaaaagtctcaattgaacttagatgcaatagtttatttctttctgaacctcttgtagaaggtcctctctttgtttaatgcagaagaaaacatattttttcctgaaaacaaacaaacggaagtgtaaaactttttcttatgcatgttcattaataaaaattaaaacttaaaaatcacatatgctgtagtcccagctacttgggaggctgaagtgggaggattgctggagctcaggagtttgaggctgtcatgagctatgatggcatctgtgaataaccactgcactccagcctgggcaacatagtgggaccctggctttaaaaaaaactcacatataaacaagaaaggaaaaaataatttagtagctaatgtaatatattgaatacttactatatgcaaggcactttcctaaactgtttacaagtattaatatacttatttaataagttaaacaattattcataatcccagtgtagatagccattgctgatgtcttatcagtatctttctagcctattttatacatatgtatttgcatagtacaatttttaaagataagatcagtaaatctgatcagtacatatcatcttaaactttttgagatgtaaactgaatgttcaaaactgaatatctaaaatcataacactgactgatagaaaaatgccttaagcagttctttgtatttctgataggtgctgctcaaagcaaagagatcatcttcctgccgagtaaggagccagcctttgtcactgtccctggaaatggttttgcagacccattttcaatcacaccaggaatatgggttgcttgtattaaggcagaaggagtccttctggtaagacttagttctgaatggagagctcctgcgggattcttcctacctcagaagtggttccatccaagactacaatccacagcgaccataaaatatcacaatcattggtggttttagacacaggaacaattcagccccaacctaaggaaactgtggtgacattcaccctcaaatgacataggaatcaacttgaagtatcttttgtatcctttcagctagcttctcttggacaaaaaaaataaaagataaaaaaggtctcctaaagactcttaattatcagaacaaatgcgaagccttcatgagtatgtggcttcacccttccaaagcttgtatgggattttccagcatgagtcagaagtatagactttagcactcattgcctcacatcataagaactagcaacttcacctggttattgtctacactgtctggagattgtgtagaaccaaggaagaataacctagaagacaagcagatatggatttcagtaaagttcttgggggtggaaagagaagcaagaggctacaggagccactgcttctccatgacactctttctgctttcttctgtgttaaacctaaagcaggtttattcccaccaaacagattgcctacaacagagaactctttgttcaggaaaggctttgtctgcaaacacctaatagaatagccagagaagccatggggagttggaaggatgaaacctgttctctgagacagccctctttgctatgtgctttaaggcctgctttgcttcatggcaaggtcttttcaaaatagagtccttgggaaaagcttgatttcatgctctcaagtggaaaacataaagcttttccttcaggcacaaccctgtttattggccatgttagcaaatcttaggaaagtcgcttaattccaatcctgtctcttccagtcctgccagttgcttcttccatacaacagggacaatacttatcttaataggtccttccaaattgggatcttacaaggataacatgagggattgttctttccattcaagacaacaaaggaacatcagaaggtctctgctcttcttgcatcttcttagtaggaagctttattgcttaaaaaaaaaaaagttcaagaatgtttcacagatggtagaaatgaggcagaggaaaattccattgatactagtaacgggtacaaagttggactcacggaaagtagaagttcattataaaagttactgtttaggcatggaagatgcctaatgacattatcattaggcatcataagggtgcctatgatcaacctttactattctattatctgtgagactataaagtcatgaggagagaggagacatggtcccaaactcagcaaacttactagtagaacagtaacccttttaaaatttaaacctactgagtcccctcagccacaatctcttacttttcccctcctatacatttctgtctgaggagagaaaaagctttgtggtctgtgtatgagctctttgccctcccctcttccctctgcagatatgtgctgctgtcaggacggctaggggctgtcaatcattcacctcccagaagcctgcagctctgctctttcctgaagagctgcttagctgaatttacgttgtgggctttgtttggcacactcagtggaacatgttcttcctctcgtttcttgggacaggcagtaggccagttccattctgtgaatcaccaagatcacaaggcattgctttttataccgtgccagttgagcgttactcgggtgtgggagtagaaagtgatccacattcagtgttctgtactgctgaaggcaaccagcatttccacagaacatttcatcagttgacaatttattatctttgttaatttgtgaatttataaacaaccaaggagagacagtaaaatctctcttgaaacttgaagaataaaactgttcacactgacaagtttctctctgatacataaagaatctttgatgagtggttctttgtgtttcggtgagtcgggatgaagaacaaagcagttgatatggagagtttaactagcgacttcacctggttattattgatttaactagtatgtttgattattttctatccaaagtagggctaccatcaaaatgaatgattctccttttggtctttattttctaggattacctggtgctgctccccagggactactatgaagcctctgtactgcagctgccagtcacagaaccatgtgcctacgcaggacctccccaagaaaagtcagtgtggggcagaaggtgcagccgcatcattggggtcctctaaattaggagcctttaatgcaagctttcatgaggtgtctcaggatcacaacgacagcatgatgctctggataattagttgttatcttcctctatgtcttacttgtgttcttcaagtaagattcacaaagcactttgcacaccatagctggcttaggagtggctaccaccctccagcatgtgggaatgttgatgcatgcccaagtcaatgccctcaaggtcagtcatacatctggtgggaggaagagcttaaaatagaagccaggtttgtggacctttgtttcttctcttccccatgcagatgaaaatttattgcttaattcttgtagcagacacttaataagagtttattgaaggatgatgaatgaatgagtgaactgaatgactgagagtctttggggatgtactttgatattccgtttgatgttctcagttgtaactattgattccattgttgttgctgttgttgaagttgcttactctaccagcatttgccagtgaccagattcccctgtaccctggcttgtgaggccagacacttcctgcttgatggggagccaagacccgtggcagtgaggcagcccacacctgcacaccctgtcatggtggacctcagcgggagagaggtgggccagccttttatttattatcaaagttattactacctccccatctgtatctgctaaaaatacttggccacagttgcttctcaaattcaggggaacctggaagaatttctcagaggtgtttatcaacatttgctgaactatctgatttagggtggggctggatggtacgctacatggagccatgttcaggttgttctttgagcactttctagacatggcaggggatgtgggcatctatagaatcctttctttttggttatctggacttagaagggggcatcctgttctacatgattcagggcaagatttctcttaaaagacagatgagactcaatctagtaagcgtccagaaatgacacagcttaccctaaaaggataccacactcactgactgttcaaccccttaggctaagcaatttgtagcagctgaattccttgagctcagaatccggaacttctacatcccctggcacctacctcatggcttggaggacaggttactacaggtcttggtattacttttcttccaggagttcttcgaacttcagaaccaaatttaagatcatactgatttcagattcgagttagagctataggatatcaaccataacaataagaatacacaacacttcaaaatgaagacactgaaagacttcctccactatatttttattctttgctctctgtaacattctctgttttgtccttttgaggaaaatattcatttgggggattaaatttgtgggatgaaaatatatgtggagttaattgtaactgaacttttagatgtgtacatttttgtaaactacatttctaacattttgaaggtagcagttaaaggtttttaagtatatttcttaagtaaagtcttcattttatttgaattttcatgctacgaaataatatttacttgtaacaagtaaaacaatatagatatgcataaaaaacctaaatgatcttccctctacttcattctaatactaagtttgctgtatccctccctacacatgctatgtgtgtatacacacatacacacatacatgtatataggtgtacatacatacatatatacataaaatgcacatacacgtacatatacaggtatatgtatgtgtgtgtgtatttgtgtgtgtgtgttccctagacaacaagaggtaccgttgagaaggggcaaccaccaggaagtgatgctgatgactcatctaggaggttctaacctctgatttaacccagagctatagcacagagctagtcagcaggacctcaaggctcttttacaatacggaaatattttatttcactatctctggtctagaaattatccagcttattgattcagtttaatttatacttttaaaacttttcaattggctctttatcatatttattttttcttgtcttttctgccagtttttgtttcaaaacttcatgtacttttaagtggaagttacttcttcatttagcttttttagtatcctaaaggccttggagccaggtgtatttcagaattcaaaatttttaagatttgaaaaaagataacatctccagtgaggtctgggataataccctataatcaaacaggttaatatttctccagtgaaaagcatgaataggcacacctagggagacactaactgactatatacatagacttatatcagtttagttcagactttgccagcaaatgattattggttaggttaggtttgccaccaaaacagttacaaaacctatttccttttcagagtttggggatttcagatcatgggccagtatatttaaagtctttctcagactattccataaaattcacctcatctgaagtgaactcatctctgattattttgttacctgtctttcttaatattcaatttatgtgttttgaattttgtttacaggcatattggcttattttgaatgagaggtttttatcctctccttctttcgcatctgtttcagcctgctaattttgcattgtcttagctgtccactggatccttagcccaggagcaggcattacagtgtgccttctctattgttatgacactgaagataggagattcagacattgaccccatgaatggcatagctcagttcttggtcatgaggccacatatttgatttttggttcccaaattccatagcttcttttaaaaatttatttagttttatatatttaggggtacaagtacaagtttcttatatgcatatataacatagtggtgaagtctgggcttctagtgtacccatcacccaaatagtgaacattgtacctaataggtactttttcaacaccccctcccatccctccacttttcatagtctccagtgtctgttattacactctgtatgtccatatgtacccattgcttagctaccatttataagtgagaacatgcagtatttgaccttcacacagcttcttataaatccataacccaggaggcagattggaagcaatttttagcttctttttaaatttgaacatccttgtcttcaaaaaatgtgcctcgatctggccgctgtctcctatggcacatgttttattctcttaactctgcatgagctaaactgctgaccaaaataatctgcttccagacctagaggacaacaggcttgtgacttcagtcctggtgccattttgggtttttctttaacttatgttttatcacctattacttttgattctaaatatatctttttgttgttcttttaaaacgttttatccagagttggtctctcttggagcaggagtatagtgaatgtgaattctctgtgccatctgaaccagaagtcacccatctttaaaaaatgctaacctgtttttattaaaatcctcctctctctccctcagctcagccactacaccatactcctccccttcacaacaaaactcctccaaaatattgtctacactctgtgtttctaattctttatgccctactcacacctcaacccacttcagtctggctttcacctcccactccattaaatttattttgccaggtttccgatgagatctttgtcactaaatccagtggatatgtttcagtcctcatcggtttaacttctcggcagctttcgatgcctgatggacactccctgaattctcaaactctctcttgtttttcataatttaagagctgtcttaataatttaaaaattaacgacaacctgattctctttctgcctctctcaccgcttcctcaaaatatcatttgcaggctcatcctcctctgtctagccattaagtgttagaatttgtcaatgctcagtcctaggccttattactctatgttctgtctcgaggagtctgatccatggcaattgtatcagacccacctccacacagatacctcccatattgttatgcccagtcatacctctgcttttatatgcagaccagcaagtctaccttccttcctgacattacctctttgatgtttcaaagcaacctcaaactccatttcggtattccctacctaaattaatgctgctaccatccatctaattgcataagccaaaattcttagggtcatccatgacttctccaattctttcccgcacccaaactaatctatctgtgagtgtacatcccgaacttttcttggcattctccttccatctcccttgtccaaaatacaatcatttttgtgagaatctctgtagaagcctcctaactagctgacccacgtctgctctgcccattgcacctcttgatcttttctccagactatagccagcactcacattctgatgggaatatttgatcaacacttactgctcttaggatagagacaaagattttaacatggcttataaaactgccctttctacttcccaattttattatactccctcttgctctctgtttctctgctcctctgacctaccttcagtctcttgggcttgcattttatgggaccctacagcattctatgttgtatgtagcctcctactgcaagccgttccctctacccaaacactcttctctcccctatggcctggttgtcttctccttgtcctccacactcaactaagttgctgttcttcaaggaagccttccgctctccctcatctcctcgactagctcaggcccctgtcttacacctctgcagaacattattcacatgtagttttatgctgtgtttgtctagttatctaattacttgattcaagtctgtctgagggtatgtctgtcttgcttcccattgtatacctatcacctcgctggtggactggcatagcataggtattcagtaatatttgctgaccaaatcatttgaatcctcattttgacatcagacatattagttatcccttttagtttgtataggcaacagatttgataaacccactttccatgtatttatcctaaaacactaataactagtggaggtcagttctgtgccatagaaccagaaatattcctccagtttgacactgattccattaaagttcacctttttaaagataaataacacacataaataatcataacagcaagcagtaaagtttctgtgtgccatcttttatgtcttttatctgagtttctcaaacctgactttgcccatcaaatgtaccttaaactcttcaaacaagtcttccaacaggtaatccatataatttagagtggaaagagtagtagaaatttataatagagtgctagatagaacttgctgccagtaataacttctgggcgaaaacctggtacatcactgacctgtgagtgttttgtggtggggtaatgacagtcaggcccttgtttggagatgcccaggggagaaatgctggcagtaacctcgccacacggagcagtggcagagccatatttccctctagaacatggagtcaacattggtatggctgatccacattctttcccagagggaaatctttctgtcatttaagtgacagaaaaaaaaatcactgtggaaaatagcagttacgtggttcagagcctttcagaaggaataccaaatgtgaatttcctaaggcagggagagggaggaccattttaattaagtgtggtaaatcttgcctgggcctgagcttgcaggcggaggtgggttacactgctgaggaataaagttctaatattggcccaggcattaagtatgtgtacacactttgacccagcaattccacttctaggaatcttacagaaatactagcattaggatatatgcatgatgattgtataccattataggttgtagggaaaattaaagacaacctgtgtccctcaataacggatttgttaaatagttttatattcataccacacaatggtaggcagctgttcaaaaaatgaagtatatttgcatgtaagtgtatttgcatgtatatatttttgcaataaagacatgtaaaataccattgagtaaaaaaagcaagtcatagtaaaaagcaataatcaaattataataattaatatttacatagtgttttttatatgtcagatatacttctgagagctctgtatgtattcacttaatcctcagaacaatcttaagaggggggtactattgttatctgtattttactaaggaggacaccgaggcatacagatgttaagtaacttgtgcaagatcacacagctggaggctgtctgattccagaccccaagctcctaaccagtaggtgatatcaggggaggacacactttttctgtaaagggacagatagtaaatatttttggttttgcaggccctgtggtctctgtcatcatagcacaaagacatcccgaattgtctactatgatcacagtttttcttaatgaaacaaaacgtgtgtgcatatttgggcatagaaaatggtttggtatgaaaatcattaacagtccttattaacactccttatcccaggagcgagatgtgtgtgtgttttacattatttcccttgatacaatttaaaacttattaaaaaaaaaacaattaaagagcccaaaggcacatttccattccccttattcctcatcagtacttaatttttacttcaagttttagaatgtcttttaccttgagaaacaagcagcaaaaacactcctgggtagaaatagtagaagtttctctaagtagggctgccagatttagaaaacgaaaatacgggatgccccattaaattgtccaaataaacaataaataattgtttgttatttatttccatttaaaatttaacagggcaccatgtgttttatctggcatctcaacctgtaggaccatattccttactgggatgacatataaaaatacttccagggtgtcttctgggctctattttcaccattgctgatgcaagtgtggcctgtacatgtcacagctggatcacagtctgtctgcttggcctctgtgacaggtggaattgcatctgcggctgcgcatcccacaggttggccactacgtggttgtggtcgagtattccacggaggcagctcagctgtttgtggttgatgtgaatgtgaagagctccgggtctgttctggcaggccaggtgaacatttacagctgcaactacaggtactcagccccaccaagggaattcctctgtaaaggaacaattaggaaatctgccttaggaactttggctgttacttgcattgggaggttattttctttttgaggcagctcttgaaaacaagcaggtgactagttgtgtggcccaacgtcatcaccagtgtgggtattgggagtcctctctatgggcagtgtaaaaatgtggcattttcttaaaaagctgtatgctgtacttagcaatttggttcagattcacatggcacagcacaacctttttatttgattctctatcactcaggtgcgatgcaatgaactcactgctctcacctcaaaggctgtgtcaagtacctgggtgcatagcacaaggaaaaagactcattctcagtaatgttagggggtgcacacctacctttgcaacacaccttcagaactggggataattaatgtttgatgattgtcaagtggaaaaaaaaattaacaaaggacttcaaaatttgccctgatgaagttcttctcttccaagagcactaactgacaagggcttattaaaaatggttttgtttgcataatatttcaagatgtgtgcaaatgttcagagcatgctgtaattaaagaatcagcacaaggggtgtttccacatgaaattaattgtatactaaatgggactggaagtcagagttccttgaaacagcagatggagcactgcagtaaacccatccagttcttggccatggccttgaacattgtattactactactttcatgttgctttttgtcaaacccaagatgacctgaagcaatggacatcttccctgttgtgaaaatgaaaacaaataaacaaataaacaaaaacttatccaaagagttacttttagtagcttagaatggaaacttttatgagaatcgatgaaatggctattgaatcaacatcatgccctcagtaacgctaaacaagcagctgcgaagtctttgtctttgaatgatgatagaaccaaagaaggtaattgtatttggagttttaacagaagcacaaaatgagcctaaaagagttctccagggatgttctgtcattatctgaagatatgagcggtatctgtctatagatgaaatcagcaaccactggaatgtccactcccagatgggtgggttgccacctcacctgaggcctggagactgttagccgcagggcctggaccagggcttctccatacccatttgtccacgcccacccaccagttcggctctccagctccttccacctccagatcccatggcttgactactgttgctcaggatacaaagtggagatggctaagggggcaggaggaactattcataacaaccctggtgactctgaatcatctcagaagagctctgagaatatctatgccaaggagaggagtggtttcaaaaccaaagaaagaaaggacaccctttctgggcaccatgggtgttgtttcatgacctaagtctgaatggagttattgagagtgaactgcatgtcagtctgcagatcattttggctctgaacatgacaacaccaaagtcctgctttaggagtttctatccttagaaacacaggacagcatggtttcagtctaggaaacactttcattgtgtttaatccctccaaggagtgtcccgttctattttttcacgtggctaaaatacttcctctttctcttccttgcctgtcatgtggatgagtgaaaatcaacaggctacaagtatgggagtccaaaaaatatggcgcaactggaaaatatttgacccatgaaaacctatgttaaatgacaggccctttcagtgttgcagcatcttctgctgaggtttcaacttttcccagcatttctcaagtgagttctaacgatgttaaaaaaaaaatcccagcagaatagcagtggtgctaatagaaaaccacttttcaaagtagtgctgtgataaatctaatctgctctccataagagagatgatcattagtgattagatcaatctggttattactgttaggctatttcttaggaggaatttaatataggataaggataaaactaagtaaattacttagtatatttaaccctaggattatgcctaaatccaaaagaatgtgttttaatggatacacacacacacacacacacacacacacacacacactcacataggggagtgagaaagaaaacaacagtttattaagtttctaatatacaatacacactgggcttggctttttatataacttatctcattttaatcctcaccaaaaagtcattgcctaaattatttcaaatatttctcagaaatagtccttttgttttaatataacagtagtttcaaattatatttacagacagaaaatttgcaacagagtatgaagtcagaaacattactcaaaaagtacctcctctaagggttttaacgttagagttatttggttcaaaactgtgagcttttaaatgcccctgaactctgtatctcacttgatgtgatggagggaagagataccacaggtagaaatgaagaaggaagaaggaggagaaccagactgagtttcagaggcaaactcagggtctttccatgctggaggaaggccagcatgctcactgtcttggcgtgggatggtggctgtgaggctagcgggtgactttaattgtgaatagccccgagaatgttggctgtgtcttagagatctgcagttactgaccctggggccctttctctcgaggactaaacctagtacttcatcaagccaggcagaaaaactgaatggggcctttagccctgagaggtacaacactggccacggcaggaaggttattttccccatagagactgcgagctgcatccttcttcaactcatcatgcaggaaaattcactataattcattcagttataaacaggtgaaaccaaagagccatcagccaacccagaaggatgtgcagaatgagggagatgccgggagtcaggctaagaaaactctgttttctcttgcagtgttctctgccggagtgctgtgattgatcacatgagccgcatcgccatgtatgagctattggcagatgcagacattcagctcaagggacacatggcccgattccttctggtatgcttctgttttgcccattgaattttagaagcattttgctgatatctatattttttgaagcttattaaaattttggctggggttgtattactcctataatctgtgaagaattgccagtttaatgtttattcttcccatctagaacctgacttgcctcttcatttgtttgagcattttttgatatggcctaataaaatttagtcatatttaagcacctctcacaaaatcccgtttcattagtttttattcatttctactattataaagaaaatgtcttctgttattatatttcctagtttaccattattgccagagtttagaaatcccattgcttattgtttattttcttttccatcttactattttattatctctattagcttcttggtaaattttatcaaaattttaaagcttataattacctagtttaaaaaaaactaaaaaactatttcaaaaagaatatcattcagttaatcagatatatatatatatatatatatatgttattaagagttaaaatatcaagtgtggcagactaaataatcttcatgcccacccttgtaatgtcatgacttgaacattgagtattctgataaacagagccagtgggatctcactagaaaggaggtggccagatttacaatgaatatcacagggaatttaagattctctaagtgtgaagcaacttcctgttactgctgatactacgcatgcatcacaccctgggaaatgccaggccagcctgtactaatgtgttttaaatatttgtgcctgatagtattaaaaacttggagcctgctcttaagaagtagctggaattcagtttttaaaaaattataattataaaattatgactccttcttaaaacataacaatctgagggaatctaacctcttcatctttagaaattataatggagctgaatcttcatcatttaagggtaagttttccctttttgaagtagtcaaatgccattcagagtcaaggctggctagaacataagctctatgaaggcaggggtgttgtccatcttggacttgtaagaccccctagtctcagtggtattcaccaaaaatgtttgttgttgttactgaatagctttgcaatcaagctggtaatacagttttgatttaaaatgaagtatattgataaattaatgactaagtttttttgtgtgactcaaaaactagctctggagacagttccttcaacaaaggccaaattagcctgagatgggagtcattctttattaagaagggttatttctagcagtggcagccctcactttgaaaagcaggctctctggcccacaccacatcccctatcttcctcccaacgggcctgaaaagccaggattggcgcaagacaagacagaaaaaaacaggcactggaagtcactgaaaagagtagtttctgagcttccttatggctttgttctcagttctatttatgtgagtatttcagcagtaattcagtcagtaattctataaaacaataaaaaggatttgttgcacataatgatgcctgaggacatgccatcctgcaatatttactactttaaaataacgattagaattattatggataaatcctttacttaatagcttttttaaaagggtgtttttggccataccgtttgttttgctggtaactgcaatgtgcctttgtgcattgtatttgctcactagcatcaagtttgtatcatacctattgaagaattctcagctgagtatgtgagaccacaagtccactgcattgccagttatgggcgatttgtcaatcaaaggtaatgtgtttccttcctgtctccccgttcatgttctgagtgatactgggatgagtgtaaggctgaaactttatactcaacgtcagaaatgatcataagccaaggtgctaaagtctggtggtggatttaaaacagaaagaaaaaccagctaaataatttaccccagcagtttttccagaattccgtaatatcaggaagctgacccaggaacaaccagggaaatggttaagcctacccctggagggcaggaacgctgagttctattctgagccctcgaaaagactcgttttgttccaatcttttaatctttctgtctgagactcttcatttagaaaaccatgaaaataatgacctatctcataactatgtgatgagaatcagctaactaatgcttattggggttttggtagggttgttttgctgtagattcaaaaacagcttatgggcatggtcatgaaatctggtgtgcatagttaggactgtaggaactaccaacacaatgtgattctggttgtgcgtaaaagagacgatgtatattttttctttcttatatagtgttctgtcaatatttatgtttagaggtgaataatgttttattgtattgatctcattttaacaattaattttagttttggaaagggaagtttccataagtttctatctaacttactttacttcaaaattaagattctctctgtttcaactagttcaatggaacaggtggctggaatacacttggcatgagtatcattatataaagatccctagagttctgtgcttcccccagcactggatccttttgatgcccatgcagtcctatgctccaagtctgtctcttcactgatggtcagttctgtagctttgggttcttttaaaaatcagatttttaaatattctatttttcagtgccacctgtgtctccttggcccatgaaactcctccaacagcattaattttggatgttctaagtggcaggcctttccctcacctgccccagcagtcgtcaccttctgttgatgttcttcctggggtcaccttgaaggcaccgcaggtagtgtgctgtttctaaaccagtggttctcaaagtatgacctctgaagcagcagcatccacatcacttggaaacttgtcagcaatgcagattcacagacccactacagacctactgagttggaagctctgggggtgggcccaggaatctgtgttttaacaaaccctccaggtgattctgatgcccctgaagtttgagaacctctactgtcttctgtgaagagtcccagaaatgcaggcatctggttaatcctgcctaggaccacccctgcctgatgccctttccctcctgggctttgtccactagatatttggcaattattcatggcccatattgtgatagcttatatttttgtggactgctgctgtttaatatagttgtttattagttttcttcccaagttggatcataagacttttagaatagttattgtagccaagaacctttctttctttttttttttttttttttgagacagattcttgctctatcactcaaacttgagtgcagtggcatgatcatggcttactgcagcctccaactcctgggctcaggcaattctcccatctcggcctcccaagtagctgggactagaggtgagcaccaccttgcccagctaattttttttttaaatttctgtagaggtgggatcttgctatgttgcccaggttggtctcgaaccagtaaacttttttgtatcccccactgcaccttgcaggtaggaaattatccataaacatttattaatcaatcatctagagcacaaaggtgaaatataataaagtaatgcattccgtaagctaaaaaatcacaggacttttaaagttctgcattataaaaatataatttacattatgatattacaaggtttagtatcccttatccaaaatgcttgtgatcagaaatgttttgaatttcagattttggaatatttacattatatttatgggttgagcatccctaatctgaaaatctgaaatccaaaatgttccagtgagaatttcctttgaacgttatatcagtgctcaaaaagtttcagattttggagcattttggattttcagtttagggatgtccaacctgtattatgtccttataatctcaaagatggtttgcatgtgttcacagtgcattggatttgggaatctacaggatctgagcgacagaatcaaataaaatcccatatgggaaaggcagtccagaataatagggggaaatgagttgaaatcaagatgacaagagttctagtcctgcttttgtcatgaaattagtgtgtcattttccatgaactatttacccccccgagtcatgggtctcatctgaaaaatgaggatgagctttagttgttattgtgttgttgctgttgaagatttttgtgagttaaaagattcattactcaaaaagtgaggctttctggggagagagggcttgtactcgagcttgagccaaaggagggtgggctccagcttttagccctcaaaaacactcgttttcatggtgggagtggagggagggccagccagggccatccaggaggactccctctcccaggggctggaatttatgtgatgagaactccccactcatgacaaaggagggagctgggagcccctgagatgtcttatcagcttgtttgggtgtgggacaaaagggacaagggtataatagggcttgaaagctgtcagtgggcaaacatcaaaaatggagtcagagctgggcacagtggttcacacttgtgatcccagcactttgggaggccaaggcggcagtattgcttgagaccgtgagcttaagacctgcctggagaacataggaagaccctatctctacaaaaatttaataattacccaggcatgatggcacgtacttgtagtcgtagctacttgggaggctgaagtgggaggatcgtttaagcccaggagtttgaggctgtagtgagctatggttgccccactgccctccagcctgggtgacagagtgagacctcgtcccttaaaaaaaaaatggagtcagactctttattgcatggttattatgcatagcacagttatgaacatataagtatggccttcttgcaaacattacacatttcttctggatatgtacccagaaggccaattctgggttatgtgttcaactttggtaaatattgccaaacaggtttccaacctgacttaccaaattataccccctccaacatgtatgattgtaccacagtttgtttatccaatctgcaaccaagagacatttggtttgttttcagtttttgtgataacaacaacaacaaaaaagctactgtaaatgtatgtgtgaaggcttctgggtgaagatgggttgtcatttcactttggtaaatacttaggttgttttgttttttaacctttgaatactctatgattccagttattcatagctcttcagcttgagggtttttaattttttttcctcctcttttttcctcttagaatcaagtgaccctgagaggacgtgtaccacacctgggccgatacgtctttgtcatccatttttaccaagcagcgcacccgacgtttcccgcgcaggtgtcggtggatggcgggtggccacgggcaggtgagctgcagtgagcaggccctgctgcctgcctcaggctgaatctacagtccggtgcatgacagaaagtctctctctctctctgccaggctccttccatgcctctttttgcccccatgtgcttggctgccgggatcaagtgattgccgaaggccagattgagtttgacatctcagagcctgaagtggccgcaactgtgaaggttccagaaggaaagtccttggttttggtgcgttccactcgttcctcaacttgctcctcacatgcctgcctggctggccattctgggtgtctgtttagctcatggaaataattcttccaaggaattgaagtcatatttgtagaaaaatgtttaaattttacagctgtcttttaccccccaataaataaataaataaagcatgtgacaattaaagtcaagggaactaggacagaagagagtaggcgtcgcccctctccaccagcccctgcttcctcatctgaccagtctctggagcatttttcgctcctttcttcttttggcccctgcagctgctttctctctgttttccctgctttctctagcgctccttgggtgatttctcttttccacttgtcactgtgtgttggcgttccttccgatttgacaccgagcccctcattgtgtcatttctccttggatacatcttccgtgcccatcgattctattctctccactgtgggaaggacacccacatctgtgaggtcatctctgatctttcctgaactccagtatgtgaccaccatctcctgcgtatctgcctggccagagatcttgaaagtcccttgcttagtctgcaccctgcatagccccgatgtgcctacccttttcatcaccttgagtgatgacaaccagtgcctggagtcatgctgaccccccttctctagcagctctgctcccacatctgttaccacaccccagagtctttctctgccgtgcctcctggaggcaaccattctcttctagccccgttgtcctcactgaccatccttcctctcacttgggcagggccagcctcctggcagcactcccttcctgttccacctccttccagtgcctcctccgcactcctggccattacctacctggctggagggattagagcatgccctgtgacccagccacttctctgggcttccaacaactgatgggatacactccatgtatttccctaggatccacgtgcctcactcaggccctcacgaccccctaattcatcttttatctttctctctgccattgccctactccacgcctcccacacctcacgctctggccatacaaatccgttctcaaacccccagatatgccatgtcctctcatgccaccaggctttctcacactgtccctttttctgacattttctgtctgtttctctacctggataagtccagcctacccactcacccagctcagagttaatttgtctttctgcaaagccctccaggaagcattgcccagactctctgtgtggccctccaggtctctgagtgagcctcctcctctctgaggaagtcgtcttcccaggagacaagggctgcatctgttcattttgcatcccttgtgcctggaataccacctggtgtgtggtgctcagcaaacgtttattgaattgaatatcatgagagtaataagctccctgtaagctgtgagctggtgagcagttgacaaagatgtttgaaaatttctacagtgtttgctataggcatattctgatttatactggcacagagaaccaaactaccattattcataatagggtaccaagtatgatgaaagctctaaggacaagctaacaccttctttctgcattgttcttgccacttttgtttgtttccctttaaaaatacaaaacagccatccctggagatccagggagacatcaggcatgggtcacatggagccctggccatccagcaggcccctgcttacccttaaggtcccgtgacccagccagcatgcaaggcttttgcttctctgagtagaagttccaagggctctgcctgggaactcatcattccctgcacagtaatgtggactgagcctttactcctggctttggcctgttcctgtgattgtttttcataaatcctgattcatttggtcttggtcttaacaataagggtgttgatctcagtgaagagaaagtacaggttgaaaatctcttatctgaaatgattgggaccagcagtgttttggatttcagatttttttcagattttggaatatttgcataatacttacagattgagcatccctaattcaaaaatcccaaatccaaaatgctccagtgagcatttcttttgagcatgatctttgagcatcatgtcagtgctcaaaaagtttcagattttgaagcatttcagattttggatttttcgagtaggggtgctcaacctgtataataagtagccttaggtctgtgtcatcattggaaattctaagacatgctggtggatttctttcaggtccgtgttctagtggtgcctgcagaaaactatgactaccaaatacttcacaaaaaatccatggacaagtcactcgagtttatcaccaattgtggaaaaaacagcttttaccttgagtgagtatcactttgtgggaaggctctggaatgcagaggcactcccacattcctgaccagctcgaggcccagggaggggctggcccatggatccgtcctcttccccgcactgcccaagagagtgtcagtgagtcccaggggaagatgctctttctccacaccaaccctcgcatgacagactttgccatgtgctgcctgggaaagatgactgtcctcagctatgaactcaacgggggtccgtaccccaagctgagattcaggggctgattaggagtttccttccctctccactgtttcctgtgtgccagcacagattcctaagacataccacacagggtaccctccactgggaaggacatcagccctgagtcccactctcctccgccatctaaccaagcagggagtgtccagagacatggcttccctgccctctctccttgtgtccttgaatgctaagagctaggatggccctgagtatcagctcctgccattctcttctgtggacccaccctttccctgtcatagattcctgaagagcccaggtactccagaagctctgggaggcagacacctcctgtacagtgaatattaagagcaaaggctcttaagcagctgtggaggtgaatgctgctcagccactccataaccttgcagccttgggaatgtcacctaacttctaggagcctcagttgccttatctgtgaattagggcttaggcctaattggttgggaggttggaaggtcatgtgggatattactaaggtttccagcacacaacattcaatgaatgatagcgattctcctcctcattatcattttattagttgtattattatacacataggtcgacttttttggtaaccactttattgagctataattcacataacatatagttcatcttttaggtctatttctactcttttatcccagctgtgcaaggttcccgctgacctgttctgtgatgtctcctcctgtggcaggtggtagggggagggtgtggctgtcaccggctgagtctgaggtggggtatttcccactcttccctgactccagaaccatgagcccgtcccacagatgctgctgggtggagcaggtggtaaaggcaaggttgaggccactcccatacacacctccccaggcatcaccatgagttgtttctgtctccacagcccccagacagcctccagattctgtaagaattccgccaggtccctggtggccttttaccacaagggcgccctgccttgtgagtgccaccccactggggccaccggccctcactgcagccctgagggtgggcagtgcccatgccagcccaacgtcatcgggcggcagtgcacccgctgtgcaacaggccactacggattcccacgctgcaagcgtaagtgcacgtttcccatcacccaagttctgctctggtcccgtgtggatgatgcttaccaggagcaggcttcttcagtggcactgtgctagagactcacctggagatctggagaaatgcagattctgattcaggagactgggctggagcctgagtctctacatttccaataagcacccaggtgatgcccatgctgctggtccatggaccgcactctaagtagcaatgttctagaagataagtatttgtgactcccctgctgtgtggcctatgcacttggcaaagcaggtgagtgtgacaagtcttaaacctcagaatcttggagagcttgatccccttcgtcacagaagccccttccatttttttggcccaacccaaactcagttgagataggacagccagggtcatgtggcagtgctactcactgaatgagaacccatgggacctttatctcagaaccatcttgtggtccgaggggtagggtaagctcacttcacgtgactgcagtgagaaatgcagtgtgcagagtccccatgcagaggccaaggaacaagaaccctgctgccaggttgtgccctgaccctgggctctggacgcacagggtactggggtgatgtggatgtggagccacttcagggagcctgagagcagcctcctaccaatttccagaatccttcaatggtccagaggccccatatgagtggcacacagtggcagcgaggtgggctccttggagggtctttcttggatctggctggctcctcaatccccatccacactgtctgccatgagcatttggtgtggttggtcttgactccaagaaatgggcctttcagatccaaatatttctctctgaccctttggaggcttctggaaagcctggcagttggtggagtgctgctggagcccaggcggcctttgaccctcacatggtatttctttatcccctggccagcgtgcagctgtggtcggcgcctttgtgaagagatgacggggcagtgccgctgccctccccgcacggtcaggccccagtgtgaggtgtgtgagacacactcattcagcttccaccccatggccggctgcgaaggctgcaactgttccaggaggggcaccatcgaggctgccatgccggagtgtgaccgggacagcgggcagtgcaggtgagctgggggagtagcctgtctgcttctgtcacagggaggtcgcgtgccatctgcccacacactggtcatcgtcactttccacttcccacctgtccaggggtgccctgtgttgacctcggcatgagcttcccagacaggatgggttgcagtgggtggagtgattggtcccttaggctcagaactgggcagagcctgtgtggacagattaccagtcatcttgggccggcagcagccttgcccattgactccagcatgctgtcactatgggactgtgttctgtgtgtgccatgaggcagaagtgggagaagaatgatacatgcataatgaaggtatctgtgtgctttgctgggatgccttgtggtgagcacctgtccatttgtatttaggtatgagcttcataccctccttctagggttcgctggcagtgtggttaaggtcaatgtgtgacagagtctgaaatcccacctagctgatttgggctggaaggggagctgaggcctccacagcagggcttggtgggagtgaggagggagtcagggtgaacaggagacaggctggagagcctggcctgagagtggggctgccctcagaggatcgctgagcagtccagtacttaattgctaagggacaggtggagacctcggctcatgcagatgctgcattgctgagaggtttgattcagaggctgcattggaatgtggaggccggtgtcacatggttccaggtgacaagcctgatctcagcaggactgggtgggggctgcaggggccagagaaagcgtatggctcctagaaggagagactggtaagaattagatcagtggtgatatgctggggaaactgagtcagaggccaggccaggatggcagcgtgcaggggaaagcagaagtttcaccatgcaccccactcccttcagcacgcaccccaggcacatggatattatggagtccgtaatttgggtgtgagagccaagagggcctatggctgctggggacaggcctcagtgactcccacttgagggtggctgtggtagtctcccatgactgccattaacgaatgccacaaacaacgctaaaataacagaaatttattcttacacatttctggagcctggaaattaaaaatcaagatgtcggcagggttggtttcttccggagggtctgcaagagaacctgttccatgcctttctcttcgcttctggtgtgcaggtattcctgggggagtccctgggctgttggctgcatcactgcaacctctgcctccgccattacatgctgttctccctgtgtgtctctgtcttcctgtggcgtttccctctctgtacgtgtctctgtctcttctcattttcttataaggacaccagtcatactggcttaaggcccaccgtactctggtataacctcatcttaacttaattacatctctaaagaccctgtttccaaataaggtcacattctcaggtagtggggggtagaacttggacagatcttttgtggggatacaattcaactctctatagcagcaatgtttgcttttctaagaaaggccccttaaccacacctttaattgttatctggtgcctcccaactccttgataatactggaaccttgtaaggaagctgggagaaaaactcaaatcatgaaatattccaagtctttaaaaccacaggtgtgagtcctgcctgagtcagctcagtcactcaagaaccagaggggatacctgtgtttaatcacaggaagcaaaggaaccaagggggagatggagaatcagttttcaggcaggaagagaagcagtagagttttcaaagggagtggtttgtcaacaataaatcgctgcaaatggaacttcacacacaatttctcaatgctgctgtcacagaaaaagaaaaccaagagtgcttttaaaaatgttttaatcttgttaaggcaccagaaggtgatggatggatttactgcagtattttatgtaaaaatccctaagaattttatttttaacaaactgtcactgccaatgataatttaatagactggaatattcctaactcaggatggaggcatgtctatagtaagttttgcccaaacctgacagcatcaacagaaatggaatcttgctgacttgtattacacttaaaccaagatgtaaaactgtttactttgaccttaggaaagggactataataatctaatgggataacgcatcttcccatgatcaaagtagatttgtcataaaagggccttgtcagaaaatgtaagaaaatttacattactgtaaattgcacaaattgcccatgataatttcagtgtaaatgctgaaaaagcttttgattgcctgaagggattacttctttataaatattagaggaaaaactatttttttcctccttagaaaatttcctttatgaagaatatgtttagaggagtctaaagctcatgtaaaagaaataatcagagatacctagagtttatgagaaaaaggaaaacacattctttcacagtcttgtcctgcagttgtacaaatcatcacaaactgcaaagctgaaaaattgcaattctcaaattgtatttaactacttataagcattcaactttatcatactataagaaaatcaaactgttacaaatattcatctactttaaaatgaattacaaaaataattttagcaatctacaatactcactctttacttagtcaacctggtgttgtagttttagaggcaataagttggaaccataaaactgagccttcgactcacctttggcaagtcctagctatgagactgggcaagtcattttgtctgcctggctttcagcttcttactctgtaaaatgaagtttagtaaaatcatctctaacttcctatctaaatttaaaattctgattccatttctttttcaatctctgattgtatcacggactatattgtgtaattatcgaaaggtctattattctggccaattctatcaagatcaaaaagatgcttatattgatcaaaacttcattttttttagcacaacaagacagcacatatatctatttatagcgatgaaaaagtaaatttgcatctgctcctagtaatggaagatatgtgccatcagattctctgaacatacaaaagggctagaatatttttggaagactttatccatctgtgtcagacgtgaggaagctggagatccctggtagtaaaagctgcagtactgttgaccgcgtccaagctattttcagattgatcaaaggagatggcagtccacctggacatccagtgaagccacgtgtacctcatgccttttcagaagggtagtagccacaggaaagatttggggattccctctatctccactcagatttactaagcctttgtgttaaatggagaaattaaaaaccagaaaaggtcatcgacttggtgttctcagaacagaagggcttccagctaggcatcaattcctgagccctaacaacttggagaggcaatttctttgatgcacttcatcaaataatctgtgaggctggccaggcagtgtgcaggcgctgggatgtgctgttgacacagtggtgacggctgtaacagccacacagaaggagctcagggttctcacctgcacgacctctgtcgtccttcgtctcctgtaatactggcatcttcttctaacctctctgatgatgcttctctggccatttcactggcttcatttttctccttctgcctccagaccaagaagatgtgtggtgtgagttgcgtcctgtctctgccgctcactctctgggtgacctcaggtatattacttctgtcctctgggccttaggtcttcatctgtaaaataaggatcctggaggcacctttagagggttaaatatcctctgtgaacacactgaaagcagcgcctgatacactctgagcacccagtaagtattagctgttgtggttatttgccaaggtcatggctgtctgccttcctccctctatggtttgtccctgagactccacccattctcctggcttcagccaccctcactcctggatgattcccagatccacagctccagtcctgatccttgagggctatcctattccacctttattgcaaatcgactcaacctgggttctcttattgactttacacaggtagccttggacaagttccctaagctctttgagctcctgtctcctcacatgtattatgaaaagttagattggataatcgttaactcctgaattctacaatactgatcctatctctgaaacccatgtcactgtcttccctttcaagccatttctccctttgggttaaaaaaaaaaaattctacttaatgataacagcctctttccagtcctttaagcctgaaatctgagtatcatcttagaatcaacccattttccctacagccagtcaggtgtcaacttctggcaagggacatattatcccccttcctttccatggctgtctacagcctggttaagtccttttaccacttcatgttcagatgatattgatgctttcctagttggccttccttttcctggtttactcattcattctttcttttttggctctttaagaagaatatactaaattgacaattatactgggattcaaatatctgtctttcccttaactttattcacaaatacatggtactattagtctgtgaacttgagacaatgttgataaatgcatacatgtttatgattttatcttctttttgttttatggcagcctgcccttaaatgtgattttatcttcttggcatgtatttctgtttgtttttgttattttaatgaggatgaaacatctcagttccttgtgaggttttttagctttcccttaagtgttattttgtatgtgttttgttgctcaaagtgcatctaatacctactccagtttgggtgctgtgcttcctgtggaaggcacacatgtttgtgatctggtgggggcacctgttctaaccaagagtgacagtgcagcatggtgagcgccatattgtgtgtgggctgttatgggaacaccatttccatgacatcacattctttgctcaagaactttccttaattccccattgtctaataggataaagaccaactttccgtgatttgacttctatctaccctaacttttagtacctttttgttttttctgctttcttctctggcttggttttctcacttcctctaaacactttttgtctgtgttctgttctccagttgtgaaagggctccctcctcctctcctactacccccaaattatgcctgtccttcaaggatttttgtgttaaaagtacagactcaaagaatgcaaggagccttctacgagtccacagagatcgcctcatcatctcattggccaaagcaagttgactgcttagccagcttctcccttaatttccacattctaggtcctgtgtccgcagtgaaacatgtccacatcaagactgacttattctactttgtcccctccctcccatgtcccctaacaaaggaatgtgtatgtagaaggcactcaataattcttgagtgaaaaaataaataaataaataaggtagattttgggctctaggttaaaactggactttgatatgagcataatatgaagggccctacagtgtttattaatttattcatttgagatggagtttcactcttgttgcccaggctggagtgcagtggcgtgatctcggctcaccgcaacctctgcctccagggttcaagcgactctcctgcctcagcctgccgagtagctgggattacaggcatgcaccaccacacccggctaattttgtatttttagtagagatggggtttctccatgttggtcaggctgttctcgaactcccgacctcaggtgatccactgcctcagcctcccaaagtgctggaattacaggcatgagccactgcacccggccccttaatgaccaaaggatgcagctcaccccaacacatctgggcctgattctctgagacatggcaagcacccacccatgcccagatgttgttacaaaacgtttggccaggagccccattgccatggagataaattctcttgacctgcctccccagaattgccattctgcagctactccttgggtaccagaaattctggtagggctgttccttgggtaccataaattcgctgtagagaaacataccaagtcaggccgacatgaggtcattttaaaggatgttcagccagactttgaagaggaaatgtcctcttccttccctattgtcatggcaccaccaaaaacttccctattgtcctggcaacaccaaaaactgtctttgcacaggatgcataactcaattatctaaacattgcagtactcaagaatatagatattgttttggttcaccctggcctagcaggcccagcggggccactcagggtcccatttgcaggccgctgctctcctccctctgctctgttggcttttttcccatctgctttagtgctctcagctgctacccatgtgctgtgtgaggctcagagcttggtcctatattactgactggccacatcttctcagtcactctctttccactggatcatctcgcatacattctaaaataaacacacaggccagtcatgattttgcttcccttcctccttgtctggacaagcagcttccacagctgcccttgctgcaggtactcttgttcctttcctttccagtgaagtgaaaatacaaaacgtggccaggtgcggtggctcacgcctgtaatcccagcactttgggaggccaagttgggtggataacgaggtcaggagatcgagaccatcctggctaacatggtgaaaccccatctgtactaaaaatacaaaaaattagctgggcatggtggcgggcacctgtagtcccagctacttgggaggctgaggcaggagaatggcgtgaacccgggaggcggagcttgcagtgagccgagattgcgccactgcactccagcctgggtgacagagcgagactctgtctcaaaaaaataaataaataaaaataaataaaaaaagaaaagaaaacataaaatgcaggctccagggccggatgtggtggcttacgcctgtaatccctgcactttgggaggccaaggaggcggatcacgaggtctggagatcgagaccatcctggctaacacgatgaaacctcgactctcctaaaaaaatacaaaaaattagctgggcatggtggtaggcgcctgtagtcccagctactcgggaggctgaggcaggagaatggcatgaacccaggaggcagagcttgcagtgagccgagatcgcgccactgcactccagcctggtgacagagcgagactccgtctcaaaaataaataaataaaaaataaaaaaatttaaaaaaataaaccacacacacaaaaaaaccacaggctcctgtctgcgtgacctcactttccaggtccctgcccagatcacttgctcaggggacactctgagttgtgcccaccaatggcgttcagtgtgtgagttgctcacctaccaccagcatcttattaattcacccttggccagaagccccgcatgtttgctaaaagaaacgttcagaccttgggatgccagtctgccaggttggcacttcatggcaacactgtccctctgtgcgtggtgttctttccttcactgccaggaaaagagaagcaaggttcacccagcctacgtcgggccatctccaatggccctcttctgttctgaggcttctctctctgatggcttttattttgggaggggtcatctgctctctcttctttccggtctctagaccaccagagtccttgtgctccacactcgctgtctctccagaaataaggaatcagctgagaacaggctttacatttttgccagactgcctgattacatttagtccgagggtcacaagaagagagcagttgttattaacctggggccaggagccctctgataagagaatgcaaaattgtgtgtatatgagaatgagtctttctgtgagtttagtggacacttttctgagaatatggcccatagtttacccagctttccaaaagcgtctccgatcctctcccagagtttacaatccactgcactagagccatccacttcaagcagaacatttacactctatacctacattactctaagtgtggttttgaggctacttccttatggaatcatttctgcaggtatcgagtagggagaggtgagagggatggggctgaaagatgcaacttgccaggaggtcttgcaagtaatgctgagttggtccttttagttgtgccgagtggacagaaaggcaccgtctcctccccttagcccatgtcacagctagaatagtaatagcaaatacttacgtgtgtgcaagcaactcctgtaaggtttttacatgtaatatttaatcctcacgacaatcctgtgaagtagatattgttacctccatttttacagatgaagaaacttggttgtaaagtgaccaatttgcccaaggtccagtaagtggtagagttgggattcaaagcaggttacctggttccaagtttatgttcttaatcacatacaaaatcctttataagcagatatttgccaaagggaaataagcagatatttgccaaagagaaacttaatgggatatgaagagtcgtatttaacttttttaggatggtcactggggtaagatattttcacaggtattaggagataggtgatggcctacatttggtagtaattgaacaataaagtgttattgcctatatgccaataaaaatgtatttctaatacttcccttagtcccacagaagagaatcagtgtgtaggtagatcccagctctgaatgcagtgcttggctccccagggctcgcggcactttctcttcccctctccaacctcgagttctgggttctccaggcacagccatagcccactgcttttctgcctctgctcagctgtttgtgttttcttgtctgcccggatcttcagttaaaaggacctgcagatggttgagggtggatgactcagagtgaccctcccaccccccactgtgctttcctctgagctctggcccttgcaggtaacaagggacattaagatccactctgtcacccaagcagggaaattgggagtcttccttgtcttctcttctttcctctactcctcatccagaatcttacagttcccagaaacctcaccccaaaatagtttgggagcccatccctcctccccatctggatacctttgccctaggttagcccccagtctctctcctgacttgacatcctgctgctgctgctgctggaattcaccctctgggctccatccttcacacaagtccaaccacaccctctcctccttaacagctgttcatgttgccttgtttgtaacttgccaagtgccaggcactgggatgaaattttgcatgcactgcctcatgggttcccagcaatcccaggaggcagcagctaccgtgttctgtccctcataggtatgaaaagcaggctttgggaagttaaagaacttgctaagatggtgtgtctcatatggtcagagctggattagaactgcagccttgcatgcacaggtctcagctactgcgctgtgctgccgtgtccagcccctctgtcctgatgatctgacaccacctacctcctcaggccatggggcagcattccctgcctggacatctgccccagcagcaccatgcttgtgttgttccctgtacacactgagtgatctcccgctctgttccttctgtctggaatgcgcatcccaacttctaccctatgactctgccctttaaagctcaggtcaggagtcatttcccccagggaaacttgtcacctgctactcctctgaacctcagttagattctgtgtaggttgtcatcatttccacttatgggccatctgcgggagccctccaggctcgggggccatgtcccttcttgcgccctcaacacctagtgctaagcctgacccatctacgacggtcatccatgaccatccacaatggccattggtcaatgacctacattctgtaagtgccttttatctgcctctctccattctgccttggactataagcaggcattgtatctatttaactggctttgcacaccaattagtccactatagtgtaagtgagcactttaaaattgtgtgtacaaagatgatgatttttgcttcctttactttgtgtacagatgcaagcccagaatcacagggcggcagtgtgaccgatgtgcttccgggttttaccgctttcctgagtgtgttccctgcaattgcaacagagatgggactgagccaggagtgtgtgacccagggaccggggcttgcctctgcaaggtaagagagatcgtgcaatgccagacaacagctgccggtcagcaggaaagtgcttcatgttgagtcaacatagaaaagtatgtgggaaatgggactgacccgtaagagatgttgatagtgtatgtagcattttatagtcacgatctcattttacagaaatagttaggaggtgagaccccttttatcttttggagaggtctcagaccgccttagaatctgatgacggatatagaccctttccagaaaaatcagcacaaacttttatctacagtttcatgaggttcataggttcacctaaaacccattcctggaccatggactccaggtgatcatctctgctccaaggggttccgccaggttgtaggagaccttccaattcccaggagatgttttaaggtggtggtgagtgagatgaattggtctccccatcctgtgaaccgtatggtgctatttctctacttgcaagatgccccaggggcatcttatgaaatttagagaattctctcctccatttgtgtgtggtataaaagtttaaacaattaacatgggatgaaagcttaataattaacatctcttttaatgttttgctcacatcctcatcctaacatcttgtgttggtatttaatttgtgcaagtagctaattgcaactagggaaattttggaacacgtgatctcttatttcatgttttgcttcaataggaaaatgtagaaggcacagagtgtaatgtgtgtcgagaaggctcattccatttggacccagccaatctcaagggttgtaccagctgtttctgttttggagtaaataatcaatgtcacagctcacataagcgaaggactaaggtatgcattgacagaaagtgctggggaacattttgtacatggatttgttaaatgataagcatatccctcgctgctccttggcctgcagtgttttaaaattcttgtttcctgaattcgtcagttgtttgctcgaatgccatgtgttcagaggggctttccttcaccacttcctataaaatagcacaccttggacactcttgctgaccttacccttgtcttccccataggagtcatcactccctatttaacattttgttttaaaatttgtttattgcccttcttcttccatccctagaatggtgagttcgctgatacacccctagtgcctagaacaggatctgggacataatagatgcccaataaatctcattaaataaatcgagtttgtcattttcccctttaaaagaaaaccttgtttctatactcacaacactctaacaccaaatgtgtggggttttttctatactaaaaattctctgattctcccagacactccggggtgtcctgcaattcaattcacttctgacactctctacctggaggtggcatcagactgcacaggctaagggctcagttcttccagactgctcccacttcagatgccagttgcaagtcccaggcctccagtacttctccagtgctttgctacaagttgggggttcccacagcccactcctcatgtttataatctgctataatggctcccagaattcaggacacactttccttcctattgctgtttattataaagaatatgataaaggatacagagcaacagccaggtgaataggtgcatagggtaaagtccagagggttccaggcatgggagttagggcgcaccatcctcctggcatgcagacgtgtttacccacccaggagctctcccaaactaccatttagggttttttgtttgtttgtttgttttttggtggctctttcatgtaggcatgattgattaaatcattagctattgataattaactcaatctctagtccctctcccttcctcagaggttgggggtagggctgaaagtcccaaccctctcatcctaccttggtcttcctggctacaagcccccatcctgaagctacccagaggactcagccaccacttatctcattagcacacaaagagacactattaccacatcagagtccaagggtcttagaagctctggcctcaggaactgtggactaagaccaattactatggcaaaagatgctcctatcacccctatcattcaggaaattacaagggttttaggagctctgtgccagaaactggtagtaatagccaaatccgcatctctcatgatgtcttgttatgtcacaatatcacacccctcacttctcatttttacttctcttctttctgttttgctttccttctcacctattttatcatatcttttctttggtcacttttcttttctttttttttttttttttttgagacagggtctctgttgcctaggctggagtgtagtggtgtgatcacagctcattgcaaccttcgcttccagggctcaagcaatcttcctgcctcagcctcctgagtagctgggactacaggcatgcaccaccacacctggttaatttttgtattttttgtagagtcagggttttgccatgctgcccaggctggtctcaaactcctgggctcaagcagtcctcccaccttggcctcccacagtgctgggattacaggtgtgagccaccacacccggccttctttgggcatttttaaaattaacttcataaaactaaaacttttcttgttttcattattccatgaaccagtaacctcatgcttgccttctttgtgtgagtcatgtcttatatccaacaagtactcaaaaaaagattttttttttttttttttaagatggagtgtcgctctgtcacccaggctggagtgcagtggcatgatcttggctcactgcaacctctgcctcccgggttcaagcgattcttctgcctcaggctcctgagtagctggaattacaggcatgccccaccacacccggctaatttttatatgtaatagaaacaaggtttcaccatgttggccagacaggtcttgaactcctgacctcaggtgatccacccacctcggcctcccaaagtgctgtgattacagatgtgacccaccgcacctggccccaaaaatactattttatatattttactgcctgcctatttcatatcttttactgcctgtctcctaaaaggagtgtagctagtaattggaaaaaaaaaatactttgtaaatctgctctgaagtctcttatcccctgggaaccagaaagcattaatccaatcctatgcttgctcagttctttcttttttttttacctcaaaattaactggcttcctttgtgaccaggaaaagatttaattttgatgctccatttagagaaaaataataatagcaggccactgaattccacatcacatttttctttataaggagcttgccattaaatgcgccatggtcctagtttttattcatacacttatttctttattattcaaacactcattgatcacctactaaatgtcaagaacaatgatgtgtgctgggttacaaagataaatcccacacatgtaaggccactgccttcccagaactcccagtggcaatgggtcagacggggctctggctcgggagggcaggtgcaggagtagacgcataaaggaggcctctgaggcaaggaggctgcccgtggagctttctgtagtacatcatgcacccatcaccccagggatgccacgaccaagacgtttccatcccttgcttctctccctctttccagtttgtggatatgctgggctggcacctggagacagcagacagagtggacatccctgtctctttcaacccaggcagcaacagtatggtggcggatctccaggagctgcccgcaaccatccacagcgcgtcctgggtcgcacccacctcctacctgggggacaaggtaatgatgtcctgctgttcttctgggccctcagtgggcctctgctattgctgcatgagcatcatttcctggaaatctggaaggaagcatccagcagttcaggttactaacgttccagaaatgagctgaactaaaagtgaggaagagaccctgcctcctgctgtgaggggctgagcaggcacacactgcgccccaccattgccatgcatgagctaccagcaaaggaaatcacccacaatgtttttctcagtttttacctaatgtcaaagaattttcctccagggaaataaccatttaaatactatctattgcaaatgggacatgcgtgcttttaaatgccaatgctgagaattctttattttaaggcagaagaaagcctctttgttaggaaaacgaaagctaacaagtgactcacaagcttattaaaagaaacacaggatctggtggcagttcgactttcctaagtagaatcacatagttacacactcctcaggaacttacaaaccacttgctcttcctttgctgcaagagttattatgccagaggctggccacctccatccattttatgaggacagaaatgcaggcctcatgtggaaacatgaggtgacatatgtttcttagcaagggtggaacttgctaacgggtggatttcacagggcctggctcaggggatgccaaattctcacattaggaagactaaaataatagggccttgttggcctgaggtctctaactttgtcttctgggtgaaggactgtgggttttgacatctgagtgtgggaaatgttgcctctcttctatgatcccacttctctttcacttaatactcctctttaccgctatatgacgggcccatgtgttgattatctattgctatgtaacaaattactccaacacttcgcagcttaaagcagtaatgattatcttggatgaggaattcaggaggggatggcccagagtcttcctaggttactgtcaagatgtcaaccagggctgtagtcccctgggactgcagcatctgcttccaagctcacccacatggctgttagcaggcctctgcttctggctagctgtgggctggaagcctccatttctcatcacgtgagaccctccataggctacctgagggtcctcatgacatgacagctggcttcccccaaagcaacttatggggggtgggtaacagggtgggggagagagagagagagagaaagagagagagagagagagagctagctcaagacagaagctgcagtgtttttgtaacctaatttcagaactgccatgccctcacttctcctttattctattcattagcagcaagtcactaagcccagcccacactcaaagggaggggaatttggtggctcacgcctgtaatcccagcactttgggaggccgagacaagcggatcatctgaggtcaggagtttgagaccagtctggctaacatgatgaaacacctgtttttactaaaaatacaaaaattagctgggcatggcggcaggcgcctgtagtcccagctactcaggaggctgagccaggagaatcatttgaacctgggaggcggaggttgcaatgaactgagctcgagccattggactccagcctgggcgacagagcgagactccatctcaacaaaacaaaacaaaaaggaggagggggaattaagccccacctcttgaaggcaggagtgcaaagaatttgtggccatgtttttaaaaccactttaagcccatcaaaaaagcaatacttaaatcacaataataattcaagacattgccttggaatacttccaggcttgaagatcaaagctctgtaaggctttgtcaggttacagactctagggaaaagcttctgttgaatgggatcctagaagagcgtggcttctttcccctgcctgctctaagttgttggcattttcctataggttattttgttctgtctaatcagaggtgaccttgcctgtgattttcatccttctgtcacttcttccttcttgattgtgttttacttaaaggatgggaggtgtcaggacccaaggtgtgaagtagctgtcagaaaactgaccattcactccatgtcctcaccaccatcatgctgcttgtgggacattgagaggtctgtgcacctgctggagttgtcagccatggctactgtacacagcagaactcacaataatttgggaaatgttcaccatctgctttcaggagaattgtttttggagaaaatttatttttagaggttattttgtgactgatagatattatccagttctctcagttaaaaaagaaaccaatggcctagatttcctagaatagttgtggattaaataaacattttggtttagtaatcatctagaaaaaaaaaggaacacgactattatttttcttactttctttcttttctttctttcatttttttttttttttaaaagagacagggtcttgccctgttgcccaagctgcactgcagtggtacaataatagctcactgcagcctcaaactcctgggctcaagcgatctttccacctcagcttcctgagtaactgggactacaggtgtgcaccaccacacctgactaatttttaaatatttttgtagagacagggtctcgctgtattgccctggctggtccctaattcctgacctcaagtgatccttctgcctcggcttcccaaagtgtgggattataggcatgagctactacacccagccatatttttccttttaataaaggtatcttcttgcttgtaaaactcaatcatgttcatgctaaacatttcaaatgacattaaaaatagcataaagtagaaaaaataccatcctcaaccccacctcctagatacaacccttgttaccaggtcgagtgtgtttctttccacaccttgtgtgcctaagtgcttttcatgcgggttgatgttgacatcatctcttttaatgcttgtgctattgatgctattaattccattttaggtttcttcatatggtggttacctcacttaccaagccaagtcctttggcttgcctggcgacatggttcttctggaaaagaagccggatgtacagctcactgtaggtatcagagcatgacctaagtggcaggaagtggcagttgcagttggtgctgatctaaatttaggacatcttgatatgtggcctacaaaaagtttagattaaatcatttccaatattttgcagaaactaaatgaaagttgaaagcatgtaacatcttttcaggatcctgcctcctctgaccaaatgttgtctgtcttctctgcctccaaagtacttaaccgtattttgcttttgcctctcacaagttactgcctcatgttaaactttttttgaactttttttatctttgtagagacagggtctcactgtgttgcccaggttggagttgaactcctggcctcaagcaatcctcctgccttggcctccccaagcactggagttataggcacacaccaccatggccagctgaggagtttttaattttaatttttgtagagataggatctcactatgttgcccaggctggcctcaaactcctaggctcaagcaattctccctgctcagcctcccaaagctctgggattacaggcgtgagccacatgtccagccacatattaagcattttttatgtttctatctttcaattttgtttcataaatgtctttgaatccttaccacggggcaagatcatattgttggactctgtaaaggacaggtgaccccttttctcaaaaggaggggagattagagaaatatgccaggaactccaacccactgaatggtaactattggaggagagccaaacagggccctctcagtgctggggtctgggtagggggaatgggagtcatgtggtctgagaggcccttagaagactttgtggttcattttgagctaagtctttaagaatgggcataagaagagaagtgcccttccaggggcagggacaaaggctaacaggactcgggggtggtacagggcaggaggctgtgctcatggatgaccagtccaatggggctgtatcatcagtgtgtgcagagtcattgaaaacaagtctggaagggtttgatgctataacaggatttttagtctgcctccctggttcaagcaattctcttgcctcagcctcctgagtagctgggataataggcatgggccaccatgcccggctaatttttgtattttctttagagatggggtttcaccatgttggccagggtggtctcaaactcctgacctcaagtagtccacccaccactgaggggacgtttgttttttgagaaaggaagtaacaacatccacacactatgtgcctggcacacaatccagtgcggcagtctagaaaattccttgagggcaagggtagtatcacatcctactttgaattccccacgacacagggcataataccctaaacatagggtagggtgccactgcctgaagtcggctctatttctggtttattgggtgtgattaatgcgatgtaatgatagctttgggaaaggttttctcatgtcatgtactgtatacagggaccagcaagtcacacacacctcatcacagcatattcttggtagatatttgtgttcaggcactgctgtgttgctttgtttttactggtatgcaaatctactaaactgttttaaaaactccaaggaacctttgcagaatatcttgaagataaagcagcaaagattttagagttatagtctaaggaaaaatagctacacagtaaaaacacagtcacagcagtgctgtatttcagtttcatgtttttgcagagcatcttgtagttcaggccaggcgtatttttttactgccaaagagtttattgtgcaaaccattagaattcactgagaggtaatgaccaaattttctgtttaattttaccttcaaacatggaaaataatttaggctcacaaaacattttccctgctgctttgttctaatccactgtaattaagagcctctagggcatgtttcttagattaaggttttaaatgatatgtgatcctaggtaatggccttctttctgaaataccagccctaatgaaataccaaacacctttagggttttgtgctacagcagaaaagctgggacatgtgtgtgtttttgcagcagggttgctgatggtagggtgctgatgcagtagtgctggccaccccaccttgccctgttaagatgcacatgtgagccaccataatggggtgggctggaggctgagagcgagtgaggctgggtcccacagggggaggcagcaggggaatttttcgctccacatgccagctgcagctccctgcatgtgccaaccctctgccctccccaccctcctcagtaacccacccaccaaagcactttcttcccaccgcaggctggttcggtggccagtaatgaaaacagcacttcctgcattgactgcaaggcatagtttaaaaaatttttttttctgccaggtgcagtggcccacacctgtaatcccagcactgcgggaggccaagacaggtggatcacttgaggtcaggagtttgataccagcctggccaacatggtgaaactactaaaaatacaaaaataagaagggtgtggtggtgagcacctgtaatcctagctactagggaggctaaggcaggagaatcgcttgaacccggatgccagaggttgcagtgagccaaggttgtgccatttcactccagcctgggcaagagagtgagattccatccctgccaaaaaaaaaaaaaaaagaaaaaaaaaagaaattccatctttttaagctatttttgtccaaggcaattttcctgatttcctatttgtgaaaagacactgtgttacttataattattctgtttccatgtcactaatatttttaccagtcagttaattctgaactatttttttaagtcaggtatgtcatatgatgtagaccatagaaatgttttcttagatcagttataaatcttgaaagatcccagtgaaggtactaacacattcatggttttctttaaacagggtcagcacatgtccatcatctatgaggagacaaacaccccacggccagaccggctgcatcatggacgagtgcacgtggtcgaggtaaaggaagagcaaccataggatggtcctttctgttttgtgacttaattatttcagacaatcatgatttttactcattttaagaattgtaaaatatggattctatttatataaatatgtttatatatacaggttgagcatccttaatctgaaaatccaaaatccaaaatgccccaaaacgcaaactattttgagcaccaacatgacactcaaaggaaatgctcactggagcatttcagctttcagattttcagattagaaattctcagtgggtaaatacaatgcaaatgttccaaaatagaaaaaaaattctgaaacttggatcacttctggtcacaaacatttcagagatacccaacttgtatagattcaaaacatgaattatataaaatgtggagtgtttgatgcccatgtggctttcttggtaccatctgtccagcctttttacactttctctcccatttcacaattaattatccatatcttaaaaaccccatgagtcagcctgggcaagatggcaaaactctgtctgcacaaaagcaaaattcaataggcatggtggggtgtgcctgtaatcccagctacttgggaagctgagatgggaggatcgtttgagcccaggaggtcgaagctgcagtgagccatggtcacgctactgcactccagcctgggcaacagagtgagaccctgtctcaaacaaacaaacaaacaaaaaacctgtgagcttataaatgctatgacatagctctctgtcatcctcaggtctccctcagtgcctgagacctggttaatgttcaacatatgcttaggatgaatgaatagaaaagctatgaaaatgttttacatccaaagaaataagagtaatactagcaaaataaaggaaagctcatcagatcataaaacttttgttatacttatttggttacaactattccttaaaaatagtgttccatttatattattaaatatgaccagtacctctaggtgaaactttttgagtactttgaacttgcagacatattttaatgtttctgaaaaggtacatctatacaatggaatactatctggcaataaaagaaacaaaatattgatacttgctataagacacaaaaaaagtatcatattgtatgattctatttatgtgagacaggtgatatcagtaaaatgatagagaatctctaaaaattctgtccttcataaaagcaatgagagaactggcaaacagggaaaaaaagttcagaatcaacgttttcagaactctggaaattactcaaagccttgcagccatctggaaatggcacacaatgtataaagatgcaatttatatgatagtaacataccagagaagaggagggaatgatactaatagaaacaaagtttttgtatactgttgaaattaagctggcatttatataaatcgtccagcatggacacatgcatagagacagaatgtagattagtggttgcctgggtttgagggtggtaatgggtagtgactacaaattgacacaagggttcttcttaaggtaatagaaatgttctaaaattacattatgatgatgtttgcatgcttccgtaaatttattacaaattgtatgcttaaaatgagggaatattattgtatgtaaattattccttaagctgctaaaatataaattaaaattatataagcatcatatttgtatgttagtaatagctaccatttgttaagaatggtgctgaacactttatatatattgtatcatttaatttaccttaattataatgatagcacaagacattaggtattactgtgcctatttaagagatgtaaaaactgagttcaacaagggcaacaaaatataaaggttaaaaaggcaggcttttggaggccaggcgcaatggctcacgcctgtaattccagcactttgggaggctgaggtgggtggatcacgaggtcaggagattgagaccatcctggctaacaccatgaaaccctgtctctactaaaaatacaaaaaattagccaggcgtggtggcacacacctgcagtcaggagtttgagaccagcctggctaacatggcaaaacctcgtctctaccaaaaatacattaaaaaaaaaattaggtcaggtgcagtggctcacacctgtaattgcagcactctgggaggctgaggtgggcagatcatgaggtcaggagttcgagaccagcctggccaacatggcgaaaccctgtctctactaaaaatacaaaaattagccaggtgtagtggcacgtgcctataatcccagttacttgggaggctgaggcaggagaatcacttgaacccgggaggcagaggttgtagtgagctgagatcacaccactgcactccagcctgggtgacagagcaagactttgtctcaaaaaaaaaacaaaaattaccaaacagaacatagcaagtgttgacaagagtgtggtgaaattgggacccttcagccctcttggtgggaatgtgaaatggtgcatccactgtggaaacactgtggaaatatctcagaaaattaaaagtaggattaccatatgctccagcagtcccacttctggatatctatctaaaataactgaaaacagaatcttcacaagatatttgcacattcatgttcattgcagcattattcacaatagccaagaagcaaccaaatgtccatcaacagatgaatagacaaagaaaatgtggtatatatagatatatgcaatggaatattattcccccttaaaaatgaaggaaattctgtcataggctataatatagatgaaccttgagaaccttatgctaagtgaaacaagccagtcacaaaaggacgaatacttcatgattccacttatatgaattatctgaaatagtcaattcttagcaacagaaattagaatagtggtgccaggggctggggagggaaaaagggaattgttcaatgggtatggagtttcccttttgcaagctggtaagttctagagatctgttgtgcaatgttgtgcttatagttaacaagactgtacagttaaaaatggttaagatggtaaatttcatgttgtgtgttttttaccacaataacaattaaaataaaataatataaacgtttgtgcaagaaaagattgtattttctgtcaccgatgtgtacgtttaatgaatgacctgagctgcatgactcagtcagtttccatatgccttccttccctctttctcactcaccttatgtttgcacaaacaaaagcacatttaaaagataagttggacactgggaattttatttcattttattgccccttattccctgccttcattttttttccttccttcatgggaataacccaggacacctgacttctaaatgtaaatactccaggaggcaggtatttccccgtcttatttcatttctccctatgcattttaagtgtcttgtttttgattcattcggggtgtctgcctctaaggaacccctggaagtgagcctgcctaaggaagaccctgactttctgtttccatgtgtagggaaacttcagacatgccagcagccgtgccccagtgtctagggaggagctgatgacagtgctgtctagactggcagatgtgcgcatccaaggcctctacttcacagagactcaaaggctcaccctgagcgaggtggggctagaggaagcctctgacacaggaagtgggcgcatagcacttgctgtggaaatctgtgcctgcccccctgcctacgctggtgactcttgtcaggtaggaagttttcccatccgcaacatttccctagggagctcctgtggccgtttttggctgctgtccagcactgtgggatggtttggggccctctgtctattgtttctctgttcaagtttctgcagggcttatcttatatcttacttagactcccttcaggaattaagtgtgaaaaagacatcatcagtgtctcagaattcataggaaagccacagagattcaatagatgctgagggttagagaaatccagggtaggaaaataatgtactatagtttcaaatagctagaaggaggatattgactattcccaacacaaagaaatgatcaatgtttgagatgatggatatgttattaccttatctgatcactaaacgttgtatgtgtcacaacatcactatggactccataagtatttatcattattatttatcagtttttaaaataacatattttttaaatgaaggagctcaccagccagcatcttagtatttgagcccctgctttcccaataactgaccttatacctttctctaatccggagcctccctctacccactctcaactccccagtagagttgaattccagagaatatcctggatttcttagaggacattatgttctagcttgcagcaggactctcgttgtttgaggtccagtcaaccagagctgtcttcagatgattaaaatgtgccataaaatgaaactgtttaatttctctggctataagtatgtcttttcttaaagatcagggcaaaagcacaacgttagcatgattaataaaagtagcaaacactcattctgtgtattccatacatccataagtacgtaggcttagcaaaacctttcactttctttcctggccccctggtagccgaaaaccccaaggtgatctgcgcatacgagttcccactttttaaacctgcaaaaacaaatctgacctgctgtggtcttctggggactccaaagttgtaatatttagcccacaggttgcctacattcttccccttcctccatctcttttctagcctgattaaaattgatagcccgagggaaagagagggactctggatttccaccctcctacccagggcgtgttccctgcccgtgactcagcctgtgatttagggcgtctgcagggtgaggtgggtggaaggtgatgcccgccccacctcacaggaattacagagcggtgcgcttacctgcgggactgttatgtgcgctctggcacaggctgactcatgtgtgaagtttaaaggtggggcccctgccgcagacagccttcctcacctgagtcaggcaggcccgggcactgagcaggaagggcaggtataagaggaagaggcagaggttcctgcgcagccagcggacgtccaggaaccgggatgcctccagcagtgaggcggtcagcctgcagcatgggatggctgtggatctttggggcagccctggggcagtgtctgggctacagttcacagcagcaaagggtgccatttcttcagcctcccggtcaaagtcaactgcaagcgagttatgtggagtttagacccagccaggtaacgtccttttaagttttggtttgtgatagggaagagtttccagctttgtgacattttaagttacagttacggtgattaatgagtaaatgggtggactgaggaggggctgatggcctcccagtcaccttgactggcagtgtttattacagtgcctgacagattgctctcccgagctattaaccgcaaaccccattaacatcagcccacctggaaatgccgagacagttaagagcttgaatgcttgcgggatgttaatatacgatgaaactttatgccctttagagaccatcccaagcctcagaacaaaagagtccaatgcctatagctttccaaatgctacttggaagaaaatttacccacgggggggagaaaatgggaaagagtgaaatccaatgcttgagaaaagtgatcaaagtttgcataatacctaaaagacatgcttccatttgccaggcatgaaacattaagaaattctgctctctttaaacttcctggatgctgcatgtattcttacagagaaatagatcctatggctacagatacagccctggaaactggattagggacataatattatcatttgtatataatatgtattacaaaagtttactggaaaacttaacataaaacatcatcatgttaactagttataaaacccctgtattgaaatagtgcattagaacacattcgttttcatttaaaagtgagtgttcaatataatctgagtacttgaactgatttttttgtagaatgtggttttgcttgctttataagaggtgaaaaaatgattctattttagtaactgacaaatcctcagagtcacatgatatgtaactcttgcagagtatattttctgcttgtaatcaaaagcaaattaagatgggtgatttagttttaatcaggacagactatactcccccaaagcatgtttaattaaggcttttttctcaggcatgttgtcataaactaaccagatctatctgcttatttgaataacttgctctttaccaaatgtgattattttgtaagcaggtaatgtgatatacactgataattataagttacttgccacttattaggacagattgtataatagatagaatgacaccatcattggctgcatttcgttcacatgtaaatctcaattgtgctttcagcaaaataacattcctttcatactttgattctcctttaggcaagcctgttcatataacaacataatctatttatttgcaatatactctttgccctaaacatggttcctaatagcttaaaggaacattatattggaaactgtggtcttattgtgcatgatctatattcattggtaattttggaaggggttctagcaacacctgggagattccactcccggagcacatgaggcttctgcctctctctcctgtcaggtggcttctttctcacttccactggaccaggtagagacctttatggccatgagtgaataagaatggactgtctacttcaagatttcctttgagtatagtttccaagttttacagacatatgtgctatttaaagaagatttgataaaagactatcctttatcttgaaatagttttcctgatgctttcaagatagggtatataggagatcagagaaataaattagggacaatatctgattttgtttatttattattagacagggtttcactcttgttgtccaggctggagtgtggtggcgcagtcgtggctcactgcaacctccacctcccaggttcaagcgatcctcccacctcaacctcccgagtagctgggactataggcatgtgccaccatgcccggctaattgttgtattttttggtagagatgaggtttcaccatgttgcccaggctgatctcgaactcctgggctcaagtgatccacccgcctcggcctcccaaagtgctggaattataggcttgagccaccacaaccagccaatatgtgatttgaatctgtgcactgatttgctctgccaaaataaaggacatgtctataatttcctttaaagacagaaatctaaataattttaatggctggtataagaagaattgttttttttctgttggagggattcttaactagaatccttttaaaaagatattagttcatgaaaagaaaattataattcttttcatccagatgaaaatgcataacttgtattatactggagagagataatatacaggagatagaaataatcaaatcaagattgaacaaggaaacaagaccaacccaaggagagtccctcaggctgagcctctgtgtgttcgggtggaccagatgttcgtgaacagtcctgtatgggaacctcatgcacgctcccctcccctggcttctctgttgcccatggcctagtgagtggcaataaagtgactccactgattgtggcatgattgtctaaatctcagttaagactcctattccccacaacccactactcctactatactgccccctcaccagcccaaacccacacttggagagaaaacggctagccaaagataatttggacttgaagtgatttgcttagatgtcctcccctctaaggacgagtctctttatttgtccatttccaccttctccacctgccctcaaaacagttgtgagaagagaggagccccttctcatcccccatctccacacgtgccctgtctctgatttccccaccatgcatctcacactcccaccagggcatgaaaaccaaacagcttgagagaaaaacaagtggacatgacaggtggttgaaattaaaaatattcacactcactgaaggaaagaaggtttgaaaaatgtatgcctcagccgggctcagtggtgcacatgcctgtggttccagctacgttggaggctgaggcaggaggattgcttgagcctaggagcccaagactctagtggactataagcacacctgtgaatagtcactacactccagcctgggcagcagagtgagaccctgtctaaaaaataaaaatgatgtgaatgcttcacagtgagaggtgtcacatgctttggatagtaattgttttctttctttgtattgattaaacactttgtttgaaaaatagggttgtagccctggatactatcgggatcataaaggcttgtataccggacggtgtgttccctgcaattgcaacggacattcaaatcaatgccaggatggctcaggcatatgtgttgtgagtaaattgacactttaatgctatcagcagacaatctgtttctcctccattcccctgtactatgcccaaagacatcaacattacatctcccgccaaaccctaaatagaggtcgctgtgtaaatatatgaggctccattatcaggctgaattattttacatttcattttctcctccattttaacatgcaccattaaaagagcgctgctgtctgagcaattaagttacactttagcttctaaatctctccttcgtgaaatgatagtaatgggtggaccttggaagttaactcttgccaggacaaaactaatccaagccactactttgggtcccaattttgttggggcggcaggaagttacaggagtggggcttgttgctgtcagatgtccagtaactcaagaaagcagccagggagaaggggatttgaggagggctcaaggctcataagaaatcagtccaacattagctgggcatggtggcaggtgcctgtaatcccagctactcaggagactgaggcaggagaattgcttgaaccctggaggcagaggttgcactgagccgagatcgtgccactgcactgcagcctgggcaacaagaacaaaactcggtctgcattccatccacccccacaccataaacaacaacaacaacaacaaacagaaatcagtccaacacaagcttcactactgccaagacagagcggggcttggagaagacagatgagggaggtcgtggggaagggaaagtgctgctcacccctcccgtcctcacaacatccaccgcctgcctgttccctatattgactatattttctcatggcctcaaggctgtcttggatgactacagcatatccactggaacatgatcttattttggaatattttataaaattcttctacctaaaattagtttcttaggaaatttttcttatgcatcctgaagcagaaccttttttattctgcttttttcttttgtttcattagagttcttcttggtaaccagggcctccccagtgaggaaaatggacagtgaaaaagagggagcatactccaggaatacagggcttcagttgtgttgtgcccttttggaaatgcactcctctggcacaaattttctttgtattgtgtaatgcaactagagtgtgtttcaagtatgagttcctagaccgtattaagctcgttcaccgtggcccagggaactgcttcctctgcaagatgggacaggctagaagaggaaattgttgtgaagagccaactgatagaatattttgttggattgtaatcttataaattcaaaaagagtaaagggtattgggaaatactgttttccagctcgttagtattcctatagaatagttcatgtttgatattgtatgttttgtgtaacacgagtagatgctttaattaagaataaatacgttggccgggcacggtggctcatgcctgtaatcccagcactttgggaggctgaggcaggtgaatcacgaggtcaggagttcgagaccattctggctaacacagtgaaaccctgtctctactaaaaaaatacaaaaaattatctgggcgtggtggtgggcgcctgcaatcccagctacttgggaggctgaggcaggagaatggcgtgaacccaggaggcggagcttgcaatgatggcgccactgcactccagcctgggtgacagagcaagactctgtctaaaaaacaaaacaaaacaaaaacaaaaaagaataaatatgttatcagtgaaccattgccagatgtcaagcccatcttatgaaagctgccaaagaacaaagggagggtttttttctgtagtcacccactgaaaggaaaacttgtgagagtcataattcatattttaatcaaacaagattttctttcccattttattttttttgtagttctgtcttcacttgtccctaatggccatgtggccgccagagactcttcattcaggaaatcctcactgagcatttgctagtgtggcaggtactgagctaagtgctggagttaaaaatcatcagacctaatccctacactcacgaggcttgctgtctagtaggcaatgtgtatgtgtgtacacacactcacacacacacgcacacacacacggagcccatgtctgcactcagctaacggctccgtggcaagtcctgagtgctgatgctgccctgaattgtgtccactgcatggaagctgagaatgcattcctcgttctcaaagaacagtaaagaggaaatccagtatatttgaatatcaaacgggccttctggctgatttcactgcaaattgacctccacctctcaaggtccaaagtaaatgtttaacatcaggaccttcacccaggtgcaaatcttcaagatatttcaagaatagactctgaagtttgaaaagataagtagcccaactttttgccagtacagcagtaggtgtccagtgtcaagggcaggagtagcgggtaatgtgggtgccaccgtccagagggacctgcgatgatggcctcctcctatgtgctgagacccccatctctccctcttctcattgccccaatttctccccatattttctcctctccccccaattccccttcctctctactatccccgtcaccccttattttcctctccgttcctatttccctccccttttctttttctgtcttctttcttcatcttccttcttttattttctgctacttgagcccatcttcccctctgcagttgcaatggaatttccaaatgatttatctgaaattcacagctgacatggtgctcctctgaggctcacagacggaaggaagcccacgacccttagcacagtactgggggctctttctagctgcatcccgcccccttgcacttctgccttgggcacgccctttgcttttcattccctccacacactgccatgctattgtgagactgaggttctgcacgctgtgtcccctgtgcctggaatgcccttccctcacttctgcgctcagtgaatccctgtccttctgcggccctcgcaggcagcccctcctcctgctctcgtgggatgctggcacacttgtgtcctattttccacgtgatattgaatacgtctattcacaggactacatgtaccccgagtcgagggaccaacccttctttacatcgctagagcctagcatagttgggcatatagtaaatgcctaatagatatttggtgacaaatggagctaggagagcacgtgccatgggagtggacgtgggcttctgcagcattcgttcatttatttattcacagtaaaacacaaggaacctgaagggaggtgctccaagtttgcaggactgaggacagtttccagggtggccactctcaactgacagtgaagggtttctcacatatttttacgggactttgtcaagcaacacgggttttgacactcttccttgatcctctcctctcacccctgtgaaggaccagtactcagagtgattttagtaggatacggatgtcctcacctcaattcttgcatctgtacattcttgcttctccaatgtgttcagtctcagagctaagtagacacaggactgaaatatatctatacagtcatgttctacttttaaattgtcatttggattaaaagagaaagagaactaaaatggaaaagtattagttccaaaggactgatgtcttctgagagagtcagggcagctgaagactgggtgagggtgagggaagccgctggtgtcctcctcagtcacccgtgagaggactcctctgtggagctaatcaactgcaaggaagattgttcccagtgtccagacctgaaggagtctggacccatagtgcagtgagatttggggaaggaaggattccggataggggtgagctttctgatgataagcaaatgtgaacacgtgagcagcatcctactttaaagcccctccacatgctctgaaatactaatatcttatgtttatagcacaattttatagctgggaaaaaaagaaaggatattttaacatcttagtgttttgtgtaattttcagttactcaaaggttagtgaaggatggatttgctcaatctggacaaactgacggcatttatgatggaagggcaacctttttcattatgaacaagccatgtcttcttgggatataaacgtatattgcttttcccaatctaccttcagatattatttaaaaactcacactcatggctgggcgcgatggctcatgcctataatcccagcactttgggaggccgaggcgggcgaatcatgaagtcaggaatttgagaccatcctgaccaacatggtgaaaccctgtctttactaaaagtacaaaaattagctgagcatggtggtgggtgcctgtaatcccagctactcgggaggctgaggcaggagaatcacttgaacccaggaggcagaggttgcagtgagctgagactaggccattgcactccagcccgggcgacagcacaagaatctgtctgaaaacaaaacaaaacaaaaagcaaaacacaaaacccctgacactcattaaagtttcctactcaagcaacacctctgcatacagaagtaaaatacataggcaaatgtttaaaattatacttattccagcccataaaattaacacaaagtgtctccatattagcaaatgcccacagcaaggggagttttcctggatgtttctgtgcatttagatcttttttgctagggtaacaccaagaaaataaacaaatttgacccaatccactaggttttgtctcaatagaccacttggttgcaaaattatttcatctcaacactttactgaagaacaaatttcattagacagcaactttgatgtgaaaataattggatttacataaataaaaagcttagataacattaatttcttgcttctttgggacactggaattcagttgagtattttcttcagatactgtgcaattttttattgttttaacaaattctgtgttaagaactcatttcaataatatcactcttcagtatatcattgttaggtgaaccgtgaagtaaaatgagggtaattttcatcaaagcagtgctaaggggaagaaagaaaagaatttacgtttcccaagagcttagtacacttgcttttttaaatcctcccaacaggcttagaaagtgggcattatcctaactacattttgagaaaattataattgtatgtaaatcatacactagtaaaattgatataagtaaaattgatacaattgaaaggatcttgccccagggctccgtggccttgagatgctggagtgggatggggactcagctggcttgtccccactatgtcacgctgccaatgttaagcaccgcgtcactgagggaaggacacttacccctcttttctaacaccagcaatgattagagggatagggaaaatacatggttagaggagctgatatcactgcaaagtcagaggacttgagttgtagtcatgtgactaagtaagattacaataatctcagaagtagggactgtactggctgctgtgaattgtgctgttcacctgtccccagaactgtcagcacaacaccgcgggagagcactgtgaacgctgccaggagggctactatggcaacgccgtccacggatcctgcagggcctgcccatgtcctcacactaacaggtaccgtagcagcttgacataacctacagggacccaaagtcgtttggtggctgcctaggactaggggtgggagagcaggtggggagaatgggaagtgattaccaaagggtctgggatttctttttgaagggatgaaaacattttcaaattgattgtggtggtgtttgtacaattctgtgaatatactataagccactgaattgtacagtttacatgatgaattgcatgatatgtaaattatatctcaataaagctgtgatattaaaatgaacaaacacgacatacaagaaaacaaatgaataggccgggtgtggtggctcatgcctgtaatcctagcactttagagggccgaggagggcggatcacttgaggtcaggagttcgagaccagcctggccaacatggtgaaaccccgtctctactgaaaatgcaaaaattaccttgtaatccagctattcgggaggctgaggcaggagaatcgcttgaacccaggaggcagaggctgtagtgagccgagattgtaccactgcactccagcctgggcgagagagcgagactccatcttaaaaaaaaaaaaaaaagaaaacaaacagaaaccgtctttccaagttgtatacttccaggcttttcctttccctcttttcttttactgttcattcagtggctaagcagctacttttcgagcacccatgacagggccaggcctcagccctatctatgtgatgaggaagctgaaggaagaagacagaggcagtccctgttctcctggggcttgacctagagtgtggcagggagggagagaaagggtgggagtcatcacactcaataaatacacacactaatcagtaagaggtataactggagatagagatgacattttctgcaataggctgtgtcactgacagtgagggggtggctgctttagaggggtggccaaggaggcctgaagttagaggaagccatggcagtattttggccacgaggctcctagacaaggatgaaacagaaggaaaaggcctgtgacaatgtgttcaagggcagtgagaaggcaggagtggcagaagtgcagtgtgaagagggccagaggtgaggttggtggagcaaccaggacccagatcctgcagaaccctgcaggctgtggtcaagcatctggatcttatcctcagtgcgatggaaattttggggcagttctgagccactgagtgatctgagctctcattcagcctccagagtgaccaatagactacataggtaggaatccaccactgtgttttcaaggtaaccccctctctccttaagtgtggcactttgtcatatccttactcatcacaaagggttcactgtgggcccaagcaaagaatgatgtaacaaactaagtgaagcaagagttgttctgaaaatcaagaagatactgagaacatctcactagtacatagactcagaaacaagtgtggatcacaaaggcaggcctatatcagcccttaacagacacatgggccaagtcctaacatcaccagaagtcatgtgccaagtgtggcttctctggagagacctatttggaatgctcaccctgctttgctgtctatgtctttgatgctcgtgaagcccgccccatcctgcagctttatttgtcaagggatcaatcacatgagcttgcccagacttgtttgaagagaagctggcaaaagtagaaagcagcgagatttccactggggtgcttggaaaaagtttttcattttcatttgcaaagcgtagtagcatcaaggtcagcttccagcttccataagttgaagtaacacgtaggtctttgaatttatcagtaaaactctatttgtatctatttctccttcctgcaatattaatagtgctgaccaatgtctaactgtcttttgagaggcttcctaaacaggcattctcttaccagcaaatggagtgatattccctcagatgtcatcagtgtcatgtccagtggcagacaacagggctttttcatggtctctttggtgtgtgtgtgtgtgtgtgtgtgtgtgtgtgtgtgtgtgtgtgtgtgtgtgtttaaagctgcttctaaaatatcatcacttattgcttctcagccttttggctaaaatcaagtgtaaaatatcaccactttagagctaaaagaaaagggatcaaaattccacaacttggtttgaaaaaaaagtgagaatcagcaatgattgtgcccacagaaatgccgaggcaggcgagtggtctctgtgcatctttagggggctccagggcctggcctccccaccaacttttcttcccagaaggcaatgtgcctgatagaaaagaactagaatcaacaaggagaacgtttttttttaaagaatcagaactctctgttcttttttctgcctagacttgttttactccttccttgttattcctggaaaaatgctgttgtaatcatctcttccaaagtgagttactctgctctgtcttaaggggaaaaaatgctcttccccaaggaacaaataaaataaatgccttcagtccttgttcaccaaaattgccctgtgtcggctgagatcattcatcattatctctccaagtcttgatgggcaaaattttcttcacacaaagtaaccagaccctgggtttcagtgctcacttaatacaagccagtcctttgtggtaaaaaataagcataaatcctatcgatctgtgtttttgatggggcctttttctgtcttctttcaagctttgccactggctgtgtggtgaatgggggagacgtgcggtgctcctgcaaagctgggtacacaggaacacagtgtgaaaggtaaggtgggcgcccctcccgcctcagcctgcagagggggcggggagggctgtgggtggggctgccaggtgctggcacagagctaggggtggggctgggagtttgactgaggcctggaaaaaggtctcttgggaaaaatacaagactgctcacctaataaatcattaatatcattctctttcctgctttgtacgtttcagaaaactgagaatgaggcacaacgcatacactcacccacaagtagctctacctacatccccccaacacgcacccctgtgtacctcaacccccgacacctccctacctacccctcctccacaatgatctctgcataccccctatttcgacatgtcccttccacatatctccacatacacctgccctcaacgtatccctacttacctgtacacatgtacaactgtctacactcttccgtacacacacatatccacagccctagcctagatagcccccccacccccccacccccacccccaccccacacacacccctctatccccacactatattttgaacactttcaggacaatctatgtcttgtttatttcggaatccctggttccaagaatggtactgttcacataataggtgttcggtaatgtttgtgaaacaaaataataaatgttgtggaatggaaactgtaaaattaatgacaaagggctgcagaaccaagctttagttattcatggacaattttcatgattagccactatgcataggacactgccaagtactgagaaagatataaaagatacttataacctagctgagaagaaagcacacacatatttgggaaagtaacagtatgaaaaatgaatcatatggtttacatattttaaaatttaaaataactttctcataaaatcaatacatatttattataaaatgatgaaaaacaaacgagcagagaaccagtgagggcccccctacaacctagccctgtgcactcaaacgctttcacatacaatcctattcataatcattttgtctacagaaagccactgttaaaaagctggctgtttgttcctacaaatcatttctaaatgtgtgaacccttaaaaaaaaaagtagattcctgttttactttctgttttgacttgttttcttatctaatactatgttagtaatatctctccatatcagtaagtattcactgataacatcacatcaatgaccaaaaatttccactgggtttccattatctcctactcttggtcttggagatccttttactgttctgcatttaaagcaacactaaaattaaatccttgcagcttaatatttgtgtatgcatatcctcaaggtataattgtaaaagtggattctttgggtcagaggataggttttccaggcttttaatactttttgcaaaattgccctccagaaaagtttatattcttacagcagcaaaagagaatgagtgactacctaccacaatggatattggaaaggatcaatattttaaatatttgctaattagggccaagcatggtggctcaaacttgtaatcccagcactttgggaggccaagttgggaggattatttcatgtgatccagaggttagagaccaacctgggcagcatagagagacctcatctccataatttttttttttaattagccaagtgtggtggtgtgtgcctgtggtcccagctacttgggatgctgaggtaggagaaccatatgaacccaggagttcgaggctgcagtgagctatgatcgcactactgcattccagcctgggcaacagaaaaaaaaaagccaatttgatagagaaaaattgtgtatcattttaatttacattgttttgtttaaactttaaaagagtttgactaatttttgtttaaccggaaaatgaattcaaccagatttcaagtaaggcataaccaccctagactggggttatctgaaatgtttatggataaggtgggactttggtaggtccaaggggttactagaacccagtggagccagaagatggaagtgggaggcaggttaggttggggaagcaaggcagaaaagcccaaggggctggaagacacttgccatgtgtaggaggtggggactgccttagactggggacactgagcagcagctaaggagcccaattctatggcaaaagatggtaatggaaggttcttctgttttccattttccatttcagcaaaaggagcatttctcacacttgccttacacttattcagttattctttcaatgaaaaatgtatggaggtcctagtatatatatgtctggcacagtgctaagtactggaggcacattaacaaacagcacagacagtgtcctcaagggctttccagtccagtggtggacagacatcaaaacatgccattaaaatagcgagagatgggagaactgggctaagttgagctgcaattaggaggtatatccaaccagcgagaagggaaggatgtggggagtgggaaaggattctaggctctgaggtttaaaagccacaggggaccaacacctgggagaggcgtcctaatttcatcctctttatggctcttcacaaacaatgaagcattaaacagcaacaggctcggtgagacatccatttggcaggcaaaatttttaattaacagtacttctctcagctgatgtttgttatatctgatgtctcaagaaaacaagctattatttctttaaaaaattttttgaagctttttcatggataaatgccattttatgtcaacatttttcatttgttagacacagcacccagacatcattcctggcactagtgattaactacacaatgataaacacaaggacagtcaagggtgaaaagcaggaatatagattatgcaggagactagctggatagaagccagagtggccagctgtggggagggtttcgcaaaggctttccagcccatgcatgctcttacccctcttctccctcagacacacagggccacacaagacaagcctattttctgctctttatttgttgtaccaatgtcattcgtgaaatcaggaggttttacttcagtcctttgggtttagccactgccataaattgagaataagagaaccagttatttcttataaccagtaagtaatgctttgcaagagtaaggaagaagtagaatcgaacttcctgaatatttctgtgatttaaatataaggtactttgtaattatgcatctattacatgggaagtttagatgtaggtaagaaagacatcaaaaataaagtattctagaacacagagcttctgcataacatgatctgttaggtagaataccaagccagtcacaaagtaaagccctattattagtatatgaccaccctgcttagtagacttaaataggccacctcagcctagttaccttctggattattaggggatacatgggccttctgctttcttgtaataatttcaaatgatgccaattagaagatgaatattttgtcatgtcttattacgatagctacccttcattgtctgttatgtgcagatattacgctagattctttattacattatctcatattcactgagcaaaataggtattattagtccactcacttattcattcaacaaatgaatgaatatgtgccaggtgaccgtagggatatatcagtgagcaaaacagcccaaaactccacatcttcatggagcttatattttcatgggggctgtgggggggaccggtaaagaaactgaagcacagagggttacagcaacagcccaagatcacactagtaagtagtagagataggagtccagccagatcttactgatcctttacattatatcaacagtgtatccatggtaatacattggtgaagtatattggaagtacatggtaacgtgtattggaattgcctaattttttttgatgcagtgcttaaatttggggaaatgaggtaaataccatattcccttgagtctatcaagtcaattgatgataagacaccacacatcagtttaatgacaatttgggggtgactggatggggagtggaactttattaatggaaatattgtaattgacatcccaactccaggagcatgaatatgtgcttatttgactttaaaaaaaaaaaaaaatcaaagaatcaaggaaatgtgatctttaaacttgtaaaccagtaatgagttctcattactatactatctagaataaaaaaggctcagggccaaaggtagcagctgtaactgctctcagttgtttaagagtcattatatacagcacggcagcaattagtgcaaatatgaattatgcagacttgacatagtgcaggccaggtgcagtggttcatgcctgtaatcccagcactttagatactgaggcaggaggatcacttgagcccaggagttcaagaccagcctgggcaacatagcaagaccttatctctgctaaatattaaaaaattaaccaggcctggtggcatgcacctgtagttccagttttttgggaggctgaggcagaaggattgcttgagcccagaagttcaagaccagtctgggcaatatagcaagacctcatctctactaaaaattaaaaaattagccagaaatggtggcatgcacctgtggtctgagtttcttgggaggctgagacagaaggattgcttgagtgcagaagttcgaggttgcagtgagctgtgattgtgccattgtactccagcctggagaacagagtaagactgtcaagaaagaaaagaaagaaagaaagaaaagagagaaataaagaaagaaagaaaaaggaaaggaaaggaaaaaagaaaagaagagaagaggaagggaagggaggagggaggggggagggaggaaggaaggaaggaaggaagggagggaggaagggaggaaggaaggaagaaaggaaggaaaggaaggaagaaataatgcaataggaaatattaagaaactcctccctcattcaaaaaattggaaattacatggatcttacttcagatttatttctgtgagacaattcaaggggtaaatacctctgtattgagaaatattcattcttgcagatctatgtcggtcttccacccattgggttacaatatcccaaacagagagctagagattgagaaaattggttgagataaacgatgagttatttgggtgtttctcctcctctctatattttgtgtaggtgtgcaccgggatatttcgggaatccccagaaattcggaggtagctgccaaccatgcagttgtaacagcaatggccagctgggcagctgtcatcccctgactggaggtaaggccgacccacacccctgctaacttgcatttataaagctggtataacttaacagcctaagaacccaagcacacatcttcaggatgcataatacacaattccagccagcaagctgtccccaggatgcataatacacaattccagccagcaagctgtccccttgttttgacaaacctgggaatgcttagatagtattttcagctttggtgaataacctgtttcaatgcactttttttttttaaaaagtgaattgtttttgaaacttacctaattataaccaaaataacttcagatcctactttggtgattttgctgagatctccctttgatattgtagggttattgtctcatcagctttcccgtgtgtgtctgaagaaattgaaatactctttatcttacagcagtacatgttctgggatgtgggtgggtaattggggtggattttatacaccaagaaaaagataattagcagaagttagtatggtttattaggagcaacttggaacaaaaaggaagactatcctcttccttctttgacagaatattaataggattaatcaggaaaatgctattgatgtagtgtgacaccaaacacttagataaaatctttcatcttatatttatggacaagttgaagaactaaaccctggatatgtggattccagctggtcaagtgactatccccaaaggaatgcagagtaaatggattaatgccagtctagaatggggtatttattgtcatgcctcaggacttcatccttggctccacattttttatttggatggaaatatagaaagcatgcctacccatttatcagatgacacaaagttgggaagaacagtaaagggaccaagggaaaacttccccttcacctacagaaggtttacagaaaatcagtggacaaaaggcagattaataggagaaaaggcgtacacaattttattttaatgtgtgtaacacaggagaatcacaggacaatgattacccaataacccagtggggcacagatgcttatgtacccttcttcttaggggaaagagagatgcggaaatgtggatgattttaaggggaatggtaaatgatttttaggctgactcagtggactcagagaacatatagtgaggcctgggacaaaatcttttgggcccacagaacagacaatggtttgtgacaagagtctgtccaggtgtgttgacagacttcagtctttctccctgaaatatgagttaaattaatgaaaactcatggaggaaaccagaagtagtttgttttcatttttggcaagtctgaatgttgggaagataagtgggtatcagagtaaagttttttccggcatctgctggtctccaagggccttcaatttaaaataatcagcccaccagggtgccatattttggggtgaaattccctggtcttctccaatagtaagtgcctcccatgacattaagaattcagaagggcctcaacagtctagaatgatgggccaattcaaccagacaaaatgatgttaaggataagggtgtggtcctgtagttgagtggaaaaaataaataaacctttagctatgtgataagtggtaactggcttagtagcaggaggtgtaaaaaagcttaaggttgtcatcagcagtcagtgcagggtaggttagagtgtggtgtggcccctaagatagctcgtactgtcttcactgagttccattgtctaaagccggggtccatggcacactgctcatgtaagtcctcacgtgagagttagttacatctttagaagacaatagaagagctatagttgttcagaaagagagtaagactctgaagggatgtggaactgtgtcacacgaggaaggattgaccagggcagtgaaaggaagagctggaaaggacatgtttgttaggctggcgtgtgggaaagggttggtattgttctctgagacataagggacagaacttagagcaaagagtagaagcaagaggaagctctattttaaatgattctaaggaagaagtgtctaatgcttaaagatgaaacagattgctttaaaaggaggcaatttctcctgtcactggaggtattcaagaagcttcaacatcacgcacagcttactcgccagactaatgcctctgcaaccctcatttcccccacgccagtaacaaaaatcagcaacatgaaatgaggatagtaactatttgttcccaaaatggaagaaaatgcttatgtatgagacttgcttattcctgttagagttttgttgttgttgttttttattctttttttttttcttcaactaataagggacacattccttggtggtcaaaatgcaagcttgttaggaaaattccactaataaatcaatcatccagagaagcctagtcccccataaactattcaggctgctgttgaaaattgtcaaggaaacaagaccatgcttgctggccagaagccatttacaggctaactgaggaaatagaagtatcacaatatatacatataagagcaaatggccgggcatggtggctcatgcctgtaatcccagcactttgggaggctgaggtgggtggatcacctgaggtcaggagtttgagaccagcctggccaacatggggaaaccctgtctctactaaaaatacaaaaattagctgggtgtggtggcagatgcctgtaatctcagctacttgggaggctgaggcaggagaatcgcttgaacccaggaggcagaggttgcagtgagctgagatagcaccactgcactccagcttgggtgacaagagcgaaactctgtctcaaaaaaaaaaaaaaaaaaagcaagtaaggctttttttaaaaaggaacccatgattatatataataaattaaaatgtatataaatatttataaagggaacattgtctttgagtggcaggatcaaggatgatgcttttatttcatttttctgacttccccatattttccataattaatttatattattttttacaattaaaagtaaatgtggtttaaaatgtctgtatatacacacaaagtgtggaatattattggctggtgagaataacagatgtgaaagcctcttgtagcttgtccaggaaaatgttaagcatagagttttgctgttgtgaaggtagatagtttgttcagggggaagtgagaggacatgtcaatgtcagaatgcatggcatggggaaaacagtacatgtggaaggggtcaagaatgcccagggttgaccagcaggctttactgtagctgagaacctcaaaactcagcttatccagcccggccaatatggtgaaaccccgtctctactaaaaatacaaaaattagccaggcatggtggtgcgcgcctgtagtcccagctacttgggaggctgaggcaggagaatcggttgaatctgggaggcagagattgcagtgagctgacatcgcaccactgcagtccaacctgggtgagagagtgagactcccccctccccaccggccaaaaaaaacaaaaacaaaaactcagcttatatgtgctgtagttggtggtgtgggcccactgacattgtatgcccatcactatcaccacatctgtcacactgttttgtaacttgtctgccccccgtgtttcatgggactgttaagtcacagagcagcagggattttgtcttgatatctttgtatttccagcagctagcatggggctctgttacactgtaaatgctcaaaggtgctcagtgaatgtttgcacaatgttcttgaatgatgccagaagcagcatgaacatacaagaggctcttcaatgaagaaagccctaatgcgaatgatcgagacgtttgatttgataagaaaacatggccctttatagagttgacctttgtagtgaaggaattgaatatataacagggaggccacaaaagcagttcctgcagcgagcctgctgggagatgagaaggcttcctgggcactggcatgggtgagggagggaaaaggaagagctagcgatgctgggtagttgggtgtctattaggttggtgcaaaagtaattgtgggttttgccattacttaaaatggtgaaaaccacaattacttttgcaccaaactaataaaactttgcaaaactagcttttctgaaaaccaagttaaagagcagatgaaaagtaagtttaataactatgtcttctttggttattttctgattttagactgcataaaccaagaacccaaagatagcagccctgcagaagaatgtgatggtgagaaaagaaagcccctcctcctcctttccaagttgtggggtttggtttaagatatgtgagcaccatgctgggtcatgcagtttccagtctgggaaagtaagggtgggaggaggtggaaggactacttagggtcaaatcagcttctctctgtatgaccttcagcaggggaccctgcttctccaagcctcagtttcatcatttgctaagttaacatgataactagacctaccttatagggatattagggaagtgcttgtaaatgtcttatcacaatgcctggtaaattgcaagcatcccatagatgaaggctattattattttccttatgtgtaaagtaagcaaccagttgcatggaatctccatttctaaaatgctccctgtgcacagggctctccttttttcagaatccacatccatccctgagaaggccagggctgtggttgtcacccgtgacgatctgcgtgcatgccaactgggctgcatagcacttgtggtcttttcgcagtcccacggctccccccacagcacatttgcctttgattgtggcccctacagattgcgacagctgtgtgatgaccctcctgaacgacctggccaccatgggcgagcagctccgcctggtcaagtctcagctgcagggcctgagtgccagcgcagggcttctggagcagatgaggcacatggagacccaggccaaggacctgagggtaaatcccctgcggccgagagtagacacgtggggaggagatgctgcgggagtggattctccataagcaggaagggaaaggttgactcctggaaaggctcaggggttgtcctccttcctctgatccaaatgaagataagacttttcctggtggaaaatcatttttgtgaacacacaaaactagcacatctgggtgaacaatacttactgaacatttccaggtgagtttttctcatcgagcctttatttcagtatcttgcattcagaagactcaaacacaggtttgtgttaagttggtattaactcttctttaaatgttggatagaatttttccagtgaagccatgtgagcctggaattttctttgttggaagttgtggtttttgaaaataagccatgaatttaattttcaaagaataggtatgagactacagtatttgggctatgtgtttcttcttgagtgatacttggtcatttgcacctttcaaataatatgtcaatttcatctaaattaccaaatatattgacataaaattgttcataatgttcccttattatcctttgtacatctgcaaagtctataaagatgccttcttattcattttctgataatgataatttatgacttatctctttctcttattttggctagagtattaccaatgttgttgatccttttatttcattgattttatccattgtttatctattttcaatttcattgatttctgttcttatcctttttttttccttccttgtgcttgctttgggtgaaacttgctattcattttctggtttcctaagcttattttactgattcaaaatctttcttgattctaacgtaggcatataatcctatcagttttatcactaagcactgctttagctgtatcccacacaccttgcaatgttatgttttcattctcattcagttcaatggattttctgattttccttgtgacgtatctgtaacccatgtgttatttagaaatgtgttgaccaggcatggtggctcatgcctgtaatcccagcgctttgggaggccgaggcgggtagatcacttgagcccaggacttggagaccagcctggccaacatggtgaaactccaactctactaaaaatacaaaaattagccaggcatgatggcacatgcctgtagtcccagctacttgggaggctgaggcaggagaatcacttgaaccccagaggcagaggttgcagtgagctgagatggtgccactgcactccagcctgggtgacacagcgagactccatctcaaaaaacaaaagcaaaaacaaaaaacaaaaacaaaaaagaaatgtgttgtttaatatccaaattgggggattttccagataactttgtgttactggtttctaatttaactctttcatggtcagagaacacgctttccatgatttcagtccttttaaatgtgttgaggtttgtttcattgctcagaatgtggtccatttgggtgaatgctgtatgtatacttagatggaatatggctgagagggtatcctaagaagtaatagaacctatttccctgaggggaaataggggatgctgtgcccatgaatgggggctaaaaagcagcctggaagctgcccaatgctcatcgttgggtgatggccacatgagagcctagcaaagcttacaggggcaggacaaatctacagacctggatctatgctggaatgttacatactctcaacgccactatggtatataaatcctaaactgccaaagtaagacctggtcctagaccgtgggttggaggttcgagtaggggtggtgataagcataagagcactagacagggcccagagagcacaaagaaaggggaactcccacccagaaagagcctgcaaacattgttagcagagaagtaataagaaagacacccaacagaagcaacagtcaagagatgagttcacttcggataaaatgaaaacaacaggacaatctgaaaatgactttgcagaatgacacccaatagaaggaacaagaaattaggaaatttgagggggaaacctccagaaatcaaacaagaagaggtagataggaaaagacccaattgaaaatcatggaaatgaaaaaatacactcattgaagtaaaagaattcagtagatgagatcagctctagtctagacacagtgaacaaggctttggggaaagtttaataagtacttttgggttgagggctgattctagtgactatagctgagtatatatagcaaaagattattctagaaaaatgactctttcctatccttttgcataactttagtccaaggtttataggcttaatatggagaagaggagggaaaagcatttatgtcttgaggggaaaaaaaaggaagccactggcttgcttggatttcatcaacatggccctgcagccttcaccattctgcacacacgctgtttgccacaccctgtgctaagggctttactcaagtctcacaacctcctcatgaggaacctagtgttgttctcattaaacaggcatggagaagctgagaaacttgcctagaatcatggtggttctggaagaattcaaatcaagatcaaattctaaagaccatgctttacccactccacttcttatccaggtgttctgctgacaatctatataatgacttgcctccctttccccaaagtaaagttaaaatagaactatcttcttgctgtatcacacaaacatgcgaaaattaagaaagattacgtataagaagggaagtaacatttttgaatgctcatatgtacatgacattttacaatacattagctcgcttatcaccaaaaccaaccctgcagctaaatacgataatccccaatttactaatggaagagcaaggcttagtgaggctcatctatcatgtggcagactaagggtttggacctaggctttatttaaagcctgtattcttttacccaacactggttctgacatacatattgaggtaataatatcattttttcctataaactttttcaatatattaatactttttccaaaaaatggaaaataatcaccattctagatattacgtgcagtagtgtctaagggtctaagagtaatgaggcaatttagcctaaaaaaagggcaagggacccggattatggtcctgaagcaatcaccgatgagctatacaaccgtggacaagtcacccgacttctttgggcttccattttctcagttgcaatatgaggctgttcagctacaagagctctgagttccctgtggttctgttggacgagattctttgaatagattcttaatgattccttcattcaagtagccatatgcactgcttttagtgttgtcaggttaactgcaggtttttaaaaaactgtatttattatagaatctggaaattaatcaggtaagtagtatcaccctcatttctataaggttaggtcattaattcaagtgaagtagctcttatctcttcacatttgtcacatttgctactttattttagagccatatcacaatgtacatcagaaaatagattccttatgtaacctatttccaagaaccacatttgtgtgtgtgtggaactgaaaatggtcttgccaaatgattcttcatttataaccctgttgaccaggttgataggacttagtctttatactgtaaagtgacattcatttgtgttttgtttccagaatcagttgctcaactaccgttctgccatttcaaatcatggatcaaaaatagaaggcctggaaagagaactgactgatttgaatcaagaatttgagactttgcaagaaaaggtaatgtgttaggtccatttaactttggggtttttttgctttcaaagtatttttatttttccttattgacttaatttgctgctaatcaatttatttttcatataggctcaagtaaattccagaaaagcacaaacattaaacaacaatgttaatcgggcaacacaaagcgcaaaagaactggatgtgaagattaaaaatgtcatccggaatgtgcacagtaagaagagttattaagcccaattacattttttttggttacataaccttcattgtacactaaaagaattccctttaagatttcaacattatgaaaagaatcccatagtgatactaaaaaactaatataaaatctccatagaagtttctacctttttttttttttaagtagcctactggagcccagaattcccagtctaatagaccacttgatgtttcctagttcttttaaagcagatctctgggacagatggagagggaaacaacgtgccttcaggtgacttttccagagagtgggctgaagcccagcgcatgatgagggaactgcggaacaggaactttggaaagcacctcagagaagcagaagctgataaaagggagtcgcagctctgtaagaatgctcccaaattcttgcatccagtccattctaattgatttgaaacacaacgtgcagagtgcaatgtagagttccccgttataggtggaaggcctcatggtttcagcgaatattactgttagagcatcacgtggtgaaaattggtagcccccaggagtcccaggttaccaacgggctgtagaatataacagcttaccatcatgcaaagaaaaaaaaaaagttcttctaaaagttagatatggttgcctctttttccttcttaactgcatttttctgatgcttattcacctctttccagttttctcattacatcattattaatggtcacctcaccactactgaatttttgaatcacaaattgatattagcactactacagattgagtttccctttccaaaatgcttgggaccagacgtgtttcagatttttgatttttttggattttggaatatttgcatagacttaatgagacctcttggagatgggaccccagtctaaacataaaatttatttacgtttcatttacatcttatacacatatatcgaaggtaattttatacaatatttttaataattctgtgcatgaaatgaactttgtgtgtgtgtgcgtgtgtgtgtgtgtgtatgtgacagagtctcactccattactcaggctggagtgcagtagtgtgatctcaactcactgcaaccttcacctcctgagttcaagcggttctcatgcctcagactgagcaatagctgggattacaggtgcctgccaccatgcctggctaatttttatatttttagtagagacagggttttaccattttggccaggctggtctcaaactcctgacatcaagcaatacgcctgccttggtctcccagtgtgctgagattacaggcgtgagccaccgcacccagcctctgaaatgaacttttgactgcattttgactgcaacctgtcacatgaggtcagatgtggaattttctatttgtggcatcatgtcattgctcaaaaatgtcagattttgaagcatttcagattttggctttttagattagggatgttcaaatttgtattacaaaaacaaaaaaaggatatactagaaattaacagaatacatcaaaaggttttgactagagaaaatgcctcgttagttcaaaactgagaaatattagtttagtgcatactttttacagatactggtatttattctttaataaaatgatgtatcagtggttaatatacagatactagcagttttcttgcttaaatttttattgttcaaatttaatatgagtcttggcttttaattgtaagtaggcagtattcacagtggaaggagcatgcactttaccccctgcagccagctcaagttcaagtcctaagcccgactggccatgtaaccttgggtcagtcctctcatttctcaaggcttccatctctttatctaaaacatgagaatgataatttattgttttcctgtggaagttaaatgaggcaacatgtacagtgcacatagcaggtctgtgtcaatgtgagtttcctttcccatcccctccaaagttcaaggaaaaccatgaaatgagtagaaactcgattctccctttgtagtttttataacccagcttcagtatgctcatctgtcaaatagaaaacatgaggtgatgtattacagtgctgaaccggataaggacctggcagaaaacccaccagggggagaacaatgggcttgctaacagtatccgggattctttaaatgaatacgaagccaaactcagtgaccttcgtgctcggctgcaggaggcagctgcccaagccaagcaggcaaatggcttgaaccaagaaaacgagagagctttgggagccattcaggtgagttcacagtttgaagttgcacactttcgttaataaggatgagagaagcagggatctttattattaataaagtggcatagccaggcacctgtctgtacatctcattataccacctcagacccagatcagacaggaacaaagcgttaagtgcaaaaccatagttgtttctagtcttcagctaccagaaaagattctgaacttaaaccacagacaaagcagtgcaaactgcttcacctgcatccccagctgaaagagtgttggaggaataatgttgccaaatagatgagaaattaatattgctataattaattcaaagtatatattatgtttttggtaatttactttttgtgtcaaatatgtatactttttaatgaacataattatcataatcaccagcaaaggcattttaagccataatctgctttataggaaataaaagtacaggccacctacagaagctgcaatgacagaatttagagctctggattttgcagttcatatatacatatatttggcgccaccacgcctggctaatttttgtatttttagtagagacggggtttcaccatgttggctaggctggtctcgaactcctgacctcaggtgatccactcgcctcagcctcccaaagtgatgggattacaggcgtgagccaccatgcccggccttatagttcatattttaaatagtgaacattgtatgctaaaacaatgaggccaggtgcaatggcttatgcctgtaatcctaacactttgagaggccaaggcaagaggattgcttgggcccaggagtttgagaccagcctcggcaatgtagtgagaccctgtctctacaaaaatttttttaaaaattagctggtcatagtggcatgagcctgtagtctcagctactcgggaggctgaggtggaaggatcgcttgaacacactggtgggttgggagcaaggctgcagtgagccattatcgagccactgcacttcagcctaggcaacagaatgagacctgtctcaaaaaaaaaattaaaaacaacaaaaatatgagcggttttatagggttacaaaacaacagtaaaatcaaaattgaataacacagggcagaccccaacacaggaggaagttggcaaatgaaaataaatgatgtcttagtggatgactccatgcttagctcccaaagcctctttggatagtaccatgtctgtgtgaagttgctgattatgccaaggtaagggagcagacccaactttataggcctctgaactctggcagccttccagcctggcattctcaggttccgtgtgacctctcggtcaagtgcctgctgtgttctcattggtactggctgatggttagtgatggtttatttacataaaatcttttggtctgtttcacaaaccagattttgataatatacccatctcattgggcaagttgacccctactgtagaaaccttcttcagcagtgatagcaattgtttcattggcatatcatttaaggaaactatggtgacgtacctccactacaaaaagaactgatttcctatcactttgtaattgcctagacaatgttcaggttcaagaaagcattctgactttgaaattacgtatatgctattgtcccataaatttgtctatgccttctgataatatatcatagagctcaagcaatttttttttattttctccagagacaagtgaaagaaataaattccctgcagagtgatttcaccaagtatctaaccactgcagactcatctttgttgcaaaccaacattgcgctgcagctgatggagaaaagccagaaggtagaggaaatagttgttctctagaaaaatctaaaaacattttaattatattgtgagaaaacaatgaaatgggctgacctacttttttgtttattcaaagtatagtctcttagatggaagagaatataatgaaatgttaacaatagttctctcttgcaaaagaagtatgaatgacatgtcttcttatgttcatatgtattacctaatttgtccgcaatgagcaaatcacttttgtgatagcaacaaaaaaattataatgctatttttaaaatatcaagcatacaagcatttattaacagaagatatttaagacttgatcaaaactgacacaattttttagcagttcaatggggattttaaagtgtcttttataataactatttcttttttttattatactttaagttttagggtacatgtgcataacgtgcaggttagttacatatgtatacatgtgccatgttggtgtgctgcacccagtaactctttaataactatttctaaatcataaaaaagttctttggtttactacaactttatattgatgataacattgtgcttttgtaaaggttactaaagggtttctcaccataatgagaatgttcaagatagtggtaaaccttggggaaatattaccagtgctactgtctgaagtgaccaaggattaactggtatggtaaataggcttagaaaatataacatctcattgttgccccagaaacacatcagttatgatagagtttgagaaatcagcacctacattctttccttgaatttatactgtctttgtttatttggaaaaaataggaatatgaaaaattagctgccagtttaaatgaagcaagacaagaactaagtgacaaagtaagagaactttccagatctgctggcaaaacatcccttgtggaggaggcagaaaagcacgcgcggtccttacaagagctggcaaagcagctggaagagtgagtgcatggcccaggagaccagaagggcacgtgggctgagctcagcagcttgtcctgagacaagcaaggccctcccctgggttggctgggtctccagaactgggtggagggcggagggtggggtcaaggccaatgccccaggcccaagtcagaagcagagcagcaataagggcactaattcctggccacgtcctttgggcacagctacagaggccatcacctcaggtatccacttaccaaatgaaatgcgaagaggctgggctcaagttgatggcaccactgcagtcaaacctggcagacagagagagactctgccatctctttattttattttgtttttttccatttcttaaaaaaaaaaaagaaagaaaaaataaaaagaagaaatggaaaggtttggggggatgtcagctgctggcagaggaaggctgtggggagtggctaacctgccctgtcttccaggatcaagagaaacgccagcggggatgagctggtgcgctgtgctgtggatgccgccaccgcctacgagaacatcctcaatgccatcaaagcggccgaggacgcagccaacagggctgccagtgcatctgaatctgccctccaggtgggcacctgtaccagcagcttctccacattcgctgtggagatggctgatttttatattttctttccgtgggctccaaggaatagaaacaaagcattattttaaatcagaacttgttgtatagaatagaacttgccctagatatgggtaatttctgtatttgactatttcatgtctgtagcacagttttaaaactatgtgtaaaaccagatagaaattacactgattgtcaattttcaacctgaacaaatattatatcctatatcttaccaggtatgcttctatgctgtgatcattagccaaaaagagatatttttgcaaacaacttgatcagcattttcatcaggtcatttggtcttacatctcggtgtgtctgtggagtcctgtgggatcttatatgcaccatatgataattcctatatctgaaaataaagaacaaaatattaaatatcagagttcagggggacaggccttcttgaatgagtgaagacttttctgtcccaaagcttgaaagcctgaaaacaactaagttctctcctctgttattgtagaggtttttgtacgaatgacagtgagcagctaaaacaagtgtcacataatttgtcagtatgccaccagagataggcccacctccccaagccacataattcacataggtgttagggctacctggagccctaactcttttagggaacaatctagttataactccttccccctttgaacttcatccttaaaattaagggcttcagactaggatagaaatcttattccatatttcgtaacatatagcatttgtttaaggctgttaaatgctttgctttcagacagtgataaaggaagatctgccaagaaaagctaaaaccctgagttccaacagtgataaactgttaaatgaagccaagatgacacaaaagaagctaaagcaaggtattagggggagtgggcaatggcagggatagtcaggagctttaaatgacctctgggaccaggtggggcagccctagaagcaaatgttgtttttgaatctcagtgtcaatgcagatgataccctttatttattttattttattactattattatttttaatagagatggggtctccgttgcccaggctggagtgcagtggcacaatcatagctcactgtagctttgaactcctgggcttaagctatcctcccacttcagcctcccaagtagctgagattacaggcgtgcaccaccatgcccagctaatttttgtattttttttagaggcaaggtcttgctatgtttcccaggctgggctcaaattcctgtccttacgggatcctcctgtctcagcttcccaaaatggtgggattacaagcatgagccaccatgccgggcccagataatactttttaaattcatgatttatttatcaatttcatgtatccacccaatattctaaatattccccacctatcatgtacaaaattaactagagccttataaatataaataaatcttgagagtgataggcctatttgggcctggccttggtggggaggctattttaatttaacccacctgtgatcatggcattggcaaccccacatgtcaagatcattggtttgggatcattagaataactgctttaaaatttcttaagtcctaaaatctttgcaactaaaagtccccaaaatcactgctactgtgaagcatgagaattttttaagcataaattttatctctggaaaattttcatgtattttacttacttatttttttaaataattaaactctctcaatctcaccaaatttctgtgtttgaaaaatgctgtttcttgtgtttctccaggctcttgttgtcatccatgagtccaaggccctcattcagcctcttagtcctttcagagggattaaatgatgcctctgtaaattaaataatttctctcctttctgcttccttcttttccttccttctttctttctctctttccttcacatgttaaaaaattaaagacatgaaaaataaaataccaaaaaagtactaacatacaatcatttgccttgcaaatttcaataatttggatttcctggtatgacatctatttctctctacaaaatttgagcttcgaggtaggctcagtgtgctaaacagggttaggatgctaactatgttgctatgtaaaccagtcctggaatcgtaattgaagccatgaatcatcaagatggtcttaaagcatttgctggtcatttttgatgacccaaggatggcaatattatcagctaggaatgtctgctagctccctttctttcacagaatttttaaaatgtgtcattttggaaattaacagaaacaaacagtgcctactttgtgtctgtatttgcctggatgaggctctttcaacaacactcttttcttgtcctctgatggaagaggatcctttctacattattaattcattcattcactcatgtattcatttactcaacaaacatatactaatattacgcctcaactagtgccagacactacattatgtggtaggacatggtagtggataagacagatgcatcttttactaaacagagtctcttactctgagcagttaagaagtttagccttccccaagttattcagcctctttctttcttcctgtgtatttccaaggcattaccacaaggctctgatttgctgctgacctctgtaactggaggatcccagagctgtgggtctgggcacatgcagtgggcatctctgaggtgacccctaagaagcaagtctactcaatgctgtgcagacactggctacttcaggggccacaaataccaatggaggatcaaaatgcacaaagtaattgcctcctgatgctttattttattttagaagtcagtccagctctcaacaacctacagcaaaccctgaatattgtgacagttcagaaagaagtgatagacaccaatctcacaactctccgagatggtcttcatgggatacagagaggtcagcatcttcctaatccattgtactcggttggcttcttttgttgaacgttttagatacttatacctccctatctgtgtgtgcattaggtgatattgatgctatgatcagtagtgcaaagagcatggtcagaaaggccaacgacatcacagatgaggttctggatgggctcaaccccatccagacagatgtggaaagaattaaggacacctatgggaggacacagaacgaagacttcaaaaaggctctgactgatgcagataactcgggtatcaggcgatctctggccaggacatcttagccattctctccattgttatgtgttttggtccatttccattcttccctggtaaagtctgatctcagaaactaaaacattagaaaacagctccacctgatacaggatatattcaaagcgtatagatatcctgctagttggaaggaccagacaggatttttaatttttagaaaatacattgaaaatgctattggtttgcttttttacaaagtggagatatatgtttctaaatcatgaggcattgaattatgattgatattaagaatcagaaaacaggctgtgttttctgtgcgctgtggctcatgcctgtaatcccagcactttgggaggccgaggtgggtggatcacgaggtcaggagatcgagaccatcctggctaacatggtgaaatcctgtctctactaaaaatacaaaaaattagccaggcgtggtgatgggcgcctgtagtcccagctactcgggaggctgaggcaggagaatggcgtgatcctgggaggtggaggttgcagtgagctgaaattgcaccactgcactccagcctggacgacagagcgagactccatctcaaacaaaaaaaaaaaaaaaaaaaggaaagaaagaaagaaaaagaatcagaaaacaaaggtttttttttttctttctgtagtggtcaaagtaaaggatttggtacctagattgcagaatacaattcaccatgtacagtagttcctccttatcctcaggggatatgttccaagacccctactgggtgtgtgaacccacagatagtaccaaaccctatatatactatgttttttcgatctgataacccagacagctactaagtgactaatgggtgggtagggtagacagcaaggatatgctggaaaaaaggaagattcacatgggtgggaccatatgagatttcgtcatgctattccaaacagcacccaattcaaaacttatgaattgcttatttctggaatttttcttttttaatatttttggaccatggttgatagcaagtacttgaaaccttgggaagtgaaaccatgggtaaggggggaactaccgtaactaattatgacccatcctgttcaacatctggggaccaaacatgccacttgacaaatactgtcagtaagaacatttgtagttagccttttcttaatgcacaatcttacatttctattttttttctcaccaacagtgaataagttaaccaacaaactacctgatctttggcgcaagattgaaagtatcaaccaacagctgttgcccttgggaaacatctctgacaacatggacagaatacgagaactaattcagcaggccagagatgctgccagtaaggtgagtgtgtccccacgtggtcagtggccaaggctagttctttaatgagttatcacatttatcaagaaagaaaaaaacacttatttactcaagaattggttgtctttctttccccaattcttgtgttgcttgaatataaagattgattttctcctgtcatcctttacaagtgtacatgaccttcatccttacattatctggtatatcaggatcctgaagcaatttgcccccattgagtttattcaggcagaaagaaggattttcttccaggccccagtttgtaaactgtaattgcacattcaagggagggttctgtggtcagaatgtgccagtgtgatactgcacaggacctaccctcctattgtaacttgaaagttgtagaatccatctttgctgaggatggaggatttaagatgacagcagttttccatcattggagtactgattcaccagcctttcttgttttaacctgacattatttgcttgaattactgacacttgtctcttgagatttgttttgtcctaaaatggcataaatacaatttcttatattttccaataactcctagacagccctacaggagagttttggagggagagggttggagagcctagtcagaatatcattgccctggaggcatcgtgcccaataaccaggctcactgttacttcttttgagcctcagaatctgccctttcttctaagaaagcaaagtattcccaacataaaaacttgaacaggaaaacaaagagcataaggcaaagtttggaagaacgcaccctcttcacactcatacatgctttataaaaaccaaatgaataagaatgtatgctagcttttacccttctgtgttcattcactaatttatccaacaaaaatttgaagtgtattatagcacagtggttaacagctgtttaaccaagccagactgtcttggtttcaattcttgctctgcctttggtgagctgtgagacctgagccctgtctctttacctctctgtgcctcagtttcttggtctatagagcatagaaagtaccaacctcatgagattgttagggttaaatgagctaatgtggaacagtgcctggcaaatagtaggtaccgtgttagtggaaaaacataaaataaaaagcagtaagtaagtgcttttgaatgcctggttggcattggcacttctttgggtgctgaggacacagaaattattaagtcatagttctgaactcaggctgctctccagccactgcaggttgtttcttagactgtggtaacaagctggatagaggtgtgttatgtgtatcttcaaaacccccagttctacctggagagggtcagaatagcactaataagtagcattaacagacatggataagaatgttcattgcaacatagtttataatcacacacaaagattttttttaaaaaaagccacatttacaatagcaaacctgaatgagctggagctgtgtgtatcaacatgaataaatccaaacacgtagtgcccagaaaagaaagcaagttgtagataaatgtgtacaggtggacaccatttatataaaaatatttaaaacatgaaaaataggactaattacagtttacagataaatgcatatttagttttgaaagattatgaaaaaatgcatgggaatttgcatgggaatccagatccagagtagtggtgacctctgagaagggagaggggaacgggtgccagttctgtcagtcatgttccatttcatggtgatgcacatacaggcatattcttctccctccctttccttaaatacaagaaatatcttaatttaaaaaatttaaaggaagagtaggaatttgccaggtgacaaaaagcaggagagaatgccaggcagagactcagagaaggttctgaagggcagggggtgagtaggagagagaggcgtgaaatgagcctgcaaatgtgggaccccatcgctaagtcccctgatttaatgccttgcatatacaagatccttgataaatatttaaatattgatagagaaaatgcagacttgagttaaatctcattcttttgtattcgatcgttaggaaatatttatcttcttggtccacacaccaggcctagtcagagaacttttgtcagtggtctattatatatagttataaagtttagagtaaatgtttggaagctttgaacaatttgaattgcctcaacatgcaagcatgtgatcggtgggcttgtattttgtctactttgttttttttatttttgtagtgatttaaatttgaatatgttttacaaaagtatttgtccctggcatattagaaggaaaaaatggtccttcaccacagagagctcaagaagcgctattttagagagccttgatgtactcacttatttttcaggactgaacacctataataaataaaactgtaacatgtaatatatccaacagaagcagttcctttaaaagtgcatttaaaatattttaatatataagtataaatttaatatatgcatatatatttaattatatattataatcatatattttatgcatatatagtgttatataattatatctgcttttatatattaaataaaattatatattacatacaatgtacatataattatatatgcattttaatataatatataaaattatatattatataacatataatttatgcatttattatatatttaatatattaaaatgtatatttatatataaatatatataatacataattatatataaattgtatattaatatatacttataaaaatatattttatatatttaatatataaatgcatatatttaaaaatatatatctatataaaaacatatagatatatatagttttttttttttgagacaaagtctcactttgctccctaggctggagtccagtggcatgatcatggcatgctgcagcctggaactcctgagctcaagtgatcctcccacctcagcctcccaaagtgctgagattacaggtgtgagctactgcacctggcttaaaatatagttttaatgtattacatgtctgattgtatgccaggcaccatgccaagtgcctccatagatgttagttcatctgcacaaaaaccttctagggttgtaattcatattattgtcattatcattattattattgctagcacagaggactaaatgcactgctcaaatatccctgactaataagaaacacaaatgccttatgacacagctccggaaacagcttcatgagtttataatctgggtcttggagattatgatccagggcttagagacattcacattcccttgctccttatcataacaactcaggaaaggctgatacatggctacgagtcacaaactagctctctgagcacacctactttcttcacaggacagtgtttgacaccatgtaacttactcctcacaggttgctgtccccatgaggttcaatggtaaatctggagtcgaagtccgactgccaaatgacctggaagatttgaaaggatatacatctctgtccttgtttctccaaaggcccaactcaagagaaaatgggggtactgagaatatgtttgtgatgtaccttggaaataaagatgtaagtattgcttggacatctctcttgtttttgaaacaatgtttttcgagaggtgtgcttttgagatgtgtggcacggctgcatcactgccattagcacagcaggcagaaatcctactgagacatcgacaaatccctccagcttcctccctgcccacctccccactgtggcagtgccctcgaggggcctcccatgcattgttggttgctagaggatcaagaggctttacccaatgggcccagcacgtgggcatgtgtgtgtacatgtaaaaaacatatgcacttggggaggatgattggcacccctccatactaccaagttgtatgattgacaccacaccaccagggatcaataccaaggaggagtagctcctcctcacagaattgtgaccttgtcctcttcctcagactgcccagcctcagatccttcctcaagcctgtgggatggagagattatgggtgaggactggagtggaatgaatcctccctctcctgcctaaatgataagaaaagcagttgccctgtctctttatcagtgtaaattcatcactactactactatcagtgtaaattcactacccatacaggcattttgaatggctggctttagcttttaatccctccttttaaaatacatttctttgacataagtgtcagaggaaaagctaatcactcactgggttaggattcagttgttggaagaaaaatgcttgaaatatggttctcaaaaattctgcccaattaggaaattgttagttgtcactagtggatcttgtatttaaagattcttaaaatcaacactattgctaattactcttccatgcttcaagaggttggcattttatttgtagcttgttatgtcatgattttttgctttgttttgtggtaaaatgcacattactttattccttcagcaaatttataccatatacctactatgtgtcacattctggctttgtgataaacaaaaatttattctcgaatgtacttaatgccaatgcacacttaaaatggttaaaatggtaagttttatggatattatgccgtgattttaaaacattttgtttctaccttaaggcgctcacattctagcagggaagaaagatgcatatataactaaccatgataacatagaggtgtgacaacagaggcatgcacaaagtgttaagaggatgttgtgtggtactgggagaagcaaaatggcttatctcccttaccagactaaaatctgttggacggctgagtctatacctgggccctctgtatggtaggtgcttggcacatatttgtagattgagtgaatggaggaatgaataaatgagtgccctataacatgagcagagacagctctcacattattaattctgcattctatattattctataaaatattgcaccttgtttattctgtctctccaaggcttattgcctaaaacccattagttatttgaaatgcatcctcatcctcttgggatgggaatttgagaaaccacaatgtgaagtgttctgaggtggccctttgtctccaggcctcccgggactacatcggcatggcagttgtggatggccagctcacctgtgtctacaacctgggggaccgtgaggctgaactccaagtggaccagatcttgaccaagagtgagactaaggaggcagttatggatcgggtgaaatttcagaggtacaagtctgattgactgtacctgtgctcaccaaacttccatgtatacatgttgctgaaccccatttttagtggcttggctttgaattcttcaaattttttgtttaactttattatctaaattcattttaaacagaatttatcagtttgcaaggcttaattacaccaaaggagccacatccagtaaaccagaaacacccggagtctatgacatggatggtagaaatagcaatacactccttaatttggatcctgaaaatgttgtattttatgttggaggttacccacctgattttaaagtaagtgtaaatgttatttcactgaattaaatattaaaattttaatttggtatggtgatgacctcatgtctctaattgttaattacatataaaatggatttaaccgcacattcttacagcacattctagagatactagctaacacttattgagtgcttcctctgtgcactgttctaagctttagtatgttaatttaaataagcatcatgatcattcccattttacagatgaggaaacagagacagcgaggtgtaataacttgcccacagtcatacagctagtaaatagcaaagccagggcatcttgttccagggttcacattcttaattaacccttatgccatagtgactgttaaaagtgattaattgatactattttgattattgtcctttgttcaattggtggaagatgttttatttcattttcagcttcccagtcgactaagtttccctccatacaaaggttgtattgaattagatgacctcaatgaaaatgttctgagcttgtacaacttcaaaaaaacattcaatctcaacacaactgaagtggagccttgtagaaggtaaataaaatgtagaaaccagaaactctgtaactggagttttggtaacttgcagtacttttacatatgataaaggatgggccagtgagatgctattgatgttgctagttgctttgggccagtagttcttcaagtatgtgtgcatgcaacactggcagtcctgccctaaaatctaattatggtagtctcttcttaatttgtatgaaatgctagatagttttctcacttgaaaaaagtctttatgaaaatttttgtgcctcctaccacaaaatatttaatattagatggtacctgatctagaggcctgatttagtggctcatgcctgtaatcccagcactttgggaggttgaggtgggcagatcacctggggccaggagtttgagaccagcctggccaacatggcgaaaccccatctctattaaaaatacaaaaatcagccgagtgtgatggtgtgtgcctgtagtcccagcctcttggaaggctgaggcacaggaatcgcttgaactcgggaggtcaaggttgcaatgagccaagatcatgccactgcactccagcctgggcgacagagtgagactccatctccaaaaaaaaaaaaaaaaaaaaaaaaagaaaagaaaagaaaaagaaaaagaaaagaaaagaaaagaaaaagtggttcataaaatgtgccatgacttttttggtactcttccacctcaatctttttgaaaattgctgccttgaactcctaaccttccctacaattacaaggacatggtatattctaatatgaggtggaccaaatatttattattcagaataaaattacattgcaagttaataatctcttacatttcaaaatcttcagctggcagaccacatcttcctaagcagacatttccaaaagggtatcttactcatctttgtcgagctagggtttgattgtcagagtatgagagcacatccaggagaaagagctggctgccttaacattttaaagatgtctcctctgctttaacaaaattatgacaactagattgcattttcttggctccatttttcagatagcaacatcttgtattaataagcacactggcatggtgatcatttgctgctgtgttctaatttatgatgattaatgttgacaggaggaaggaagagtcagacaaaaattattttgaaggtacgggctatgctcgagttccaactcaaccacatgctcccatcccaacctttggacagacaattcagaccaccgtggatagaggcttgctgttctttgcagaaaacggggtaatctataacaagcatccagatacaaccaaatatattcattctgtttagcaatttggagataactgggttgttataaatgacccactagatctggaaaacaatgtgtaaatgttacctgcatccttttcctccacccagttgtactttctgttggctgggaaatgtactttttttttttttttaacatttttagtttcaggggtgcaggtgcaggtttgttatataggtaaatcgcatgtcacaggggtttggtgcacagattattttatcacccaggtaataaatgtagtactcaataggtaattttttctgtccttaaaaatacttccaccctcaagtaggccccagggtctgttgttcccttctttgcgtccatgtgtactcaatgtttaactctcacttataagtgagaacgtgtggtatttggttttctgttcctacgttcgtttgtttaggattatggcctccagcttcatccatgttgctgcaaaggacatgatctcgttcttttttatggctgtgtagtattccatggtgtatatgtacctcattttctttatccagtttaccatttatgggcatttaggttgactccatgtctttgccgttgtgaatagtgatgcaaggaacattggcgtgcatttgtctttatggtagaacgatttatattcctttgggtgtatacccaataatgggattgctggatcaaatggtagttttaagttatttgagaaatagacaaactgctttccacagtgattgaactaatttacattcccgccagcagtgtacaatcattcccttttttccactttcaacctcaccagcatctattattttttgactttttcataattccctttttgaccagtatgagatggtatctcattgttttgatttgcatttctctaatcattagtgatattgagcattttttcatatgcttgctggcagcatatatgtcttctgaaaagtctgtgtcctttgtccatttttaatggggttgtttggtttttgcttgttaattatttaagttctgatagattctggatattagacctttttcacatgcatagtttgtaaatattttcttccattctgtgggttgtctgtttactctgttgatagtttactctgttgatagtttctttcattgtgcagaagctctttaattaggttctatttgtcaatttttgtttttgttgcaattgcttttggggtctttatcatgaaatctttgcaaaggcctatttctataatggtatttctaggcatttctatgtctagaataggttttcttcaagggtttttttttatagttttaggttttacatttaagtttttaattagtcttgagttgatttttgcatatggtgaaaggaaggggtccagtttcagtcttgtgcatatgactagccagttatcccagcatcacttattgaatagggagtcctttccccattgcttgtttttgttgactttgtcgaagatcagatggttgtaggcgtgtggctttatctctgggctctctattctgttccattgatgtctattttaatgagggcaaataatcaggaatttgagaacatgccccccaaaatgtgggagaaatctccccttttcctgttctattctcattatcagttttgttatttgagaaccactgcttgcctaagaatctacttattctgacccaaaacatgtgaaaacttcctgggatctctaagatctagactgacttcctgctgtttctgtcttgatctgattcttaccaggctgtgtgggattgtgtctttatcagcatgtttgccttctcaagacactgaagcttctctgttttcaagtagctgagattcctagggaccctctaaaatctattaggttagaaaagtccaaagtgacactctacaagtgatcgtcagcgccatctgctggttgatggagagttggcgtgatgtttgctgctttatacctatagccggcctggagttgaaccctccggtgaataggagcttctgtagttgctctcacggagtatttctgaagaaatgtggatgagcccaaaggctttctggtggtccgagaacatgggattgataaggagcttgggattttaccagagtcttctaccgcagggtggtgacactgacccggtccaactctcctctctggggttggtctggacccttcaggagattccaaggctggaccagttctgatggtttgggaaggtcccagccagcctgaaggatacatagagcagagaagtcatccagcatcttcaggacacggcagttgttttacaaaacaaggtcttctttgtatataatttgaagttcttggagactaagaaccagaaatactactcatataataagaaaacttaacataataccattacataagaaatgacctagagatctgctttaagtaggatggctcatgactctcagtaaattggtgtaactctgttgtttatggtttgatcaacctaagctgactcccaaaggcaaggtttaggatccagataaggactgattttcctcttagaaaagaactcggtccctggacctcaaagagaggcattcttatcattaaggaactgtgtaaaagcaaagccttcaagccctaagtcagaaattgctcagcttatcttagggaagtagctgattcaagtatatgtttcacaccgtaatggagatgcaataatgacaaagacagatatggctcccgccctccgggattttataatctagaggggaagaatatgcaaaggaatgctgttaataggttgtttatttcatcacaactgtgaagagctgtatcaaggaaaagtttgggggtgaaatgaggatgtacaacataaaagacacttgagcaaaggaaatgcttcctctgagatcaggaggacagcatttgaacaggacatggggacaggcaagacgggggatccaggcagagggagaggcatgaagaaggcctggaggtgggaagggcagggagcactcagtggaacagtggctgcggggctggagagccagaggcagtgctgagagagaggcagatgccacgcagcatctggtaggggtcagggcttcatcctgacagccgaggagagtcacaggctcccactggcattttcaaagactgctctggctgtaggggggaatggactttcgggggtacatggggagaccggcgggttgttgctgcagggactggctaaaaatgttgtggctgagactaggtgggatgacataaagagagagctaagaatggcagaatttacaagattatgttggatgggagagaaggaaggatcaagaatgattcctaggttatgataaagggatgagaaagaaaaaaaatgactcctaggtttgtggcttgctcagcaataagggaaaggtaagcatggtgatgtatgtgtgtgccctgcacacgtgcatgcagggggcaggctgggagtcagggagcgcatgcacctggtataatggaagaagaggcaggcttggcagcctgtaggaggcatgtaggtcatacgttctgtgtgagatattctgaatttgaggtctctgtgagtcatgcaagcaaagcaataacaacaagggaatcacgtgtgcagacttggccctgaagacaggtctaggctggggagaacaatttggggcccatcagtacacctggattggagctacaggagagcctgtgattgtcaaggcaaagggagtggtgtggggaggaaggagtcctgtgtaggatccccgaggaacccccaacactgacatggaaggtagaaggggataaaccaacaaatgagacagagacataagaatcagtcagaaaacagatggtggaaggtatctgaggtctgcataagacctcgcctctctctaaaaggcactcatattttcaaataatattaatgatctgtatcttttcggtctccatctttatacaccagttatggatcgcatgaaacaaaatcatgatcatagctagcatttattgtgtctgtcctgtgggccaaccactgtgcgtgacatttaacgtgacttacagtattgaaccatcatcccatcccgtgaggttgctgttgcagcaccattatcccttttcactgaggcagcagctgaagctgagagcaggggggtctgtgagagtaacgggagttccagtgctctgcctcttcttcagccaagccttctggtcatctgcattgttcctctgtcctaggatcgcttcatatctctaaatatagaagatggcaagctcatggtgagatacaaactgaattcagagctaccaaaagagagaggagttggagacgccataaacaacggcagagaccattcggtacaccttttgagtctgtttacttgaatcgttaaatgtccttagtcctttaaaattaagtcagtgcccccaaataaataaataaaacttcctattaccagataaacttatggatgttaactgagggatatatccttttaaaatttgcacatttcggcatgaaatgtataacatatacatgatatctataaaacacggttaacttcaaatacaaacatttctatcaaaatgttttagtatcatatttttatccaaaaatgctactgctcagagccttcctactatgtatataaatgaatctgggggaagataaataaaaacatgatagttctgaacccctgtgaataggattctcttattttcgctggcttgctgattcatctctcatttatttcagattcagatcaaaattggaaaactccaaaagcgtatgtggataaatgtggacgttcaaaacactataattgatggtgaagtatttgatttcagcacatattatctgggaggaattccaattgcaatcagggaaaggtaagatgatttttttaaaacgagatttaaagcctttgttagtggttatgattgtgaccaaaaaaaatctggtctgccatttttaattccaccaacaaacaaacacaaaaagttaacttttccatattaacagtatagtcaacagaataaaacagatttaaatcccgaataatgagactgggcagtggaaagaaggagggtgggggaatgtgtgtcaccgccattgtcattctcgggaggggagggaccacgaagggtatagttgggttaacaatgctggcagcaagtagaacagaggctgtggccctgggcccttgaaggctgcataggagagcgtgggcctcccaaggcctgacagacatccctggggaactgaaagctgaggttgccaccttcagggagcctctggaagaatgtgaaacagtatgtctccttcacttcggcatcagctgctccttacatgctatcgagcgtggaattgttacgtaactgtttcttggatgagtgaacacatgaattaattaatgtgaaaggcagtaaagctttatctgaatgggaaaaatcccaccattttggaatgcacgtaaaaataacttttacattttgatcatttgtatcctcccggaaggcttttagatagctgacgatagtgtgtggacagaacatatcctggaaggattagtgcagcctcatgactaagtaagagtgctcccagaaggttaggttatgatgacttttatatgagatctgaagctagttaactcttttgctaacttatacatcagttggaaggaactagaatatgatttataaggtgtcatgccaaggtattctttcttctagagtccttatacatgtgggcgtctgtccattctacgtagtcaggtactaatctttgttttaaagttgtcagggttgcctccaaaggcaaaaatgcaaatgggaaagctgggcacttcaacagaacctgggggtgacatctttactccctgggctctggaaggagccttgcagatcatggtatgtagcccctgagttttacaaatgaagaaattcagagccagtgagattatattaatatttaatattatcaatatcaaatagcaattcagccatgaatagccagttatgaattgtcagtaagattgattttatttccatgaaatggaataaaataaaatcgtttaaggtagttttttcgagtacttttgagtatgtttgagagttgccacttattcattcattacacaggatttattgagtgcctaatgggcatcaggcagagtgacaggtgccaagaaggcaacaatgagcagggtggagcctggagaagaacagaagagagacagtcactacaggagaacatgacgtgtgccataggaggaagctcagggtgctgacagagcccaggagggaacctaatccaactggggccatcaggaaagtgacctccagctgggacctgagagatgctagcagtcagtgtatgtgaagcaccaaagctggatagagaaagcatgaacttgcaaagagctagagtacagcaggaagtgggatagggatgccccatggggctgatgtgggcagcaggggcctgaccacagagtaccttgaaagtcacagtaaggagccattggagggacttcagcagagaaaggccatgaccaaatttgggttttcagtagctcactctagtgcagggcagagactggattagagaagaaaagggcagaggcaggtagagtggctggaggccgagtatattaacagaggtgagtgatgagggtgacctggcccaaggagtggttatgcaggtgagcaacagggatcagattccaaatatatttaggatggtgaatgggcagcactgcacaatggcttgggttggggaataaaggggaaaagcagtcaagaatgatgcctggtttttggctaagcccttggcagatggaacacaccaacggaggagtggggtgagaagttaagtctgagacaggcttagtccaggagcctgagacacagccaggtggagaggcccacaagcaggcgcacaaaatggcctgggcctccagaaaggaggccagtctggagaagggtaaatgaagctcagggccaggtagtcattgaggtggtagaggccagtgggcttacccagagccaggaggaattctcaagttgaggcaataaggaacccattggtggtggtttgtgtttgcatgatattaacacaaggcccctagacagtgatgtggatgccagtcagtccaggttttctagaaaagagcagtaggtagaaccacaaaagaggtggctttagttttggctcagcaaaactttaggttaattcagcactcaacctttatttgccttttcatctccatccattaaagaaatatatagatatagagatgcatatacatagagaatttgcttttttaaaacaattttttgtagagatggggtcttgctgtgttgcccaggctggtctcgaacttctagcctcaagtgatcctcccacccccagaattctggggttacaggcgtgagccactgtgcccagtccagaattttctttctttttttgagacaagagtcttgctctgtcacccaggctggagttcagtggcgccatcttggctcattgcaacctctgcctcctgggctcaagtgattctcctaccttggcctcctgagtagctgggattacaggcatgtgtcaccatgcctggctaattttttgtatttttagcagagacggggttccccatgttgtccaggctggtcttgaactcctgagctcaggtagtccacccaccttggcctcccaaaatgctgtgattacaggcatgagccaccatgcctggcctagaattttcttagtaacttattttgggatcctccaaacaagggactgcttcctttttctgggcaagttttatactttgacctttttttttcttttttttttttttttttgagacgaggtgttgctcttgttgcccaggctggaatgcaatggcataatctcggcttactgcaacctccacctcccgggttcaagcaattctcctgcctcagcctcccgagtagctgggattacagtgcctgccaccatgcccggctaattttgtgtttttagtagagacggggttttgccatgttggtctggctggtctcgaactcctgacctcaggtgatccacctgcctctgcctcccaaagtgttaggattacaggcataagccaccatgcacagcctatattttgactttttattaaaatcactggaacatggaaaatgcaggagatagaggccagtcaaaagatttcactggcccttcactccctctaaagcaaaattctaaggaatagtcagctgttctgggtgttgcctcatccctgtggtgaagtctttggtggcccagagattcctgaaactgccattgggcatgagtcactgggaggtggggtgggcacagaggagttccatggataatccacagccaagctctgtaggggcaaccagccaacgcttccagagcagggaggtgttctggtccctggcataaatggagggaccttttagacaaagttctcaaacctaacctggagcaaggcaagcaagtgtaatcactaaatcagctttgctcaagggattttgtgcacgttttgtttcttccccctctcactgtagtgtttcttctgggaatggggacccagatcttggaatggcttgtttccgattataatcagaaatcattctgttaatcccatctcctacccaggagaagagcaaatcatccctggtaatgccagagggtgtgacaccaacaagggcatttttcttgaggacctacaccattgtttacagagtgtgattatacacactaaaatgaaaatgatccaaaaagtagatctattgaacatcgactaagtacccaacaccaagattagggctgccttttgttctttttgctctctgaagtcggcctgcaacagccatggagctggctaagcttttgtggacagattggcccaaagtatacataaataccccaacgcaggaacccaccaacacaacaactcatgccccagtgcaatcacattcctctagcaagtatgttcagaccctgtatcctggagtaaatgtagaactgtaggtcctcaggtaagccaaggtaacaagaatccccccaggaatagtggaagtaaatctcttccattttaacacttctgctgtaggtaactcttctagaaaaaggcatgatcacttccaagtgctgcaggaataccaactgtaagtgtaaaaagcaagggcttcaagcctcactaacctgtgtgacacactgacagtacagaccccagctctaccacttaccagctgtgtgaccttaggcaaggccttaacctcttaatgcctcattgctacatctatagtatgggcatagtagctgcctatctcttagggtggttggaagattcagagtgtgtaaaggaattagcagaggtcagcacatggtcagtgctcaataaatgttagataagaaaacctgcccttcctgcacatgtatcctagaacttaaaataaaataaaataatataaaagagaaaatacctccctcaaaagcttattgtaagttggattcatagagcttcgtgcaaaataggtggtctgtatctgttaactgcctttctctcctactattttccttttctgcaaccttctttctttgaccaataatctatggagagagggacatctggaatgtcgttgtccaagagatatgttgaaacccaaagaagaattgacctaaaaccatgtataaataggcaagctccaggaatggaaatgaaccctcctcctcttctgaggcaaaaggccatctttataaaataattaggcttatactgtaatgccagtgaggatttgtttctttcttttccttttaatgaaatttaattttaggtctattacaggtagctcaactgtttctaatgaattggattaaaatgaatgcagacacctttccatttagaaaagtaagctgcattagggatttagaatgaaatcagctttgggttttcttagtacatcatttgtttaagaaacacaaatatttgcctggacttcagttagttcatgtgtgtgaatgctttatgtgcattcagctccagacagatccagaagtcaaatcgaaggggaaatgccctggggccatgtagaaagagctgctttagaaattgctctcattatataagagcagtaatatgggagtagttactaacttgacgatctcacattgagtccttactctgtacaaaacactgtttgagtgtgttacacatattaactttcttagactatgacagccctatgaaacagattcacatattcccattgtctaaatgaggaaacaggcacggagaaaagttgcctgttcaatcagaagggacagaacttgaacccaggcaatttggctggtccagagcagcacaattttgcctctcagaaacacctgctgagcattcacgtccaggtgccatgcactgctgcaagctcttgctgtacgttaacttgtttttttggttttgtttttgttttttgaggcagagtctcgctttgttgccaggctggagtacagtggcacgatctcagctcactgcaacctccgcctcccgggttcagatgattctccaacctcagctcccgggtagctgggactacaggtgcctgccaccacgtccagctaatttttgtatttttagtagagttaagttttcacaatgttgaccagcctgatctcgaacacctgacctcaagtgatccacctgacttggcctcccaaagtgctgggattacaggcatgagccaccccacccggcccgttaattttttaaatcctggcaataaccctttgcccacaggtaggaggtggtagatacagcagcatatgaacccagacaatgtgttccattgtttcagcttggcattggttaaatcaagctacgtttttcataattgaatagaaccaaaaagtaacactttgtttcttctgactttacagtggctaacttaacagtgaacagaaaaaaaagagcaaaaggttttctagagcactcctggttcctacaaatgatttattactttattaatatatatgtatatcatatatcatctattaacttattaatacatgtcctatccacctgcaatgccgtgactccagcggggagggacgggcagttctagatattgtgcatgttctctgtctctttaccttttgcggccactggccattcttctgttaacattgttgtctgcatttttaaagctgggaatgtaaacttacacagaaaggaagtcagttctcccagcatcataaaataagtagcattatgggaatcccatgggaaaggataaacataaaacacctactcatttatgggtgaaaagtactaaagagcacagcgtttcagctctgatttcacgtgagcctgacatgatccatctcttccttttatctgtgttcgtaatcagatttaacatttctacgcctgctttccgaggctgcatgaaaaatttgaagaaaaccagtggtgtcgttagattgaatgatactgtgggagtaaccaaaaagtgctcggaagactggaaggtaagtgaaagttcagaacctcgtgaaggagtgcttcccagccaacccaccttccgtatccattaacgcagcaacttttgacttctttctgatagcacacagtgttacagtgaactggctcatatacactccccatgtgcttgcaagatgctgaaccttttcaggtttgcacattaactttgtaggaaagtaggaagaccaactatatacacaaaaacttacagatgattgctgacttattatgcagaaaagtaagctctctttctttctgaggttacataaatcacattaatcagtttgagtaaagtgagatagggtaaggtactgtatttcagccaagaaatgattacaatgccagtaatttattccatgtttgcatttcagcttgtgcgatctgcctcattctccagaggaggacaattgagtttcactgatttgggcttaccacctactgaccacctccaggcctcatttggatttcagacctttcaacccagtggcatattattagatcatcagacatgggtatgcagtagtgcattaatatcaaacaagatttaaacctgactcaaagtttgatgttaaaaacaacagagagatttagaaagtggtggagttgtacattttttctatcatcacacagtaaatgctattgtatagttcaaccataaacgttattccccactctggggtaggtcctcaaagaaatcaagtttagaaagtaacattataatttacagagttgcatttgtgtgtactcgcggactcatttttattcttttcaggtatattttataataagagttaaggtggattataactactgtagttaataatgtagcttaaagtttcagagctcagaaagaaaatcagagtgtgtccctatgatttctttttgattgcattaaaggtagctctctccagattgcctttttgcagcagcagcagcagcagctagttggacaatatttatacctggggaattggagaaaataagatccttttctctttcctcatgtacaacagagccacataaattctcttccacaaggagataccatctgtaacttaagcagatttagctagtgtggttatgtagatacagaagtcacctaatatttagaaatgaatatttgtggaatgagtggaatttttaaatagaagtagagtatgattatttctgaatttgtttctttaggattgcagagcacagcagacttctagtatctgtcaagaaaatggctggtggctgactctgtggctctgtaatatcaggaaggccgcccctctcttggtggctgactctgtggctctgtaatactaggaaggccgcccctctcttggtggctgactctgtggctctgtaatattaggaaggctgcccctctcttggtggctgactctgtagctctgtaatatcaggaaggccacccctctcttggtggcttgctcaccagtccttgaggttttatttttaaaatgagccctaaagaagcacatgctaacacttagactataggggtggcttttccatgaaagcaggatgttttgatctagctcttatgatacctaacacttgtttcctctgccacgtgtaggaacacttagtacacaattcacaaaatgatcgagagcagatggaagaattaggttagcaaaagattagatccgccctggacaatgggggaatcctggatatagcatagggacattgccctcaatttcataatgggttagctaaagatacatataagttagcattagtttatgcaattcataatgaatattgccaattgaaaaaaagtcaacacaaagtaaaatcaacaatggctataaccacacactgtaaaacttgttttagactgaaatcttaccaaagaatcacatcttgttgaaaactgcagaaattatacttggtagaaaaaacacaaacaaaattgaaatgacaagtgctgagattgcacattttttaaattaatgattgacaggaagagtcaaattatcttgcccaaatttacatcttcagagttcaacatggagaattggacttcccaaaaataatgactaggaaataaaaaatttataatgactgaagagaagaaatcattgtaatattcttatattaaaaattgaggaatcgagtctttgctgtaaaatttatttagcaatgaattgatccgatagaaataacttcagccaaagaaaaataaaaatagaaaaatttagactgggcatgacggctcacacctgtaatcccagcaccttgggaggccaagccaggagtatctcttgagcccaggggtctgagaccagcctagggaacatagtgagatcctgtctctacaaaaaattacaaacttagccggctgtggtggtgtgcgcctgtggtcccagcttctcaggaggctgaggtgggaggatcgcttgagcctggaacagtgccactgtactctagcctatgcaagacagcaagactctgtctcaaataataataataataagataaaatataaaaatttagaaatgatttaactgttttgtatagtcgattgagaaattaaattggcttaatgaatgtaggtccaaaaaatgattttgacaaattcattggtgttgacataatttgcataagatttttatatttataaacatggagtcaaatatgcaaaaaataatctttagagcaaaaagcaaactcaaagcatttgggtcaaaacatcctgattgttttatacatggtttggatgataaattcagtaaagatacaggcataatccttatatgcaaattagttgatgggtattttctatggtgatttcagacaaggaacctgcaggtcactctggaagatggttacattgaattgagcaccagcgatagcggcggcccaatttttaaatctccacagacgtatatggatggtttactgcattatgtatctgtaataagcgacaactctgggtgagtggaataatacttctgtcagagctgtgagtgagttttactctctttcgtttaatggaattttctggtgtctttttgcaaaatatttgtccttgataccaaaaatacttcactaataagtcttgtccttcttcctttttccatatcaatttcttcataaaaaaataaactgccacacatggtggctcatgtctgtaatcccaacaactaagaaggctgaggcaagagggttgcttgaggccaagagttcgagaccagtcttggaaacacagtgaaaccatgtctctacgaaaactaaaataaaataaaatgtaaataaataaaattttaaaaataaatcagttggatggataaattgtggtgtattcaaatggaatgctatatagcaatgagaaagaaggatctagaactatatgtaatgacatgaatgaccctcacaaacataatgtggaaaacattgagtcacacataaaagttcatctcatatgatttcctttatacaaagttcaaaaacaggcaagaactaatccattccatcagaattcaggatagagggagggaggctatagggttaaagggaatgcacaacagggtacctggggtgctactctgttccgtttctttttctgggtgctggtaatgttggtgtatttctgttgcaaaaattcgttgagctgaacacttatagcctgtgcactttctgtacatgaggctctcataacacagtctttcaaaacgccatctttggcaagatacacccattttaataaaaatgtgatgtgcaaaagaaaatacatgaaaaaagttgtaatgctctttaaaaataaagtctagtttcactagttattttagataacaaatattgaatctgagtcttagacagtgagttggccacatggcaagggcccttttttccagcagttctcacccatgatttgcttttcttccctttcagactacggcttctcatcgatgaccagcttctgagaaatagcaaaaggctaaaacacatttcaagttcccggcagtctctgcgtctgggcgggagcaattttgagggttgtattagcaatgtttttgtccagaggtaggtgatcctctctttgtgggtaactgatgagaacggcctgcccatgggaagggtatctctttggtccagttaacaaagtcagctttgtcaacatgtgctgcacgagacccgcataccacagtctttcaaaatgccatctttggcaagatacacccattaaaaaacccataaaaaactcctgggcccggcctccttttggaggagcagcgttagcatgtaaccttggaaaagacctaattaaaattaacttcagattatggcccggaaaagtattcactggaattttattgcattataatcaagattgtgcaattagatttaatcagctctccacggttttcaaggccaaggaactgcatggaccagtgctgtgctaggaaaccaaatcaccacaatgttgaacgtgatatttaatagagagagagtagctcttggggcttccatgcaagtgtttacatattttttttgatacaaaattattgtttttagataagaggcaaaatcttctccagggtaaggagagggcctggttctggctatgaatctcaggctggaattctcaggctaccatgacagggagcctcccacccatcagggctccatcctccttggccaggatgaggcttagagttctcatttccctcctggttgatgaaacatcttccttgaacatctaattcagggattggagcaggaggtgggagggatggggaaggcccaggggttgttagcaacagcttactgccatgataaggcttggacaagaatcgtgagataaagcaaatttgtccaagactttcctcctcatagtcagataaatccttccataaactcacctctgaagtttccttatatttaccatcattcagtatcatccagtgcccatcttctccctctgtgcatattttacgttcgtatttccacatgacacccatttcaaagaaagaactatagtatcccggccctcccacaattctgccacaatcccaagtcaataaaggtttcttgggctcctcgccggcttctagaggtgatattaaagtaggagatgaaagtttccctaggaaccatgaccataagaatgtgtaatttttaaaaaaatcatggatacataacagttgtattaatacacatttatgggttacatgtgatattttgatacagttctacaatgtgtaatgatcaaatctgggtaactggaatgtgcttcatttcaagcattcatcatttctttgtgttgggaacattccaaatcttctcctctagctattttaaattatacaataaatcatcattaacttgagtcaccctattgtgctgccaaacactagatcatattccttctatctaactgcatttttgtacccattaaccaacccctcttcatccccaaaacatgtactttttgaaatgagctctctctaccagagggtcttcctcgacatgtccaagtttggcagcatctttcatttctgctctttttccaggttatcactgagtcctgaagtcctagatttgaccagtaactctctcaagagagatgtgtccctgggaggctgcagtttaaacaaaccaccttttctaatgttgcttaaaggttctaccaggtttaacaagaccaagacttttcgtatcaaccaggtaagtgtccaaacctaaccctgggtttccctcttccctggaggattcccctgagcctgccttgtgggagatattggggaagggggtgagagctcaccagtccataaagtgggattgatgcattatcaacagttgaatcacaccaaaatgtcaaaatggttttctttttagcttgtatttcgcatcttgatgaaaagttggcaagttttgcactcacagaacagaaccatgacttaggtttcttaatttctgtagctgatgtcttgctgttttaacatttctgctgtgtccccagcaggtcctatgtttttctatagaatataagggccatgctcctcttcctgcccatagacctcccctctgttctgatgcaactcctatgacaagatacgtggtgtacccttgactacagactagaaacacctggggagctttaacaccccaatgcttaggctgcatctgacccaattaagttagatgctcgtggagtgggtgtctcagtagtttgtgaagctccccaggtgattctgaagtacagcactcagagggactgagaggaaatgaaactccttatttggaggagcagaacattgtgatgagttgaacacaggatcagggtttaaggagctccttgctctgctcaaggtcaacaatgtaactttcccaggtctgaggttacaattaatatggttaatggataacagtgggcacctcggatctgccaggcactgcactatgcactccagatggattttcttaccaaatccttcaataaccttatgctgcagtgcagaaaggtaagcagttctgcccaagctcccacaggtggaaggtgagttggagttccaacctaggagcccgtggcctcttgagagctatgtgctcctgttcaacacactttccacttaatgtcaaccacgtgctgcttctctaccaatatttccccactgcacaatgatttgggagagcatgaacagataatacctaataaaatacatgttttatgctattaagaagaaatatacttcataaatccagaagggctgtcattttcccattatgggaacatctttagaattgccccatcaaaattgaagtcatatattcactttttcattgtaaggctgaaagttattgagagactaaattagcccagtgatggtgaactggagagagcaaatggattcaaatctatttacaggatagaatacacatgactcagacaataattgaattgggaagacaagggagaggcaggagttaaaataattctgaggcacccagtctgggttattggatgaatggggatgtcccctccatggagataggagaaggacacgtatttggaggaaaagagaatggagtttgtggtgtattgagtgacaggagtctgcaggacacccaggtgcagaaatttggtgggagactgtcaggagtctctgcgtgggcttcagcagatagggtgggactggggctattaatgtggaaaacgtcagcgaatacactttcatttccccctgttttgcgtaagcccccagtttggatggaataggacattagtctctgcccagtagcagagagaatacagcacagcttagtggttaagtactggactctggagtcagacttcctgggtttgcatccggctttaccatttattaggtatgtgatcttgggcaattattaaacctctctctgggtctatttgctccaatgtaaatgaagataaataatggtaatacctcatgatgttgatgtgaggattaaatgaagtaataaacacaaaatacttagaaaagtgcctggcacatagtaagtatgcattaaatgctagttattattactatgcatgctaatgaaaacctaaatgaaagggcataagatgctacaggagtggtgtggcaggaattttcctaccatgggaatcaggagggttcttctggaggaggtaccccaggaactgggtctggagtgtgggtcgaatttagctgagtgaatattgttgctgcccaagcagaagcccaaagctggaggcaggatgtggctgggactcacgggtgcaagacatgctgcatgcatcctcaccagactgacttcatgctctctctctcccttctcaacacacccctctgagagcagaatcaaatgccaaccttacaggtcaggaaattgagtgtctaagaggttaaaaaaaaagttgccaaagagcatcctgtcagtaaatggtagagtcaggattcaaacttaagactcttttttttccatattaactaaatttttatttttattttttctttttatatatatatattttttattatactttaagttctagggtacatgtgcacaacgtgcaggtttgttacatatgtatacatgtgtcatgttggtgtgctgcacccattaactcgtcatttacattaggtatatctcctaatgctatccctcccccctcccccaccccactacaggccctggtgtgtgacgttccccttcctgtgtccaagtgttcaaacttaagactcttaagcacaaagaacgtgctcttctcccaggcactcagagctcagtggggatctccatcagttaaagcgaagggtggggattcaccttactaggggttggttcagaaatggacatgtgacccctccctcctggacaatgagccctgagaggaagttgagggcgtggcttctgataaagaattccatgttagcacaaagagaaacccaggcagaatccatgcttcttgtgttggacagtgtagtgaggatgtgattcccagaagcacaagaagaacacaagattcaaacttaagcacaaagaatgtgctcttcaagccacatcatgtggcctctacaggcccgagagcctggtgaacagtgggaatggagaaaggagactagagagaggtaaactggaatcacaccctggggccagatcaggcaagcctcatatgacctacatcaattggacatttttctatagtcagtgtaacgtcattgaaaggagtcctgtaaacagctgaaaagattaaagattactaagctggtagcagcctgtgggatggtttggtgtaggaaagttctagagccaaggagtcagattggcaagctaccgtaatcatctaggcaaaagagtcggggctggctgggcaaggtgggtcacacctgtaatcccagcactttgggaggccaaggcaggcaaatcacctgaggtcaggagttcaagaccagcctggccaacatggtgaaaccccgtctctacttaaaatacaaaaattagcccggcttggtggtaggcacctgtaatcccagccactggggaggctgaggcaggagaatcacttgaacccgggaggtggaggttgcagtgagctgagatcgcgccactgcactgcagcccgggcaacagagtgagactccttctcaaaagcaaaaaaaaaaaaaaaaaaaaaaaaaaagagggctgactttcagggcataggcactagaaatgaaaaggaaggagtggaaacaaaatatgtcacacagaagaagagtaggacatgagaactgaatgcctgaatgcatgatagaggccagggaggcgggtgtccatgaggaccaagattttgagcctggatgctttaaaggatgatgatgccattaagagaattaagggacatttggtggcaaaggctgtctttcaaaactgttcatcttgatgcttatgctgctgacacacggagaagactccagagagggagcaaggcccactggtatgagtcccaggcaggagcccaggctgggttttaatctcagtaggatcaaggtttggctgatataagtaactcacttaagtttctgttgggtacagtagaacgtctccattcagcaacgtgcaagcatcattttaaataactgatttcaagtttgcgttctgagcactatatccaggaaatgggtcagggaagaaaacccactcctgaaggaatgtgaatcttttgggaagcctttagctgctgaatcagaaaacccactgcaaaattaatgacttaaacaataataataatctcacacagtgagccatgcaggggtaggtgaggcttgaggcctggcccatcaggagttggctctgcttcctcttggtcctcttggctccatcctgggtgcttctgggaatcacatccgcaccacaccatccagcacaagaagcaccagttctgcctgggtttctcttcgtgctaatatggaattatttaccagaagccccgccttcagcttcctctcagggctcattggccagcagggaggggtcacgtgtttatttctgaaccaacccctagtacggtgaatccctaccctttgctttgactgatggagatccccactgagctctgagcgcctgggaaaagcgcatgggcatttcagaacttgagctctgcggtggagaaaagaggggcagggctggggaatctcagttacttccaacaattttcctagtcacatttaacatttattatggttgtttttctgcattaaaactcagtcccattcaaaagttcaaacttctctgcatgagtcaactctggtggaagtggggacaggatgtggtcccctcccttctctttctctcctgctatcttggtcctttcacctgccctgttgcccaagtgaatggttgttaggggaggtggccacaggtttgcagttccatgtttcactggcaggctgtgggtgtctcggtgccgctggccaaatgctggccccctcaagcgacactgcagttcttccaatgctcagtggtggaaaggggcaccaggcagccactggtcccaggtgcggcagctttcagagaagaacccagacttgtgtaagatgagaataacaggcatgctccccaaaggagggagagaaagggggggtatttagactctcctaaactttgttttccccaaaagaatgagcccctctgcctcctagccctgtcttacaccttcctggtggcaaaatgctcacaaatcaaagccacactagggcattgaaggggattacgaggatctggcttcgggaaaggttaaagagctaaataaagaatgagctctccattctgcccactccataccagtcagtgacccgcaggaagggctctcagcggaaacttcccatctccatggtaccaggccttctattgccctactgaattcctcacttaggatcaagggtgaaaattaagcaatgtacttagcaagataagcattcttcactctttcccctgataattgtgttgctcttttcccatgcagctgttgcaggacacaccagtggcctccccaaggagcgtgaaggtgtggcaagatgcttgctcaccacttcccaagacccaggccaatcatggagccctccagtttggggacattcccaccagccacttgctattcaagcttcctcaggagctgctgaaacccaggtattatttagctttcctgccccagcaccagctcagaacctgactctgcgattccacctcagggaagtctgactgccatgacaccatgcagctctctctaatgaaggtggcactaccatttttgtgcaaagaggtgctggcctgcacaggacagggagcgtgattgcctgccatgtgctttcccaacagctggaggcaaacgtgacgacagtgtacttctcagaggctgaaacaatcagctcaggtctggtttagaattgatggtgttctaaaaataaggatgacattttttttctaaagctgctgtttatttccatgataaatcacctttcttttcttgtattctgtagtgaaagtaaaatcattcttttttggtagacgcagtgccagatagatcatttttagagaatacatttggcctttttgcgctaacaagttgcacctcttttggggaggcgggaatgagcagaaatattaattatgtcagaaaaaaattagaaaaacaagatttgtcattttcaggtgatttgaaggagccatagataaaaaggtactgaccttttcttcacggctttcccacagaggcagaattgcccggggggctaaaaggagctggctctaacatctggctttcagtcctgcttcaccacttactggctgggtgactccagaccatgtgccagggcagcccctctgagacacagacactaagatgggattagatgggcaagaggttcattgtggggaagcctgtgagagatgaccagaaggggacagagatgggggcaggcagggagagcccgcagatggctgtgggcctgcagatactgtgaggggagggcgcagggaggacagagccgggtaggaagggcctcgggtcgcagtccacagactgtaacacagtctcagccaggtgcctgcagtgcccccaagcagagatcatctctgagaagagctcagtgttggctataaatggcccggctctaatacccccgagtgtcactgaagacctagggcatggcagccccactgtgctccctgcagcagcttctcttggagcacgacttcatggctgccacatgccgtttaacttctctaagcctaagctgtccctctatgcctgtcttgcgtgttagcagattgctacctctctctggacctcaattttcctgttagttaaatgggctcgatgatgcttttcttgcagggaggagaggtcatagcttataaggaggctggcccttgaagcccactcagcaagctgtgagcatgcatcacaggcagagagaggtaaaggtcagagagagattgactgccaagctctgaaggagaaagcctgtgtggacagctccacgtctccagctgccccatgcaaagtcttggggtccctcattttccaaaactgtgctagtagaagctaaggcagaaggagaggagattgtccctccagttgtcccctcccctggctactccttggtagggaggccccactccccacccctgctctcttggtcaagctgaccttaatgacaatgacctccctctttcttttctttttttttttttttgagacggaatatcactctgtcacccaggctggagtacagtggtgcgacttggctcactgcaacttccacctcctgggttcacactattctcctgcctcagcctcctgagtagctgggactataggcacccgccaccacgcccggctaatttttttgtatttttattagagatggggtttcactatgttggtcaggctggtctcgaactcctgacctcgtgatccgcccacctcggcctcccaaagtgctgggattacaggcgtgagccaccgcgcccggccaacctctctctttcaagaaactgcctggaggcccctttccccagcctcccgcctctggcctcccccttgtggcctctccatcagcttggcgccccccccccgcccggcagcttctctctcaacacattcagtgcagtgagttaccaacttctaacgattcaacccctgtgccttcccgtccaacattaaaccgtacatcattaatgaaaaagtaacattttaaaaggtaaaattttttaaaaagtcaaacagtaaatataattttcaacttatattttagccccaaatgttgtagcaatcagttattttcagaaagttgtaagagttggaggattctgttgttctcattctgatttacattctagcagtgttctgacactcctttaaactggtgccattgctttacccctttggtgaatgtataaaaatgctctttagctctctgccctaccctcccatcctccagcaatgaagagtcatagctacagtatcatgtactgggatctgaatccactgctgcctttttttgggtgttagtcagttagtcttttatgaaagaaagttgctttaggaaacagttctggaaagcaaatgtcaaatctgatcaccaggcccacatatggaaagtacattctattctgcagcacgttctaatatcctccttaacttggctacccctcattctccaaacctccgcactaacacacagacacaccaagagaaatattgagcagtgttaccatctggttggcttaatttaacaaatatagatttctctttcgttttgaagaacattgccctcaaggaaacttgctaatctgaagaataaatgtgcatcttagcctcacagaattaaaaagcaaagagaattaacagtataatttgtttcttccacttctggtttctgcctccaaatttcccatttaccatttaattcaattcagtaactatttatcgagtgcctactgcgtaataggcactggggatgccgctgtgagtgggatgaacccatgcctcctatctggtgtctgcttaagacgttagccacaggaatggctgaggacagcctgttgacatctgcatctcccacgaccctttcacgcacacctttatgcatccctctcagggcacccctgcaccataaaccactcaaggaaggaaacatccatcgttgcattcctactgtccagcactgcaccttatgcatcttccacactcattaaatacttgtttgatgggtggatggatggatgagtgtgagttttcataaaaagtaaagcttgcttagctggatgtgcatagaacatgtaaccatcatgcaaatgaatactaacttgcactctgcttttttttttttttttttagacagagccgctgtgtcacccaggctggagtgcagtggcacgatcttggctcactacaacctccacctcctgggttcaagcgattctcctgcctcagcctcccaagttagttgggattacaggcaccaccaccacgcccagctaatttttgtatttttagtagagacagggtttccccatgttggccaggctggtcttgaactcctgacctcaggtgatccacccacctcggcctcccaaagtgctaggattttcccatagtgctgagattacaggcgtgagccaccttgcttggcacactctgcttttactgtatgatatttgcctcattcttcttccttcacagggagggtattagggtctaagaaatgtagagatgggtgggagaaggtgggtctgtgcttccgtgtctttggttaaatctgtctaacagaaaggaaaggcttctttgatgcttaaatcacatccttgttattcaagttgtcccctacttctcctacgacttccctctccacgaatacatacaaaacagaatgcatattcattgagtttgaaaagtacaggcttctcagtgaaataagccagtcacaaaaggacaagtcccctacaattccacttacatgaggtatctcaagtagtcgtgttcatcgagagagaaagtagagtggtggtttgttgtcaggggctgtgggaagcgagactagggagctcttgtttcatgggtacaagtttcagttttgcaagatgaaaagagttctcgagattgattgtacaacaatctgaatgtacttaacagtactgaactatacacttaaaaaaggttaagatggcacattttaggttagcgtattttaccctaactttttaaaacatggactttttataaaagattcagacatgtttcttcttgccatgtgctgggacttacaccactagctaagtttgccacaaaagttccatgttattccccaatgtagtaaggaaattatacaacaaaaccattaacagctggaatagaatagctttttaaagtttccagagaaacgggtcatttaatcagtacctacgttagcttatccatttgaaaaatgggggttgggtgtttgctccccaccctctgtctcagtgctgagattcgaaggaacgctgaacacctctatttcccttcatcgccgatgttcccaacaggtcacagtttgctgtggacatgcagacaacatcctccagaggactggtgtttcacacgggcactaagaactcctttatggctctttatctttcaaaaggacgtctggtctttgcactggggacagatgggaaaaaattgaggatcaaaagcaaggagaaatgcaatgatgggaaatggcacacggtaagagctggggctgtgtcagtatctccagttggtgtggaattcactgttggagtcgctgaaaataggagtcccagcatccttcccagacatgagggcgtggagtgggagagcttgtgtgcttgcaggcgctgcgttcccagcatctcagtactggaggccgcggcacacacattgcatggctgtcatcctagacagtaaagtcaagatgggctttactgatgcttcttccatcccctccagccctcccccaggctgcctcatgccccttgcctactctaactccttcatcctggaccatttcttccccttatggccaatttccaggcctccaggcccctctctggacctggaatgaccctagcatcttggctcttgcttaaagccattccagatttcaagaaataccatttaaggcaataagggacctatttatttctctaatgaggcaactggacttcagaaaatgtaagtgacttgacaagttgcattcccttagtcattcagctgccttcctggaacacataagcaaacaatcctcaatgtaatgtcagagattggtaagtgctttgagaaaacactagagcaaggtaagaaaatgacagagcagggagactattttaaataaggcagtagagaaagccctggtacagcaggtggtagtcacatgaagttatggggagggggttccaggaagagggaagagcaaataacaaggacctggaggtgggaattagctgaatgaacaaaacacaaagcaataagaaatggaattagagaggaagacagagcccagatcatttaagctttgaaggccaagctccgactttggactttatttgaaagtgtctgtaaagcttttaaagagtcttaaaactcttggccaggcgcggtggctcatgcctgtaatcccagcactttgggaggccaaggcgggctgatcacaaggtcaggagttcgagaccagcccgaccaacatggtgaaaccccatctttactaaaaatacaaacattagctgggcatggtggcatgcacctgtaatcccagctactcaggaggctgaggcaggagaatcgcttgaactcaggaggtggaggttgcagtgagccgagatcacaccactgcactccagcctgggcgacagagcaagactctgtcaaaaaaataaaaataaaaaaaataaaactcttacatgtacagattcatatattatttaattctttagctgaagagactgccagggggcaagagtagcagcagggggcccacatggctgctattgcctttgcttgcggaggctgtggggaggtcgggagaagtgaccgccaggacgcatgctgaaggtagaaccacgcggccttgctgatggatcacatatagagggtgagaggaagagagggtccagatcacatcctgtgatttggggccagcaattgagtcattagtgggcatttactgagatgaagatggagaagaggcagatgtggccaggaggagagcagttcagagctgggggagaatgaggatttctgtcgtgaacatctcagggttgagtggcctgtcagaccttcaagcccaggtgtcagcaggcagtagaggccaaaggtcacagcttggcatataaatggaagtgtccgtagtgaatagtctcaccacacctatgagatggcagaatccacaccagaccccagggatcagaaattttagcaaagagtttaaacactcctcttgtttgaagagaagtgccctcgttctacctgctccaagaggccagcccagggtgccacgactccaacacacccccgtccccagcactgtataaactgtccctgcccctttgttacatggagggggttgcctgtggctgtgccttgaactgtttctcttttgtgtaagtttccagatgaattctataatctcttttgattagttcacttctaagcaacctttttttttcagttccccttttgagctcagtttgttcagtatttcacataatctcacaaaacgatggtgatagtgataaccggaggaaaaaatctctcatcttttgaagctatttgaaggagcatgaaaacatttttttttaatttggccactaatatttaataaaatacaacaccaattgtcaaaggtaaaaatacaactcacgtatctttcttactctgaaggtggtgtttggccatgatggggaaaaggggcgcttggttgtggatggactgagggcccgggagggaagtttgcctggaaactccaccatcagcatcagagcgccagtttacctgggatcacctccatcagggaaaccaaaggtaaatagttatgttcagagccatggacagaaacaattcaccttatattataggcataattgtatgagatattcaaaatactcaccatatgagaatctcaaaatactttaaatgatttttaaggatctaattaatgttcacaaccacatagagtaagtgcccatttcttaacccaaagccttcatttctaaggtgcaggttgagacgcaggccctgaaagggtgaagatagagcttctctgccacttcctaaacctgaatctattggcttctcctccagggaatgcaaaaacgtaggttttaggttatagacagagattttttggttaacataatgtgtttcaaattacagtaatttgtgccattttcaccatctttgccataaggtaaaacattggcttaactgttttctctccatcaaactatttattttaaatgtgcttctatgggatctttttatctctcccataaatggaaacccaatattctttaccataaataatagataaccctgagaaataaacatttgaaaaccaaacactgttaatatcaaactaagtagtgtgacctatgtgttctttgcttggagaaaaaggtgcttaacacgtaatcaagagggtgtttaagacatactagcacaaagccaaaagctgttccttgtcctcgtccaaacgctagaaagagaattgaaaaaggaataacttaataatggaatatgtgttttaatgttatttgatgtctgaaataacaaaattatctcaaaaacccatcttgggaatgccagacgaagggaaagttgggactccctctgtccccagagaggaggggtgcttttctaggtttgtcaagttcaaggctctgatggggcgctctgatggggccacagctccagggctgagctctgtgagtgccctctcccttcctctctcctaccccctgccacagcgttaattgcaccagggttacttgaggcagccttgggcacctgtctttcttgtctcagatttgcctttccccccaccccacaaagttaagtaagatgagcctatcaacagctcaggtctagggactgtcctccgccttaatgcaatttttgcccttttcctccagacccagtggcacattttggtgtgatgtttgcttgcagtgggaaaaaaagagccccgggctcaaatctgggcctagaaatgggcataatgaaagcaggtctctccaccagcttggatgctagctgcttaggctgccctagccttgaccagggctcagcctggccctcttgggttttgcactggggtttgggccagagctccagtgttatacaataaagtatatttattataccccagcaggcaacagagtattactttgctttgctatatgcagtaacttatatatatttcataaaaatacataccatattatccattatttataatacacattatatatataatatacaccacacattaattgctaaggaggattctcattgttaatgtttacttttctcaacctctgttcctattttctttttttttttttttttgagacggagtcttgctctgtcgcccaggctggagtgcagtggcaccatctcagctcactgcaagctccgcctcctgggttcacaccattctccttcctcagcctcctaagtagctgggactacaggcgcctgccaccatgcctggctaattttttgtattttttagtagagacggggtttcaccgtgttagccagaatggtctcgatctcctgacctcgtgatctgccctcctcggcctcccaaagtgctgggattacaggcgtgagccaccgtgcccggcccctattttcaactcagagaaatcacaggatggggcaggatttgggtattctttggctttggataaattctcttcaaaccaccttaatcacacccagcatctaacatctgggccaaatagtagcaccccatttacaatactctttacagaccaagtttctttttgcagccttctttcaacctgagggtataaaccatctcatgggccctcccacatatccttttcaggagcaggccacatccgatcagtgtctgcctctgaacaccggcactgcagtcagcccttagggatcaatgctgggttctggcccatcctggggagtcctagctttaggacacagctttttcattgtgtagcatgacaaatcttaagaaactaaaagtttcatagggaatccaatcagtagtttactgttgatgctggcaccatgtgcatttatcacatcaacattttctctttctttctttttttttttttgagttggagtcttgctctgtcacccaggctggagtgcagtagtacgatctcggctcactgcaacctccgcctcctgagttcaaacgattctcctgcctcagtctcctgcatagctgggactacaggcacctgccaccacacctggctaatttttgtatttttagtagagacggggtttcaccatgttggccaggctggcctcaaactcctgacctcaggtgatccagcagcctcagcctcccaaagtgctgggattacaggtgtgagccactgtgcctggccaccattttcttttaaagttaccatatctttattaccatgtctgacttgtaggattccagagtcctaaaggcattcattctagaagggagttcaagagttttattcggtgaatctcaaactttcttgagaattttatgaaatttacagtcctccccaggaaaatgcacacgcagaacacacctggtgtataatataggagagcacagaaccccacaagcctgttcctgggccccaggagaggagtcccctgttccagccggctctaggcaggcatggggctccacgcaagcccactgtcaatgcacactgtgtcttattttaactctgcagcattcgtgacttggtggtggtgcactgagcccaacaatgtaggcagatttttttgcattttattattttgggaacattttggcctctttatttttgtcagctgccctgcagtaagctaacacactgcctcgtggaactctaagaagtggtttgtatctgcaaagagacggtgaaatctgtgaactgtaaggtggaaatttcccttgttgctgctccatctgtgaggaccagggtcaggtcaaccttccctgttcttattctagcacaagctagcaacctgcactagcccgccctcctgcacacaccactttttttggtggcacctgcaatcttcgaccacccacccaacatctggtatacaggtttttcttggcactctgggcagagagccaaatagaacagctattagaacctgagtttgaagaacctgacttggaagcgggaagaatgaatccctacctaccttcccccttttgctgacaagctgcagtgcccttcgccttggctacccatgcctttcttggaggtgtaggtaatgagctttttcttttctgcttggttgcagagcctccccacaaacagctttgtgggatgcctgaagaactttcagctggattcaaaacccttgtataccccttcttcaagcttcggggtgtcttcctgcttgggtggtcctttggagaaaggcatttatttctctgaagaaggaggtcatgtcgtcttgggtaaggagcagttctatagaatttaagtctttgcatcttaagaactgtatcctgttttctttcatggtgatgctttaacttttgctttgtttctcttttgaaagctcactctgtattgttggggccagaatttaagcttgttttcagcatccgcccaagaagtctcactgggatcctaatacacatcggaagtcagcccgggaagcacttatgtgtttacctggaggcaggaaaggtgtgtagcagtctgatgccatggggagggtctgtagaaaccagcttcaatgtctggaggccacagcgggtcaggtttgtagtagagaatgggatccaatcttgtatttaagagccttgacttcagtgctaacttaccattttcctttagcaagtaattttatcatcatgttttctgttcttaatttttaaaactgggaaaactcaaacaagtcgggctgaattgcaggtccagcacttggttatatggtcctaaggatgttactcaagctctttcagacttatctgtaaaatgtagataataactcttataacttaaggcttttgtcaagattatagaaatcgccatatactcaattcttacagattctttcttcatctctgcagcctcatttttccatcactcacaggcctgagtcaacatcttattttccaccacccagttatatctctttccttctcaaagatgtctctttaaaaccagattcttctaggaagacccttagttgaggcctcgagtgaaagattgatataatatgccattttctttcatctccgtccttccacagtttactaaatgtgaggggaaaagaatcccagaagaaaataaaatgcccaaaattcctagaatactttctattgtagtctttaattaagtctgagtaggtctctggtagcccagaaaagcaagtaactatccacttgcaaggtggttgagacaattctggtttttcagaggaggagctggagagagtctctactgagagtctctgggagggaattattctcaggaaaacaaatcaagacccgatgaccttcataatagcagtgacattgtttagctcaaaaattgcctgtgaataggctgtcccatctagctacatgcaaattaaatgtaaattatttataaacacacttattttagtcctctcatttcattccccttgattcaactcttggaagatcctggaggagaccctgatttagaaagcaggaatgtgggattctgcacaaaacagactgcgtgcctggctcccgatgcgtgcccagagcaaactcaatcattttgcttgtttaaagtcttgccatgcatggaactattacagttggctggcccttgcagcaggctgtaggcctccaccagtagctttgccttccacatctcacatatccttccatacagagccactgtcacgcattaattgctaaggaggattccaatcagtaacctttgagttgagctgatgggggcggggtttggattagaagggaacaactcattgccattggcaacgacttcaggccagggtccaccctggtttatagttgcctggaagggatgcagcagagagatctctggaagcattggaccccatgtggtcaaatgcttcaaaagcggaggagggccaatatctaatgtgcccttaagctgtcagttggcccggtttggggagggaagatggcaggggaaggtcggctccacctgccttcctgaaggaaataggaaaatgcatgtgtgttccaggtcacggcctctatggacagtggggcaggtgggacctcaacgtcggtcacaccaaagcagtctctgtgtgatggacagtggcactcggtggcaggtatgttgtccagtagctgattgttcatgcactaaaacaggccccctttccattttgacttgaacatcccaaaggcagcctcagcccctccatccacagtgcctgaccagggccagcccccgaggctaacgtgtccattcacaaccccagccatgcttccgtcactcatggttgccacctccagttctccagaacttatcaaatattttattgttgctgttgttgttgtttgtttgtttttggagcccagcacactaataagctaggctagttttcaagatagtataacgttgtgatttagattttggctctgaagttagaacagaggtcaaatcttagttccatccctttccctgtgtgaccttggacaagttgcttaattgttctttaccttcggtttcctcttctgtaaaatggaaataaaaatagggtatggctcttaaggttgtggaaattaaatgggacaatgtgtgaaaggttattagcccagtgtctgatatgtagtcagtgttcagtaagtatctgttttttgttaaggctcattgttgtgttatttttttcaacaaccatttaatattaatgctaactatttagacaacccgatgagtagagagcaagcatttcctctcaaaaagaatctgttattttattaattatttgtggatattagagatctatgaacccatattggctaaaataccttttgtaaaaaagtggccttttcttggctaatttaaaagataactacattgcaattagctgagatcattaacatgagaggaattttgtgtcgagagtcaaaagagctgtctttggcatcagctttcagaagtcagtgtcttcatagaaagtagctgagatcacatgaaatcagcatggcctctggacacaggagaccagagcttaaatcccaactcttggtaaccaagccatcttgtcaggctcctcagtgagacacattctcttatctgggaaatggggaatgataatttcttcttcacagattcattttaagggtaaaattcattcatgtacgtggaagcactacctggtgtttagaggaagttaattgaatttatatctaagctgaccaaatttctgcaaacagcactcccacaggtctagtatgaaggagttaaaacaaagtcaatggtgtagacattaagcagggctcacctccgatgatagacctaaccagcctcctttccccagtcaccataaaacaacacatcctgcacctggaactggacacagacagtagctacacagctggacagatccccttcccacctgccagcactcaagagccactacaccttggaggtgctccaggtaactcttgtcctgacttctataatgtgttgccctgtgtcagctctgaacattcacttcttaattagtggcagggcagctcttggctggacagtggagatggtgaggccctttgcactggcatgtggggaaaggcagttgctggaaaggagcacttgtcaggtcagcccaggccccattactgctgttgccccttgccccaagcctgtaattttgttttttttttttgtttttttttttgtttttttttgagatggagtctcactctgttgcccaggctggagagcagtgatgtgatctcagctcaccacaacctctgcctcccaagttcaagctattctcctgcctcagcctcccaagtagctgggactacaggcacatgccaccacgcctggataatttttgtgtttttagtagaggcagggttttgctatgttggccaggctggtcacaaactcctgacctcaggtgatccacccgcctcagcctttcaaagtgctgggattacaggtgtgagccactgcacctggccccaagcctataatttataatcctttcttaagaggttgcattaacctagaagcctgataccagtaaagagtcaggaaaagggtctgaaaaactggtctctgtcctcttcaggtatttagttttactagtgagttattaagcttttggggaccggactgggagaatcaggtaggctgaaatggagtcaagttcaagactggaatgttgtctgggaagagccttttcattcttcattgttttctgtccctccaaatacactgtaatccggttgttaattgtataggtctttcattacccataaaaagtaccagtttagagctattgatttgggcagtggattctcctctgaagaacttgaacagtagccttgttgctgatttatcacagcaggtggagtgtcagacgcctgcctgaagtggagagggctgagtgggctgagatgtgaagtcactttagctttctccactaagactatcttttgcctggcatggtggctcacacctgtaatcccagagctttgggaggctgaggcgggaggatcacttgaggccaggagttcaagaccagcctgggcaacatagtgagaccccatctctacaaaaacattaaaaattagcccagggtggtggcccacacctctagtcctggctacttggcagactgaggtgtgaggattgtgtgagcccaggaatcccaggtttacagagagctgtgatcacactactgtacttcagcctgggtaacagagcaggaccctgtctaaaaaaaaaaaaaaaaaaaaaatactatcttttaaaatccagggaacagtccctggacagtatgaattatttactgaatgcctctccactttctctttcagccaatttgacgacactgaggatccctgtgtggaaatcattctttggctgtctgaggaatattcatgtcaatcacatccctgtccctgtcactgaagccttggaagtccaggggcctgtcagtctgaatggttgtcctgaccagtaacccaagcctatttcacagcaaggaaattcaccttcaaaagcactgattacccaatgcacctccctccccagctcgagatcattcttcactcaggacacaaaccagacaggtttaatagcgaatctaattttgaattctgaccatggatacccatcactttggcattcagtgctacatgtgtattttatataaaaatcccatttcttgaagataaaaaaattgttattcaaattgttatgcacagaatgtttttggtaatattaatttccactaaaaaattaaatgtcttttaagaaacattcttttccacttgttaaaaaaattaaatatattttaaagcactttaagaatatgaaactttcatatatgttaaaggattataatttatggaattaaaaaatgcagtgtagtccttaaattatgatgttttattagcataaaagaagtggcttgatggtcattgttaattggattaattcttcagcaccagttcaatgtgttacctacaacatagtcttctacagataatcactgagcatatactgatgagggttttgtgtgtgttcactattgcaactacagtgagggataagaaataaattcctgcccttaaggaatatgcagtccaattggggagacatataatattcataaaatagtaacttacaaacaaactgaactaatgaacccattaattaatgaagcccattggtttcccaatcctagccttccccagcctgctaccaaccaagtctagattatgatgatcaattccttgagggcacaaactacctggtagggaagctgagatggatgtaacgcaccatcactgaagcttcatatggcaagctaaccaaagtcagtgggatggaggactcacttctagttttatctacaaaataatgaatgatgtactgaaccaatattattacccagcaccactttccctaacagagaaggctacacaagcatttccatatcctctacatagtatttgttcatcagaagaaaaataacaaataattctaaaaaattggatatagtaatcctatgtggtacccttatagctacacaccctgcacctttgaaactgagtcacatccccttcaacccaatgttctcttctgacttccacactgcagtcttgtggacatgctttctaaccacatctatacagaaattgaatgttctcctggagaggtagcgaggtccccatcataggagtattcaacagaggctgggtggtggtccttagggatgccatgttgggttggaggttaaactacatgactctaagctatgtgctttcttgaaatattgattttaaaatgaaaaattcaccaggtgatgaccagccaggaactgagtctgcaagaggatcatccattttaacacctgcctttggcaggtctacactaagccggtggttctctcttctgggtccccagtgttaacctcactgaatctaaggagttattcactggtgccgattatttgttagcacttcctagattcattagaaaggggtaatgaccaggtgtggtggctcacacctgtaatcccagcactttgggaggccaaggcaggagaattgcttgaggccaggagtttgagaccagcctgggcaacatagcaagaccctgtctctacaaaacaataaaaaaaaattagctgggcttggtggcacatgcctgtagtcccagatactctggaggtcgaggtgggaggatcacttgagcccaggaggttgaggctgcagtgaactaggatcaccccactgtactccagcctgtgtctaaaaaagcaaaagaaaaacaaaaagaaagggctagtttattcctcactgactaataccgatggttttcccccatttcgtaaaagcttgaagaacagccacctatctgcccttgctgaatacagttccagccaccagaaagcagcagagagagtcacagatgaaattacagctgaggaaaaagaacaccctcagtgtggctatttgcagattgtaaatatgtgtttcctgaaaagaatgtctagagctccttgactgaactttcatgagaattgtttgtgaactatcaaatgctatacaaatattgtcactggtatgctcttcctggctcataggcacacacaaattgggccgaccttgtgaggagagtctcgggagggacagcaggatctctggtagacaacactgaccagttcacgatgggtccaccattgttccatcttcgttcagtggattggggactggaaacagtgcatctccctgggcagcaggcacttcaggggcaccaagtaactgtaaagcaatcgtgggtctgcacgggcctgccttcttcagcatccctccaggtgctggctgacctcactccttaatacgtacagttattgagtttttgccgtgctcat
